United States Patent Application Publication US 2007/0054278 A1 - sequence listing, part 49

SEQ ID NO: 94822 - DNA, 21891 bp, Homo sapiens
  misc_feature (1)...(21891): n = A,T,C or G
gtgctgggattacaggcgtgagccaccacacccagccccagcagaggtttcgaggtagaatttctcccagaatgctgtggctcttctgtctgtccactggggagggggaggtcagtaagaggtgcatcaggagggggtcggttccccagggggatgttcagtggagcatcaggaggtgggactctggtgggcctagtccccaactcctcaatctctcaccccctcagtgggacccagtggagactggcccactcattgctaaagtgagcttcctgaagcccctctcatcacagccctctgccctgaaaccttcactggctccccattcactggccagctccaaacttacagacttgtctggcgtttgaggccttcctgcacctccatctgcacctgcacccctctcccgggtgccttagtgaggctggtgcttcctcatctctgtgcagagggccttacccccacccctccttgggagggggcgcctcccaccagctgcaaacctatgagtggcagccgctcctctctgggcttcccgtccagctgtttcctgcatccatttgtttcctgcggatgctcagtggttcccactgagctcagccccaccagccaggctccctggggcaatccccaatcccactacgtgctgactggtgggtccacatgtgaacttcagagtgaggaggccctggcacatctcctgcaaccgccatgccagcttgttttcaagccttggaatttttttcccttcccttcccttcccttcttttcttcccttcttctcttccccccccctcttcccttcccttccctccttaaacatccattcttcccttcctttcttcccttcccttctttccttcttcccttcccttcttctcttccttttttcccttcccctcttccctccctctcttccctccccctcttcccccttccctcccccctttacttcccttccctcgccctcttcccttccctttccttcccttcccttacttcccttcccttctttccttcccttggtcccttcccctcttcccttccctctagccttcccttcttcccttcttcccttccccttcttccccaacccttcttcccctcccccggggccctaccatcgcctatagaccaatgcgaagggtgcgttacattaagtagaacgggtatactgtccatacctttttagacggtgtcttgctctgtcactcagactggagtgcagtggcatgatctgagcttactgtaacctctgccccctggttcaagcaactaggattacaggcgtgcaccaccacacccagctaatttttatatttttagtagaggtgggccagggtgatctcacactcctgacctcaagtgagctgcccgcctcggcctcccaaagtgctgggattacaagcatgagccactgcgcctggctggaattttttctttaaccaaaatattttcattttaattttgttcctaaatgtcacaagctacaaaatattttaaaaaaattttttaattagtttcatttttatatgtttctgtttttagattttttttatcataaaacaaataatacaaatgatataagatagaaagggagggtattgccgagtcctattagggtataatcttccagatctttcctccatgcaattttttctttttctgagacaaggtcatgctctgtggctcaggctggagtacactggtgtgatcacggtttactgtagccttgatctcctggacttgagcaatcctcccacctcagcctcccaagtagctgggactataggcaggcaccaccatacttggataattaaaacttttttttttttttttgtagagacagggtcttgctatgttgcccaggctggtctcaaactcctgggctcaagtgatcctcctgcctcagcctcccaaagtgctgggattacagatgtgagccacggcgcccaggcttcatgcaattcttttttctttcactattccagtttttctctccctttcttttttttctttccttaggttatacctgggaaataaaattctgaaacgttaatattccagaattggtagaaaatccatagttcacatgcaaataaaacggatacttaaaattgattttttaattttaaaaatttatttattttattttaaaaattgtggtaaaaaacgtgtaacataaaattaatcatcttaacaattttcacactctgttttggataacagagctccaaaactttgtcattttgcagatctgagactctgtacccattaaacagcaattcttccttcctcattctccccagctcctggcaaccaccattctacttttttttctatgagtttgactcctttagatacttcaatgtaaaggaatcatacagtatttgcctttttgtgatgggcttatttcacttacataatgtccccaagatttatccatgttaaagttattttttaatatatataaagtaatagacgcttgttgtatggaaaagcaaaaatgcttgggtggctgggcactgtggcgcgcacctgtaatctcagcactttgggaggccaaggcaggaggattgctggagcccaggaattttaggctgcggtgagctataattttgacatagcactccagcctgggcaacaaagtgagaccctgtctctttaaaaaaaaaaaaaaaaaaaaaaaaaaaagcgtggggggctgggcacagtggctcacgcctgtaatcccagcactttgggaggccgaggcaggcagatcacttgaggtcaggagttcgagaccaacctggccaatatggtgaaaccctgtctctattaaaaatacaaaaattagccgggcgtagtggcacgtgcctgtagtcccagctactggggggtcttgagaatcgcttgagcccaggaggcagaggttgcagtgagccaagattgtggcactgcactccagcctgggcaacagagcaagtatccgtctcaaaaaataaataaataaaataaaataataataataataataaaatgccggctaggcacggtggctcacgcctgtaatcccagcacttttggaggccaaggccagcagatcatctgaggttgggagttcgagaccaacctgaccaaagtggaggaaccccgtctctactaaaaatacaaaattagccgagcgtagtggcgcatgcctgtaatcccagctactcaggaaggctgaggcaggagaattgcttgaacccgggaggcagaggttgcggcgaatggagatcacgccattacgctccagtcttggccacaaaagcaaaactccatctcaaaaaaaaaaaaaaaaaaaagaaaaaagaaaaagaaaagcctggggaagcctttaagtaggaagtggaagtgtcatctccagccaggcggtcataggcacacacctgccttctctgtcctgtttcatttcacccactctaagatgttgtcagtttgattgtaagacaatgtaattttaactttgtagagttacggtgcaaaaaaaaaaaaaagtctgagaatatattttacacacacacacacatttgcatgtttagagtcttttttaaatttactacttttatttaaaaaaaaataggggccgggcatggtggctcacacctgtaatcccagcactttgggaggccgaggcgggtggatcacgaggtcaggagtttgagaccagcctggccaacatggtgaaaccccgtctctactaaagatacaaaaagttagccgggtgtggtggtgcatggctgtaatcctagctactcaggaggctgaggcaggagaatcgcttgaacccaggaggcggaggttgcagtgacccgagatcacaccattgcactccagtctgggcgacagagtgagactccatctcaaaaaaaaaaaaaagaaaagaaaatacagacagtgtctcactatgttgcccaggctggtcttgaactcctggcctcaactgatcctcctgtatcggcctcccaaagtactgggattacaggcgtgagccactgctcccagcctccagtcatttttatgcaggtgggatcagaagagtgcagtggggctttttgcctatttctttttttttttttttttttttttttttgagacagagtttcgctcttcttgccttgttgcccagtctggagtgcaatggcgtgatctcggctcaccgcaacctctgcctcctgggttcaagctattcttctgcctcagcctcccaagtaggtgggattacaggggcgcaccaccatgtccagctaatttttatttttagtagagacggggtttcaccatgttgaccaggctggtctcgaactcctgacctcaggtgatctacccgcctcaggctcccaaaatgctgggattacaggtgtgagccaccgcgcccagcctttttgcctatttcttaccaatgctatgggtgtctgaagcctcttgtcccattaaccacaaacaacttggacttcctttctcactcagaccctatgggaaagttgctaactcctcacccaccgtggctgtgccatcatcccagtgagtccctgctggcactttaaaactttcctatgcaaatttgtgcccacatgtttccttgaaacaaatttcttaaagtagaagggcgcatttgaagactgtgtgtgtgtgtgtgtgtgtgtgtgtgtgtgtgttttatttttagagacgggatctcgttatgtttcccaggctggtgttagaattcctgggctcaagtgagctcaagtgatcctcccacctcgtcctcctgaagtggtggggttaacaggagtgaccattatgcccggtccatttgaaattttgatttactttgtcaattgctttccccaaaggtgccaatgcacacacccttgagagggcctttcaaacagcttctaatgcaacacctctgaccccactgcacctgcccccccacagatggggaaactaaggtcccaagaagtaaggacttatctgacatcacaggtagcagagacccaggcctcctggtctcctggctgctgtggttgctgaggcaccaccactgaaggtggtctcaatctcctggtagtctcactctcttgctcaaatacctcctatggctccctagggcctataatacaaattccaagttcaacccacctcaccatctggggctgctgcctgggctcccatccctgcccggctacatcactgagcacctactactatgtgccagtctccctgcaaaacgctggataaacacgtggctttctaccagggaacctcccgcaaggtatttgacatgctcgcctcccgttctctgctgtgtctaaggattcacagatgcggctggagtctgctgcttagcacagtgagtgctcattatgggagctattcttcttatcaagaccgcaaatcccctctctggctatccacagccttctgaatgtcccgggcaactccaggggagcagggctggttttctataatcttctaccttactgggtggtctttggggtcctggcgggttccagtcccagaggagctcgaagggtccctcccaacaggggaagaggagtcccaggtgggtcyyggccagggcctctgggcaggctctgagggcgggcttggggactgtggccagcaaagcccctgagtcgatgcctcagccctctcgctccctggtctggcctctctctggcaccaatgcgctgtgggattttgcggaaagagccgctcttctctgagcctcagtttctccagctatcatagggaaagcctggccttgtaccctggagtgtaccttgagcacagtcggggtatcgcaatggaaaactcttggcaaactgtaaagtgtagttcgcgtgtgtgggcacagccacctgggggtccacggtgcggggcacacggtgccgggtgcggtgtcgccgcgcacccggctcgggctcggtcccgccccgcttcccggtccctggtccgctctccctccctccttcccgccctccctgccttcgggaacgccggctcccggcatgccgcgcgctgacagccttataaatagtcgcctttgccggccgccgcgaggacgggcagggcacgcactggccccggcgcccacccgcacccctccccaggtcagtgcgtgcccgcgcgtgtctgggggggcgcctctgcggggaggggcagcggcaccgggggagggcgggggcgtsctggtgcggggctccctgggggctgtgcggctgtgtatccgtggttgtgakccgtgtgtgtttgcgtggctgtgttccccgggcgctggggatctgtgcctcgctgcctgtgcctttgtggatccgtgcgtgtgtgtgcgtgtgtgtttgtgtgtgttgcagccccttccagcctccgagatagtcacccctttgttctggctggcactcccggggctccaggtcactgcccttggcatgtcccagcttgggcccagagagggagagctgtggcctggctccctgccccagaggacctggacaggggcagcctctgtgctccgtagggctatcgtgtcactccacttctagtgctgggtgcattggagaacaccccctggatgctcagagcttgccctagcctcctgaccagggccagcgcttggggccttcccacagcactgctcagtggccgcctggtactcctcagcagcagcaggacaggcccagagaggggacaccaactgcccaaggtcacacagctgagtgatggagctgggattcgaaccctagtcagttgccacccactgggaaccgactacgttgggtcagaagctgggagacctgggcttgccttggccttgtcttgtgattggggttaagtcaccgtccctctgggcttcggccccacaggccccttagcagaccatccagtcatattaggagtcgctggggccttgacccaggggccttataaggcctgggtgcttagcccgtaacccaactccatcctagacccctgtcctctgtgaggcctcctcacgacccaagttattttggatcaaggaagtggcaggtgccatcagggcggagggggcttagattaccaggaggggggcggggcagggcggggtcgaggccacttctcagggcttcactgtggttgtccctggcccaggacgctccccctcccatgggcagctgctgaggggcacttggcagctcctacccccgctgaagcacactcagcaggaaaagtggctgccactcctgcctggggcagcaggggcatcagcaaagccacttcagctgctactgggtgccaggcccagcgtagcagaaactcagggccgagttggaccctagctggccctcgaaccagtctgtcctcctccccatgcctcagtttcctcccaagatggcagtgaggatggaacgaggctccccagccctgtgctcagcccatgccaggcccagtcaatgggatcccaggcccgcagcacagaagaggggcccagtacagcgtggttgtgcagtgcagggcaggtttccaggaggcacctgccagtgtgggagtggagggcagagtccaggaagrcttcctgaaggaggtggcacctgagctgagtcccacacaatagcaaggtggggaaaggcatccaggcattgggtacaacatctgccagtggcagctgatagggttgcagagggcagcagaggtcagctcaccgggacctatccactatgtcaaggggcccaggctttgtctgggagccgagagggccacacatgcaaggttgtaagcgggtgtgtgatgtggtctgatacttgccagagaaaatcctgcaaattgcgtggcagggtgtggaggcttcaaggcccatgtggaggcgggggcagtggcccaggccccttrcttagcacaggacatagtggtgaggagacagacggagagagcctggggaggggagggttgggcagtgggtgtgcagggctgtggagaggagagaggagccttcacactgactcagcctgtggcttggccataggggcctggagctgggacttggggagggctgttcagagcctgagaagcctgtggggcttctggggcctgtctcgggggcatggatgtctggggctggagagaaaggcctgggctgcctgcacagggatgggggtccttggagcctgaagccaagtagagagggtggtgtgggtgccttgggtggaggtcccggtgcgggtggggtcgctggctggaggtcaaggctggaggggagtgtggctgtggtggttgcgagtggccttggggagggctggtggctgggagtgaagaagtggaggccaaaggtgtccagagggcagttctgagataggggggcgaggtaggggaggtcctgggggctgtggcagcacagggtggggtcgcaggtgtgattgggctcatgggcaggctgagggcaaggtgggggcagtaaagccaggtcctcaaagggtgggggtgcaggggacatgcgtggggctggttgttgggcctgtagaggtgaagagcctgggaccgcctcactttgacaactgtaaagggctgtgttcatgcgagcggctcctgtagattccttcaccccaggcctctgtcccttagaggatccccatccaaacctcatcccagacacacatagttcctggccacctcccacctcctggcagcttccctctggccctggggagcgttgtcaaggtgtctgggcagacgctggcccygcgccctgttttctgggagtttcgaggggagcagctctgcagttgtgtggccgctgtttatgtccctcgtgccatcctcactgtcccagcccctccagcgggaacccaggtggatgggagggggctactgcccttctgtgacaggtgaggccatggaggccagagaggaaaggtgacttttccaaggtcactttcccaaggtggctttctcagggaaggggtcctgggccttccctgcccccagcagccccctctgccctcagactgcatgtcgggcctggcacayaccagttgccttgggtgtggcttagtggaaggtgagtcagggtgaggaggaaaatccctccccaacctgtgcccttgtcttacagagcactgacacggctcccgggacctcggcaggatggaaggtatgagcctcctctccttttgcccattgcctgggcctcagtgtgcctgactattaagggggtgcgctctcagggagacattctgggaggggttggaggaggctctggggctgccggagggggcctggctgggagcctccagtatcctcctctggcctctcacgggatgtgccagctccaagattaattttagacgtgacgaggcctccccaaggctcctgagggccccagcgcacaccccctatgctgggtttatagagctgagaccctgccccatggagaggccacagatacacaaaacaccaggtctaatgaggacaaggcaattccccgtacctctccgggactcagtttccctatcatccagtgagggtgggccttgaggaagtcttggaccctcctagttcctatgggctgggacttagagggagacacgggcaggcagagagtccagaacgggcccgccctcagctgctggcagcaccatccgtccagttcctggcactgtgccttggcctgggcagctcttaaagacacccagcgggcctgctgctgctgctgctgctgctctgcctgagctccaaatatcaacagccatagggctgcggccactgcacccccgggataggggcccacaggaggagcccttcttgacagctcctgtagggctccagccttatggctgggagggcccctgggagccgcccagcccacctcctccctggggaaggggcagagaaccagagaggggcaggcctttcctaagtcacacagcaaggtgggatacagcctggtcctctatttccctgggaagcgggggagcctgaaagcccagtggggagcttgggttctggttttggttctgacatcccttgagcaggccttccctctctcgagctcagtttccctctgcccagtggggctgtggccttgctgggatctaacagcaggcrggacgagacagaggttggagccaagctcaccgccctctctgggcaagagttccacatgcccaccacagccctccaccccggcaactgtctccatggcaacatatgttgtggttgctaagcccccactgccgggggaggcgggtgatgggccggcccagggcctgagaggggaagggcagggtgcayaggagacayggcaggacgggaccatgggctgctgctcctcgagtgacccccgcagagaagacgatctgagagccagaggtgaccggccccggggtccaggcacccacagggaggcgccatgagggctggcggcccagcccgctggctgtgnggagagtacttagcctttaggcttttgcctctgcccgtctggctgcctggagcaccctcncttccctgacctcycccaggctccgagctcactcacatccctgctgactctgggctgtgacttgtctgcctccctgacaggagcgccagcggtgtctgtccctccgcctggggcccagcacaggcctgggactccagaggtgcctctggctgtgggtccagcgagtgactgagccctgctccccttttctctcccgcagagaagctgaagaaaaccaagatcatctttgtggtgggtgagttgcgggcaggcgggtggtgcagcaagggtcttcactggcactggagrgagcccgggcctggggctgcaccctgggctctgcccytccctctctgggagaccctggcagcccctgttcctcctgggaccctgtgtctcggggtttatgaatrggtgggcgtttgcaggtgggcctggctcagggaagggcacccagtgtgagaagatcgtgcagaagtatggctayacccacctctccaccggggacctcctgcggtccgaggtcagctcaggctcrgccaggggcaagaagctgtcggaaatcatggaraaggggcagctggttccactggtgagtgggccctggtggggtgagnggcaggggatgacagtagccctgagtgggtgtcccaccagcagcaaagcccacggcacacaggcaaagctgaccgtaaccgcccccggctccaaacccttctgtggttccccattgccctggacagaaagttccttccagaagctcccaagaccttgcaggactctgccctgcccscaactctctcccttccctccatccttcagccaccctggcctctgtcccctcagactagccatactccttccagcctggaatattctttcctcttcagctttcagacttccctaactccccagatttggcctaagacctccccccccaattttctactccagaagccccacttctctgcccgtacaacctgtgccatgcttagaaatggagaaatcatctgtggaatgtgtctgtcccctcaccagcccctgagctccccagggcagggaaggcctaattggtccatggccgtgtcctcgggacccaggacagcacctggctggaaggagggtctcagtgaatactgttgagtgaatgcatcattcattcattcattcactcagtccaggtctccacaattccgaggaagcttcctggagggggaggcttgtttgggacatttgtgttggggagagggcatttcaggtggcaggagcagcgtgassagaggctgggagaagggatggggaggagaggctcatggccccttcctcctttgctgtgccccaggagacagtgttggacatgctccgggatgccatggtggccaaagtcaatacttccaaaggcttcctgattgatggctacccgcgggaggtgcagcaaggagaagagtttgagygacgggtaaggcactgacccaagtggggatcctggtgggctggggcaggataagactcccatccccatgggcgggcctgcgggggctgtgatgcaggtcagagttctgagcagaggctgattcatggagtgtgggtgaggaggaaaaccaggaagactttctggaagtgtagaagaaaatgtgtagaaggggaagcgccaggmggggsagttgccaaacctgggctcagattccagctcaacggcttgagatcttgggccagtcattctgcctcctgaacctcagttttcccatctgcaaaatgcagggagtgggaggaccaggtcacagctgccttaagggacagtgtggggactggagaggatgtgcccttccagtgtgggccttggctccctataaacacacagaggggcagggaacagcactggcagggctggaaaggcaaggccagtgtggggagaacagaatatgtgggcaggacaacaagggaggttccagcctggctggaggctgcaaatgccataaagggacatcagtctccttccaggggtcatgaggagcctggctggaaagagcaggcctggaaaatgatggccctgagcttcctagcacgagcatcctgcagatacaccttccccaggatggggcaccccacacacgcacacacgtggacrcttgcacatacacatgcacaagccccacaagttcatacacacaaggccaggggcatgtgcacacatssacacacacggcagtggatactgcactcctgcacatgcatgtcacggacgcagcacacatatgcaggaatgcacacgtgctcgcacacatggccctgtgcacacacatacacttttacctcggtgtcacaaggctgtatgggagaaataaacgggactgcaagggcctaggagggagaggtcggcaagggctagggggagcctaaccagcatcctggtgggctrgggcaggataagactcccatccccrtgccccattcccatgccccgtctcgtagggccttctgggcttccgtagcttccagcctcatctggggataggaggccatattttctgacctcygagtggctgcatgagtggctgcaagacctcaggaaagtgtctaccccactctgcccctcaccttccctatctgaaatgggggttagctggattccttcagacctcagacccctgaccctgtgttaggtgccacagttctgaaagatgtcctggcctggctcacacataccagctgtgtggtaccacctgtgaccctcagggccacatctagaaaatagagttaatgaaagtcggccgggtgcagtggctcacgcctgagatcctagcactttgggaggccaaagagggcagatcacttgaggtcagggtcaaaaccagcctggccaacatggtgaaaactcatgtactaaaaatacaaaaattagccaggcatggtggcgggcgcctgtaatcccagctactcaggaggctgagacacgagaatcatttgaacctggctggacggaggttgcagtgagccaagatcacgccattgcactcaagcctgaacaacagaatgagactccgtctcaaaaaaaaaaaaaaaaaaaagtccccacccttccagggctgttgtaggtgccgctgagggccgcaggctcagccctggtcccatccctgctgtggcctccaggtgtccgggcagctggtcttcttggctctggacaccagggggcgccagggcttcaccgaaggagggagggtcagcctggaagtgtggccggctcacacccaaagcttttctggagactggcagtgcccgttgtggactccccgggctagatgtccattgtcctgacagggagactgaggccccacagccagaatctcaagcccagaggctgagctggctctcccagatttaccacctctgctgggtgtgtgtaaagagcctactgtgcttggtcctggagacccagatgaaccagagactgtgagtctgtgccctggaggagctcagcagctgatggatgatgatggggggtgggtgaccttgaagttgaggtcagactgctgcatccaggcccagcctttgcccccatggtaatctgtaaggtagaagcagccgctgggtggtacggagtcatctccctgaaggcagctgacgctgtcaccctgaatccttaactacggaggagctagggatgagcgctaggatgggtatcgcaggcgaggacaaagggcttgccccaggtcacacagctgaacagaggcaggggtgagcctgggtccaggtcagtctgacgccggaggtcaggctgcttctcgcctctgtccagctgtgtggccttggacaagcctcttggttacacagctggacagaggcacraaacagcctgacctgagaggcagtgccccaaggccttgacaggggtccagggccaaasstgcgcagaaacccttgggggctggcccaggcagttggaagcaggagacagggtttgaaggtcccaatcccattcctaaagctgtggcagtcatgggtgactctggggtggctctgccctcccarccaggcagctgtggtagctggattgagcgaggcaggggctgcagaaccttattcctcttgcctttccaaggcgtcccatggatgacatggatgacatgctgttccaatgacacggacattgctcagaaccccccaggaytcagcagcccctcaccccttccctcatcccttgttcctttgtcaaaggaccccagaattgtgagacaagtgcctccctgccctcaggggcccttgggagacctgcttaaggaaagataaaggygctggaagagcctgttccaggaggcggggagtactggggggcggggggtggcatcasagagactsccctgaggaagtgagcttcgcactgaaacctgatgcttggtattgaggtgaaggcgagttaggatcaggctcgggggagagggctcctagcagagggaacagcatgagcacaggtctggcatggaaggaggttgatgagagcctagagcagagagagtcaggctctctcagtctggcaagtagtgtggactttctcctgagggcactggggagccatggtgtaggtttgagcaggggagtggcaggaaagattggttttaggaaggtctttcaggctgccttggggaagggattgaaggtctgagggggtatctactggggcttcatagatgggaagatggggaggasatggccctagggggcaggaatggggtccctgtgacatggtgcccgcctgcagattggacagcccacactgctgctgtatgtggacgcaggccctsagaccatgacccagyggctcttgaaacgtggagagaccagcgggcgtgtggacgacaatgaggagaccatcaaaaagcggctggagacctattacaaggccacagaaccygtcatcrccttctatgagaaacgtggcattgtgcgcaaggtgggccccgmgggcccaggggcagctccgggaagaacgggttcctatgtggctccgcctcagctcactgtgtggcctcaggccagcccctctctctgggccttggtttccccactggttcaatgaggggctgctgtcaattaggttgggctcggggaggcaggcctggyctctggggcctgccatggtgaggcccaccccactccacctggtgactcagccctcayggcccatctccccacaggtcaacgctgagggctccgtggacagtgtcttctcccaggtctgcacccacctggacgccctaaagtagcaacgctggagccgcttccccagctcagagccccgccccaccccgtcctgattmgaggtcctcctggcctgagcgcagcgcctccaccctgccctgctgagcacagacggaggaagccgcttatcctgttttcatggacagctgagcactaaaggaatttctaaggacatttggttttactgctttttctctgcttccagttggagttgattcatgtgcttgtgcctacctggccgcaagtccccagcccctcaaccctccgttcctcctcagcctccctttgccagccacccctcctctagctctggtgggaggcccggggcccttcctcgcacagggcatgcctggcctgaggacccrgcgctgagtggcggggcccctgctccgaggggctcatgttcaggcagaaccggtcccagcctgggctcctctgcatcttgctctgtggccttggccctgacccccatcgctctgagcatatgttccatgcctggcccttgccggggcctggactgcacaggcagcaaggtcatggtctgagtggggcttcctgggcagttggggcggcccacgccagctggcccagtgggtagtgaattggcttccttgacgcgagaggctctgagggtctgaaaagggcatctcaatggcatgggtgggtggggagtcagtcatgtcactgaaattgaatgggggaggcccaatgaggtggctcatgcctgtaatcccagcactttgggaagctgaggcaggaggatcacctgaggtcaggagttcgagagcagcctggccaacatggcaaaaccccttatttactaaaaatacaaaaattagccgggcatggtggcatgtgcctgtattcccagctactcatgaggctgaggcaggagaatggcgtgaacccgggaggtggagcttgcaatgagccaagattgcgccactgcactccagcctgggtgacagagcaagactccgtctcaaaaaaaaaaaaaaaaaaaaagaaattgaattgggggagtcatggtcaggggtgagacctgaaggacctccccctgtgtggccctggacacagcccaccctctgtgagccgtttccaattctaaaacagactcaatgtccccctcacccccacctcaaggtcaggatgcgaacacactgagtgaggagtggacgctgtccattgccacggccatgagggctggagaccagaacagcatggcccgaagcgtgcggggccccggatgacttggggacaccccagaatcccctggggagaacccttcctgcgcgctttcattttttgacctcatcactgagaaaggctcaatttggtgctcacgtgtccttaacacctgatctggcccaagctgggctccctttaagccaagagagcctcttgtggaccccgcctgcccgaatgaaatccgaacagttggggctgttcatggcaagtggggctggtttttcatttccattggttatttaaagtttcctttaaaataaacgattttaagttataaaaggtgaatctattgaaagaagaacatgaaagaaataaacaggagttcagcggagctagcagaagacaaggcatgtagggggagccattctgtcccagggaagttgtggagggtaggggctgtgtggaggcctctgcagctggtcctcggttttccgcatcggcagaaaactgatggggcacgcagggacaccgcaggctccaggtcctgggtcctgcatctgtcaaaccagattcacacacacacactcacacacgccagcgcgcgcacacatgcactcacacatacacactgatccacacacttgcactcccacacacgcatgcacacacacttttacacacatgcatgtgcacacaaaccactcatccatacacacatttacacagtcacccacacgcactcacactgacccagacacttgcactcccactcacacaaacacacttgcacacacactcattcacacacatttacacatgcacacattcacacacttgtacacacaaaccactcacattcacacacatctgcacactcacagtcatgcagtgcacacaccacacacgtgcacacaaaccactcacattcactcttacacgcacacacactcactgtctcacacatccattctgtctcaggatgaagacaaagtaataaagataaggaggcggtttggtgggggggtcctagttctttctcatctaccttatctttattttgatcacagcttcattcatccgggtgagtcccagtttgtgaaacctaagctgattcaaattgtcaaacgattcaccacagaatcactttatccacgtaaacaatacctacctatcatctctctccctctctcatctgtctagatgcagatatcctctttgctgaaaacttggaaacgcaaaaagttttaaagccctgggaaccaccaccccgtccttgccaccgtaaaccttcctttgggaatttctttcatgcatgtttgcttgttctgtagacattgctggagcacccgccgtgccagcgagacagaggcttagaggcccctggcctgctgcgatatggctcccagcacgaggagaggcctctgttcgcaacatcccgtcagacccactcaaccaagaccagttctgggcagctgagtgcaccaagctcagaggagacctagtggtgggaggttccttgaccagagttctggggcagggccctgaagacacctgggagttcgccacaagacagagggcaagaaaggacagagggaacagctctgcagagccacagaggtggaaaggacctgtgggtgttgggagagctgagaccgcagaggggggctgtaacgcaggctagcggggtggcggtagcaagagacaaggctagcagtgtacgaaccagactcacagggtttctcataagggcaatgagaggctaagaaagaggtgttttttggttggttggtttttttgcaacagagtcttactctgtcacccaggctgtagtgcagtggtgcaatctcggctcactgcaacttctgcctcctgggttcgaacaatcctcccacctcagcctcccaagtagctgggattataagtgtgaaccaccatgcccagctaagcagggtttcaccatgttggccaggctgatctcgaactcctgacctcaagtgatctgcttgcctcagcctcccaaagtgctgggattacaggcatgagccactgcacctgaccaagaggtgtatttttgtgtgttttttgtttgtttgtttgtttgtttgtttagagacagggtcttactctgttgtccaggctagaatacagtggcacaatcatagcttactgcagcctcaaactcctgggctcaagtgatcctcttgcctcagcctcccaagtagctgggactacaggtgtgcaccaccacacccagctaatttttaaaatttattttattttgaaatggggtttctcagactcttgagctcaagtgatctgcccacctcagcgtctcaaagtgctgaaattacaggtatgaaccaccacgcctgggttaatttttattttttattgtagacaggggtctcagtatattgcccatgctggtattgaacacctggcctcaagtggccctcccgcctctgccttccaaagtgctgggattacaggtgtgagccaccacatctagccagtttttgttttttgtttgttttttttttaacaaaaattggaagaaaatgtatactgaacacccgtatacccatcaacatttagcaattgttaacattttcccatacttgcttccttgtttaacttttgccaaagtattgtatttttatttatttatttatttgagaccaagtctcactctgttgcccaggctggagtgcagtggcgtgatctcggcttactgcaacctctgcctcctgggttcaagcgactctcgtgcctcagcctcccaagtagttggcattataggcacgcaccaccacacccagctaatttttgtatttttagtagagacggggtttcaccatgttggccaggctggtctcaaactcctgacctcacctgcctcagcctcccaaagtgctgggattacaggcgtgagccaccatgcctagccttgccgaagtattttaagtaaattacaaatatgagaaaaatttacccctaaagtatgaccaaagtctgggcactccactgcaatccagcctgggcaacagagtgagaccctgtctcaaaaaataaataaaaataaaataaataaagtatgaccaaaaataagaacattttcctaaataaccacaattcagagtttcaataacactaaattcagactcttgccactctcacacacactctcataatagctaatagcccgtgtgcaattttccccagtgtctgcaaaatgtgtcttatagctcatttgttgaaacttgcatgcaatccaggactgcacatcgcatttggttgtgatgctcatcagatcttatttatttatttatttatatttttgttgcgacagtctcgctctgtcacccaggctggagtgcggtggtgcaatttcagctcactgcaacttccacctaccaggctcaagtgattcttgtgcctcagcatcccaagtagctgggactacagacgcgcaccaccatgcctaattttcgtattttcagtacagacggggtttcatcatgttgcccaggctgctctcgaactcctggcgtcaggtgatctgcctgcctcggcctcccgaagtgctgggattacaggcatgagtcattgagctcagccaagatctcttttaatctaggaccactctccccctctttctgtgaaggaaccagctgttctgtggagaattcctcctcctacattcacctgtccctccttatggtgttgtttaacttgcacctttatccttcaacatttctgtaaactggaagttaattgtaaagtcttcgtagattcaggttaagcctttgggccacactcgtgacgggttttaaaaccagacaggaaggttagatctgcagcacttccagctttggtgcacgcacgaatatcccggggtgggggccttgtgaaaaagctgattctcattcagcaggtccaggttaggtggtgacgcccaggctgccggtctacggctgacaccgtgagcagcttagggagatcctgcttggcggagggagggccagagggggtcccgtggaggcaggagctcagggaggagtgtggaggaggaggggacccctccagggtcagtgagtgctcacccccactggtggactgagagttgggcgtggtgttgggttggataacgtcaatgctgtcacacgcttcttatctctagggacactccaggcagtggcttgtcccaaggtgctggaacattctgaccagccagtgggattagagcctctataacctgggtgctcccgggcaggactcacttggtagtggcctcagatgacccctgctctccccccaccccccgcaaagactgtgcctccaggtcttggcctcgagggccctgagggcctgggccggaggygctgaagtgggagaggaaggaagtggggagcagaggaggccaaggctgtcgcctcccagccgctctaggggcctcgagtaaacaggaaggcctggcgactccgcgagggggggctttagaggagtgggggccaggagccctgttggacacgtgcagcctgtgcgcacagggctccctcactagggaagtgggcccagagaggctgtgtggttgggcccagagaggctgtgtggttggccccaggtcgcacagcagcaggggcagggggtgagaccttctccctgtgcccaggggttctagtgcgtgggctcctgcatgggttgccatggtgggaatatacactgaaataataataagccaggctcagtggctcacgcctgtaaacccaacactgggagtgctgggtgagtccctttccctcttgggcctcagtttctctttctatgagctcagagcccttaccactcagaggttctagaatcctggcccagtggaatcctctgtctcctaggggggtttatgggttctttagctctagggggtgtgtttcatcaggaaggccaatttcacccaggatttggaggctccagctcccagggcc

SEQ ID NO: 94823 - DNA, 48086 bp, Homo sapiens
aaatattgtccactacagagccaagcaatgtgccattattacattttctttctcaaacaattttccatttttcctgtagtttttttcctttgcttatttttctatatactgtcttaatttcccccccccaatataccattggatgtgacaaatgtccactgatattcttttccaaaaactttatcagttggccgggcgcggtggctcacgcctgtaatcccagcactttgggaggccgaggcgggtggatcacgaggtcaagagatcgagaccatcctggctaacatggtgaaaccccgtctctactaaaaatattaaaaaaaaaaaaaattagctgggcgtggtggcgggcgcctgtagtcccagctactcaggaggctgaagcaggagaatggcgtgaacccgggaggcgaagcttgcagtgagccaagatcgcaccactgcactccagcctgggagacagagcgagactccgtctcaaaaaaaaaaaaaaactttatcagtaaatgcattaattattccctcccccacaacccgaggcctgcttcctagcaccctttgtctttctctccttcccactccgtgtctttttcttctaatctggacaagttgccctctaattttgctgcacagctgtcaagctgagactcctctttgccgataatctgtattagattctctgtttcccaaaaaccatgtcttccccttttttgtgtatatatatatattatatatatataatatatatatatatatatataatatatatatatatatataatatatatatatatacacacacacatacatatatatacgcacatatatatgtgtatacatatgtgtgtgtgtatatatatatatatatatatcattttttttttttttttttttttttttgagtctcgctctgccaccaaggctggagtgcagtggtgcaatctcggttcactgcaagctccgcctcccgggttcacgccattctcctgcctcagcctcccgagtagctgggactataggcgcctgtcaccacgcctggctaattttttgtatttttagcagagacggggtttcaccgtattagccagaatggtctggatctcctgacctcgtgatccgccggcctcggcttccccaaagtgctgggattgcaggcatgagccccggcacccgccttcccttttatattttaactcccttgttttgctggattatatcctctagtaagtacccaagacaaggtgcatgagaagtaaaaacgtttttagtccctgaatgtctgaaaatacctttaatttgtccccacattttattatagaattgttagaaatacttttcccatagacatttcaaggccttgctgcactactttatgacagccagtgttgctcttgagaagtctgatgatctttgtgttgacctttttgaaaatctttccctctctctagaagctgttaggatcttccctttttctttagcattctgaaatttcacaatatgtctcattggtacgggttttctaacttttgagcgtgcctttttgatctggagctacttgtcctttggtttgggaagtattattggattatttctttaattatttcttttgtttggtgttctcttcctctctcatataactcatattagtctgggtgcttcctggattggtcatctgattttcttttccttcccctacccactgccgcccgactgtccatctctttaatttgtgttctgtttttctgggagaattctcaattctatctcctgacttttctgttagaatttttatttcaagaagtattatctaattctctgaatgttcctttttttcaaattgtccctttttcatagatagaattcttctcatatcttcaagggcattgtgatttctttgaagatttttctgctttttgccttgtctctgttgcctgtgagcaatttttctctattttgggctttgcctttcatgtcacaggctttgcccaagtgtttggtgatccttcagtatttagaaatgagacactaaaacatcaattgaaagttctgtgtgtggtgggtagtaaactgattggcctcaatggcaggtgatcaaatagggagtcagctgttttgttatggggcctctgaatgtcattagctgtagataatggtaattaatggcagtaaacttacagtaaagttgcaaaactcccatacatgtcttacccagacactaattgttaacactttgctgcatttgctttctaattcaatatctctgtgtgtgtgtgtatatatatacacacacatatatacacacacatatacacacacacatatacacacacacatatatatacatacacacatatatacacacacacacatatagttcctatatatgtgtacacactgaaacattttaaatttcaaacatgattccttaaatattaggttggtgcaaaagtaattgtggtttttgccattgaaagtaatggcaaaaccgcaaatacctttgcaccaactgaatacttcagtgtacatttttttaagatcagtgacgttcacttaagaaacaattcagttttcaaactcaagatatttaacattaatataatctattattgaatctacagaactccttcaaatttccccaattgtcccaacaatattctttatataaattttttttctgggccaggatccaatatagaacagagagcactgcaatgaggtttcgcagctcttttgtcccccttaatcaggaagagcttctcagtctttccatatctttcattacattgcccttttttcacactgacatttttgaaaagtgcaagccagctattttgtagatttttttttttttttttcgagacggagtttcgctcttgctgcccaggctggagtgtgcaatggtgtgatctctgctcaccacaacctctgcttcctgggttcaagtgattctcctgtctcagccccccaagtagctgggattacaggcatgcaccaccatgctgggttaattttgtatttttagtagagacggggttgctccatgttgttcaggctggtctcaaactcctgacctcaggtgatccacctgcctcggcctcccaaagtgctgggattacaggcctgagccaccgcacccagcctgtagaatgttaatgtcgggtttgtgcaatgtttcctcatgattctatccatattgtgcatttttggcagaaacaatgttgtttcctttttgttgaatcaggaattgatctacaatttttatccaagattgcctcccacacattatttcattctacctgatgtacctggaaactctccagatgtttatgcagaacaacagccttgctctgattttttacacaatataatttattctaaagagcacactgtacccattcttttgccccgtaaacctttcaatggcttttagccaaaagcagtgaaaatctgtctaaattttgccctgctgagttggactctgatgcatttgtttctacactgcccatatgtagactgtacttagaaatatcttgcactattttagatttcgcagcccaacgctggatggatgattaaccaagtaggagggtattaggatacaagaggttgccattttaatgcagtttttgaaaaacaacagctttggccacacctggtggctcacgcctgtaatcccagtactttgggaggccagggcaggcaaatcacttgaggtcaggagtttgagacccacctggccaacatggtgaaaccccatctctactaaaaatacaaaaattagctgggtgtggtggcaagtgcctgtaattccagcggcttgggaggctgaggcacgaggatcacttgaacctgggaggcggaggttgcagtgagccgagattgtgccattgcgctccaacctgggcaacagagtgagactgtatctcaaaaacaaacaaataaataaataaaataacaactgtattgagacataattcacatacccataaaactcaccctttaagagtgtaaaatttcacgggttttggtatatttacagacttgtagtgatgtaaccatcaccaatatctaattttagaagagttttgatgcagggcagctgagaccccagattgggtctcagcccagcagggtttttagctttgtccaggaaagaattcaagagagagcccgtggtgtgagacagcaacttttatggaggtggcggtgtccagcagcagcagagggggcctgctcctgcagtgcagggctgccccacaggcagtgtgctgagagcagcagctctgggcgattctgcagtcatgttgatacccacttttagttacatgcagattaaggggcagtttatgcagacatttctaggaaaagggtagtaacttttgggtcctcgggtcattgccatggaaggggggtgataactccaggggcgtgccctggtaaactgacatggcacactgatatgatgggcatatcttatgctcatcttccacccagtccctgttttagctagtcctcaatttggtcctcaatctggtgtccaagccccacctctggcgttaagtcctgactcctacctgtttcaccatcactgcagttttaagagtaacgaatttgggtcccctggtgaagtggccagaggcagagcttctgtgtgaactatttggaggggaggggaaagaactctcccagactgcaggttctgaaaggaatacagagatgtcagagactgcagttgcaagagaaagcttttataggagggtgtagaattaaaggacaagaggactctacatgtggatggaggagggcaccctgtccggcagtactgcaagagcaaaagtttggaggtgggagtgaggtgagtgcgtctgccggccagaattcttgggccagggtgagcagaaaggttggaggccaagggaaggtgggtggtggtgaaccttatcctgaagtgtgcaaggtgacagtcagaagcttagaactccagccacgggccctgcatgtggcctcctagctgtagtctgtccaccgagatcgtgaggatgctggtggttgaaagaactgcacctctgagcaggtgaagagagaagctaaggaggggtgatggcagaggcgatgggacaggctttctaacaatgaggggctggggatcaacgctctcacggaagctaaaagagccccagcaaccacccgcctgggccctgagctccctccaaagcgggaggggattcactaagaggttgctcccctagcattgaactcagcatcctatactggtcctcaccatgaagacccccaagagtgcttcagaccattgcttctcacattctctgtataaagacactaatttgtttttagatttccaagcatgtcacggaccaatatgtttgttaaatatactaagaatgaattgctagaaagatgaaattaaaaagacatacaccgccaggtgcagtggctcacgcccataatctcaccactttgggaggcggaggtaggtgcatcgcttgagcccaggagttcaagatcagcctaggcaacaaagtgagacccccgtatctacaaaacttaaaaaattagccaggtgtggtggcgcagtctgtagtcccagctattctggaggccgaagtgggaggatcgcttgaggctgcagtgagccgagatcgcaccactgcactccagcctgggtgatagagtgagactctgtctccaaaaaaaaaaaggacatacatcatgcaagtttggatttttgtttttagattcaactgacgaagttacgggatcaaactgctgtaggagctgccaaacgcttctctccatttctggccgcggggccgcggaccgccctttaagtagcccgttttatccccggcagaggtggagccttaggcaggcctagagactttcccgggtcctccaggccggggaacgccccgctcggaggccgggcttgggcggagactgcgccggggctgctgaaaactagccgaggagagccagggagccggagagatcgcgcgcctgccgccgccggagcctgcgagccgagaccgtaagcgcccggggccggccgggcccgcactccccggacgcagacgcggttcgggctccgcgcgggctcggccgccggggtgggcggcgggccggggcgccgaggggtcggggctgcggtcggcccgcaggggtgcagagggacttgtagttggtccgcccccagctcctgccccggccaggagactgcgcgtgccgcctactgggggaaggagcctgcaggcgaccgcggacttctcgcagggaattccgcgtcccagactgtgggcggacgccgcagggagggaggctcgcgaccccgagagcgcaccgcgtcccctggcctgggcgagctctgcttccagggccgtggctcgctcggcggtgaaatgcacttaatttgtcacccaagtcggaacactgattttcatgcgcgtccgtgtgaagagaccaccaaacaggctttgtgtgagcaacatggctgtttatttcacctgggtgcaggcgggctgagtccgaaaagagtcagccaagggagataggggtggggccgttttataggatttgggtaggtaaaggaaaattacagtcaaaggggggttctctggcgggcagagtggggggggtcacaaggtgctcagtaggggagcttttgagccaggatgagccaggagaaggaatttcacaagacaatgtcatcagttaaggcaggaacaggtcattttcacttttgtggtggaatgacatcagttaaggcaggaaccggccatctggatgtgtaggtgcaggccacaggggatatgatggcttagcttcggctcagaggcctgacactgatcacaccttttagttgaaatgcgctttcatctccatctgctgccgcagccgccgcccggcaccccctcgctctggtctcgggattgaaggccagccctctcctcttgtagaacaggaaacttgcccgggagttcaccttgtagttgaagccagggaatgtggtcaacctgagcaaaagcgccgcggagaccgagtggccgcctgcctccctccctggcagatgtcggttttctctgagcttctggctccttccttgccctggcggctcccgagatcttggaggtggggtgcctagcaatgttgtaatcctaattttgacttttttttcttaaagttgaatgccccctccatagcccacctcccattgtttaaacttcaggttccgcaaagcctggatccgcccctacaggcaacactcgttgtcctggaagttctgtgagggctcagcttgtggctggaggtgggaggtgagggggacccatgcacttggcaggcccgcttccaggacagccctttgctgggattgatgagctgttggtggaaaattgttgaggaccttggggttggtggctgtttcggtaccactgtgcagcctcctctgcatccagcataatttaaaataaacattttcaggaagccacacttctccagaaagtaacattgttttctggtgtaacggttgcctccttcagggagctaggtttgggggataatagggggcctttcactggccccacttggtctgacttagcagcaaaaactctgcgagtgctctccaagcagtttttctttcccaaatttccacacctaggaggcgctgaggaggcatgggcggtacttaggaactgctcactgtggaactgaggcacagcggggagcatgccctcgtgggatttgcagttctaggggcagagggataataaacaaaatacatttgtaaactataaagtatgttagaagatgatgtgtaatatggagataaataaaactttaaagaggggagaggagtgccaggtggaaagggaaggcctcactgaagggtggcactggcatagacctgaagagttagggagcagccaagctgctgcctggggtgcaggtgcaaaggctgggggcaggagtgtgcccagcttgaatggcctgatgtttgtgtttgcagagtgtgggtcaagctgatgagtgacctactggataaactgaactagctcagtctgtaagtgaggggactcctgagctttctgcggccttcttcccaattccaggaaaggaaggaccttccacagaaaataactrctcagcaagacagccagggtgaacctcagcaccatctgtgacaagccacatgctctctgcgtgatgcctcctgcctctcagctgtgcctgaagcacactagctggcatggacttacgcggctgggaacatcttcaggaagccctgaatgagggctctgtgggcagagggacctttgcagaaagggcatcttgaccactgcaggaggtggagtgactctcctggggtgtcctggttcctgcctgatgtcttaagcataactggcattttcagggagcccaggttcaccaatgcacagtgcccctcctgtcgacctgatacccaggcttggtgattgctcacctggcaccttgattcccgttctggtatcttggcccaggcccagacatgtgaaagcaggggctaccgagattcatttctcagttcttacgccaagaggttcaaccacatggatcacagctgggtgtaccaaataagggaggaccaagcatgagctggtcacccctgctgaagaagtagctcgaagcccacccactcggggacagagtgggcacagatgggatagacagatagtgattcgagrggtgcctaggatctcatactgaaaacccacctctgctagggccataaatcccatcaacagcaattcattcctttgagaggtaatacagtgatgtgggaagaggattgggctggaaaaaagacttggctcatgtcccagctctgccattaatgtgtcccctctctggacctcatctgtaaaatgaggttaggctcagcgatctgcaggccttcttgcagctctgctatgtgatgattctgtggcaaagtctgaagggatttcaggaaaggaatgtgtaggagggaaacagtaagttttgaagggactcagtgggccctgtagcctctgctgggtccagtgaagacacttcaactagagtgaaggccctggccacagggtaggggaggcaaaatcttaagagttcaagrgccctgagtcaaggcaggagggtcactgcccagcccagctggccccctgggctgcctgtgtgtggttcttgacccagacctagtggcttaggagcagagtctccaaggggctgtgggataaggtggggattgcaggagggagaaggcaccccagcagttcccccgttaggggaccaaagcgttgccaaggatccagccacacccctctcctgaggagggaggagctggtgggcgctccaggaagagcttcctctcaacaaggagaaaactgcgcaatccaatcctccgttatataactgagcacacgattgtgcaaaccaagctcacactgagcagcctcccctattgtcaaggtttatttactttcccaggggaagtcatagttcatcctttctcagcagaaagcagccatttgactgccacagcctgacctacggcattccaggagatgggttcagagacctggtgtggagtcctcatgcccacccgccctgctgtctgtgtctttccgtctgttgcctggtgggtgggtgtggtttagtgcatggtccagcccccgcacagccacacccattaggctctccaaggcctaactgagcaagcttgcagaagaggggaaagtgttcttttctctgaggagttaaagagacttctggaaaattctccagctactccacaaactaggatcacaggccttgttcttaggtcgggagcaggagtttttgctgcctttagcatttgggaagtttgatgaatagagactgaatttgaatgtctttttggtacttaagagctggattaactacttcacatatctgagcttcatttttaattctttttaaaacagaaaaagtggctgggcaagatggcgcacacctgtaatcccagcattttgggaagctgaggtgggtggatcacttgagcccaggagttctgagaccagcctgggcaacaaagtgagacctcgtctctataaagaataaattagctgggagtggtggagcacacctgtaatcccagcactttaggaagctgaggcaggaggatctcttgagcccaagagttcaagaccaccctgggcaacatagcgagaccctgtctcaaataatttttaaaaagaaaaactacctcttcttaagatggttgtagtatgggagatggtgtgtttaagtcttcccaccccagtgtcacagctcagggcttctctagccttcctcacagcggttgggggtgcccagacacatcctgaagtctaggccgtgttctgagtgtctctgccacgggcccgcctggctggctttagtccaggagcagcctggactgtgactcttgaaggctgtgggaggctggtgacygggagcaggaggtctcagtgcatccctgaagggtcagagagccatgccgtgagaggccaggagcaggcagccattggccctccagccctcaccaaaggccaccacctcagcttgtcctctggcaacycagcctgggaatttgctttccctgtggaacgagagacactggccgcattgaggggtgactttccggtcctacaaaattgtagccctctttctgctagaactggtgagacttggctaatttcggagagactttaggaaagtaagagaaatacattggtcccagtgccaagccccaaggccatctttccaggtatgggtatatcctgcagtgataagagaagactgactcttaccagctctttgggggaaatgaatatactttcccacgttccagtttttctggctgtggcaggacctgtttgctgccaagttgttcctgtggggaaacagcagtgggcccagcaaatgtagccaccaggtcggggcacagccaccaggtggaagaagcaaccctgccctcttccggttccatgtgtgcctcactgaggcaggacttccagaccctaccaggaaggctgctatccgggtcatagtgataccctgtcaggacatcgttgtttttgtcttgtttttttttgagacagggtctggctctgttgtccaggctggagtgcagtggcgccatctcagctgtctgcaaactccgccccaccaggctcaagccatcctcagcctcccaagtagctgggattacaggcgtgcaccaccatgcccagctaattttcttttttttttttttttttttttgtagagacaaggtttcactgtgttgcccaggctggtcttgaactcctgggctcaagcgatccacctgcctcagcctcccaaagtactgggattacaggcgtgagccacggcacccggtcgagatggaacatcttaatttcagagttgccttcaggactgttgattgaaccccataaatatttttagtcttttgggacttttaaactcctttttgaaacctaagcattgccacaaacaaactaaccttcaccacgaccaaacaacccagaactcggaccctggtcctcgggctgccctacaggaagcacccctagtcctcttgctgctctgctagatgagacrgcaggctcaggttcctccatgaggcccggctttcagtgctctcctgttacacactgcaaggaagcttccagatcgtggagcacattgttgaggaaaagacaccttggggagaagggggaggtgcagagtgtggttaatggtgggaaggaactccggtaagtgtgttatatgatctgctcctattatcccctggaataggagcctctctccactcaagtagagaatgccaaggactggcccggcatggtggctcatgcctgtaatcccggcactttgggaggccaaagcaggcggatcgcttaacaggagtttgagaccagcctggccaacatggcgaaacccctttcctactaaaaatacaaaaatcagccgggcatggtggtggcaggtgcctgtaatcccagctactcaggaggctgaggcatgagaattgcttgaatctgggaggtcgaggctgcagtgagctgagattgcaccattgcactccagcctgggcaataaagcaaggctctgtctttaaaattaaaagaaaaaacaagttattctaactttttttaattttaaaagattaaaaaaagagaatgtcaaggactgaaattgcatagagggcaatgctttttctttataggtggtgaactgggttctgcttgagttttttctctggtaatttagaaccaatggaagcaactcaacagctctaattttaattggcagaatgtgagatggaatgggacctcaaatgaaactccaggccaagagctcatgagccctgcagcatgtggggcatctctcggtcttcttgagttctgtaacttaaagtttgtgtggcctttaaagagtgtggaagtagccgtcccctctccgaaggtgcacaggatttggccagcccacccgcgtggccttccccttcccctctccagaccctccacagcagatggggccacggaggcctggagaagtggagtcactgacctgaggctacatggctggcaggcagcagggccaggcagcaaagcaggcagtgagggcctaactgcccgcgggctggctcggggctccctcaaccacattggcatcccagtgccaatcccaaattgttttctttctatctctccagacatgtagatagcatggaggtggagggaattccctcccacacagagggcgatatgccccagaacagcactcctgcccccaagaaggctgtctcctgacactttttactgctcttttactctcccccagctttttttttcctgcttgtaaactgcatttttcctttcccttggtttctggctctaagctgttttcccagggcttggctccggcgcttgcacagagataaacacggccattggcctggtgcacaatcccagcttgcctgcatccggcctcttccatcctgagtctccaggggtccctggggttcagggacaatggctgagggagaagctgggagttccccccagggtttgcctccgtcactcttgggccagccaagggagtggggctgggagcttcaggatggcttttgggaagcccctgggagccccaaggcttgggtagctgctgacagggagttcacagcaggaacgctcccaggctcccatcctgcgtccgcttggcaggcaggccaggaatgggagggaagccatccgtttttccctttccactggatgttcccttcgccttccccagggaggagtgatgagrctggggtgctggggagggcagtatgggggcaggcttgggaccaggcctgcagaagcagcagaccctccaagcccacctacctctctggcctggcatctgaggggcaggtcatgccatagtttttcccttaccctctctgcccccacactttcctccccaaagtggcagacttcccccaggagaagcactggcttttcacgctgctgtgagtctcagtcactattagagaaacacagtcagagccaggcctgcccaactgtcgcagggctgggtccacctcatggcctttgttctggaaaaatacttgggcattctgccctgcaatgcacttagccaaggccgggcacatggcaagtgctgagtcatggccggctagcactttactgcgattttaggagcactttcttgtggtgaggttctgactgcttgcttgggttgggggaggggagtctttgggcaggcggtagacctgccctttactttgtgtggccggatctgagtctgaccccatctttttagacccaaaaccctgatatttgtagtgcgcctaggatactggttctccagtcttctttggggtcagggggcgttatagtgcctcatgccacctactcagccctcttcctgcatcttatggtctgtctctaccaactaggctaagtaggttatatttattattcctcaaggggaattcagctcttcttgttcaaaagttctgattaattttctatgctctcattcaaagaatttttaaattcattcattcattcaacaaataattaagcttctactagaatgccaggcactgagagtccagatgggagccaaagcagacatggtcagtggcctacaggagcttccgtccagctgtcagtcacataatcaccctgacaaatgtgagctcgacraaggctaggactgagagatctgccttgctgggataggtcaggagaggctacccagaggagggacagtcagtctgaaatctgaaaggtggatagaagttagggaggtgggaaggggagggaatagcttttcgacagagggattcgccttcataaagccccacagtaagacagcatggtgagcacaaaactgaaagatcggggggcagcgtgagatcccagccctaaaactctcacttagctttcaagtaaactgtttctccataatattgataccagtagcactctgaggggctaggggagtggtgagatcacacaggccttgaaggccacactaacccaaggacaatgggaagctctttaagggtttcgcaggggatgggatatacatgatcagatttgcatttccaaaagatcactctggcctggctcatgcctgtaatccagctatttgggaggctaaagcaggaggatcacttgagcccaggagtttgagaccagcctgggcaatatagtgagaacctgtctccattaaaaaaaaaaaaaaaaaaaaggtttgtatggtggctcacgcctgtaatcccagcactttgggaggcggaggcgggcggatcacgaggtcaggagattgagaccatcctggccaatatggtgaaaccccatctctgctaaaaatacaaaaaattagccgggcgtagtggcgggcgcctgtagtcccagctacttgggaggctgaggcaggagaatggcgtgaacccgggaggcggagcttgcagtgagccgagattgcgccactgcactccagcctgggcgacagagcgagactccgtctcaaaaaaaaaaaaaaaaaaaaatacaaaaattatctgggcatggtggcatgcgcctgtagtccccgctactcaggagactgaggcaggagacttgcttgaaccagggcggaggttgcagtgagccgagatcgtgccactgcactccagcctggggacagagagagactccatctaaaaaaaaaaaaaatgttttaaaaagattgctgtggcttcagagtggccattgtgttggaaggggtagagcagatgtgagtggaccgggcagggtagtagtccaggggagagccacaggaacctgggctgggttggagatggatttgagatgtactttggaagttcagctgccagaacttactgatatctgtggcggagtgaaggagaggggtttcaaggacgttgcctgggtttttggcttggcagtagcagggcgggtaatgtcagttactgagggagggaacaccaagagaagacaaagtttagggggacaggatcacagtgcgatttcagatgcactggagaaaattttgacacaaggtactgtctgggccccaggtggctctgctctaatacatttataactctttgtccgcacttaatcactctgtcatacttagctgccagggggccaagaaatgtcaagtgtttggctggtcttctccaactaaaattaaaaatcctttgctaaggaagaaggagagaacattgctagcagtctgcctcaacatcccaatctgatggcgtatttgccgcagccaccagctcatcaaggacagctgcggtgaacctttgagttctgagtaatctcctgtctgggccacctttcttcactcaaccacaaaatcctcacattcccaagtatattttctttctttcttttttttgtttttttgagacagagtcttgctgtgtycccmaggctggartgcagtggtgtgatcttggctcactgcaacctccgcctcctgggttcaagcaattctccctgcctcagcctcctgagtagctgggattacaggcatgcccggctaatttttgtatttttagtagagacggagtttcaccatgttggccaggctggtcttgaactcctgacctcaggtgatctgcccaccttggcctccaaagtgctgggattacaagcatgagccaccacgcctgtccccaagtatatttycttagctcactcttttcagcatgtaatttacagaagggtaatctgaattgtaaacacgatttctaagttaaaactcctgggtcagctcgtgatgaagtagcaatttataaaagagatagtatagtaataaatgagacaactacactcggaaatgtggaatcatcaactcttatgcgaaaatagcctatgagactcttgtgttttttcattcatgccatgcgcttcctcacttccatcccattccattccacatgctcttctttctgcctggattattcccattccaccattatttttctcctggtaaactcctattcatacttaaaaaccctgctcaatgaccccttctctgtgaaaactttgtggcaaaacctaaccacttctgcttgtgcacacttctcttccatctgtgtgcatatagtatgtgtctataactggaagggtgtttatctgttatccgtttgtctgccctgctaaagtgtgagctcctacagttacagggttgtgtgttagtcctggtgcctgcacagtacccagccagtagttacactcagtgttgctgaaccaacctctggtccaaaaacatgtttatacttgcttttccaaggcgccaatccaaatctcttatttactttaaaaaacaaataacttcttggcactttaaaaaccacattcaaataacagaaaaagagttcatttgaactttaagtatcaatcttaaaatgaattgtatgttttaaaacttgacttagtgacatcacttaagagaatttttaaaaagcaaacttttatttttaccccagtgtaacaaatattaagttccattaaattattaaactgatctaccttttcttttttttttgagatggagtcttgctctgttgcccaggctggagtctagtggggcaatctcggctcactgcaacctccgcctacccaggttcaagcgattcttctgcctcagcctcccgagtagctgggactacaagtgcacactaccacacccagctaatttttgtgtttttagtagagacggggtttcaccatgttggccaggctggtcacgaactcctgacctaaagtgatctgctcgccttggcctcccaaagtgctgggattacaggtgtgagccaccatacccagcctgtttttcattttttggttcttttttttttttttttttttttttgagacaggttcttcctctcaggctggagtgcagtgatcatagctcactgcagcctcaaccacctgggctcaagcaatcttcccacttcagcctcccgagtagctgggwcctcaggcatgcaccaccatgcctggctaatttttttttattatttgtggagatggggttttgccatgttgcccaggctggtctcaaactcctgggctcaagtaatctacctgcgttggcctcccaaagtgctgggattacaggtgatttaccttttaactgtgccaaagaacaaagcacctactttatttgctctcctgtatttaaaatggtcctttatacctcagatccagaaagataaacacaagtaaactaacaagtactctacttgtatcatttgttgttttctaacagtttacatttagtccatctttgaagggtaaagaccattgattgctcatctaacttcttcaccttgaacttagtgagattttcttccacctttcacaaatgcatgcccaaaatttgacttcagtgtagaattggaattaaaatgtatgcaatcccatttcttacagtaggagccaaatgttcatcaagttcccctctgagctcagtatcttgtagctaaatgaccactatcttccagtcacgtttttaaaaaaaatcatgctggtttgcaacaaaaattgtattttctttactaggcaagtgaaccattttgttgggaagagtaccttggcttcgagaaaaaaatgatttcattctgaaaggcttcccctccaaccccctcctgcacaaactctcagcccagtaacttgtcagtattctggaaaagtgcattacaaaacaaaaactcgaatcagataaaatatatctctggaacttttgaggcagatcaatgaagctctgatttcaggtgctagcaaaataaagcaggcactctcattttgtattgttttacttctcagtttttcatggtgtctcctaaactttgatgttttgaagaagttctaatgtttgctacatcagcaggagctgaccacagggaagagataaatatagctctccttggaaaggtgaaggcttagccaccagaattctgccccttgatgctgagaatgcaccttctccgaacagatggaaaagaggggtggagattaccccagggacatatcttgcaaaatgctgatacccgaagatgtacatagccttgtgctttggtcatcctcccaaatcatgtccttggtgaaggcacatggagaggagagcagatgctgccagaccacggtgcctgacgccatgcactccctcacgtccagcctgtttatgtgcacacggctgcagcgggaccttggggtgtgggctaaataacaagaacaggggctcctctggggtctgttacaaggcagagatgctccacggtaattagggatttakgggaagaggaaggaacacacatgttgataataagtagttcaacattattatccccattttacagatgcagctactgagcttagagaggtttcataacttgcccagagcccctcaactagtaaacagtggagccgagatttgaacgacccaaagaggaaagcaaacaagcagcccctttattactttttttttttttaagatgagggtcttgctatgttgcccaggctgatattgaattcctggccacaagtgattcaccaccttggccccacgaagtactgggattacagtcatgagctaccacactgggccaaagccctcgtattgtaacctccaagatgttttcatttctaaagtcaaaggttgtcagagttgctgttttgcagggagccatgggatggggagtctccgggaaacccaggctggctccttaaatggcatcacccaagttggccatcaagcttccccagactcagtcactcggccccctctttccctggctgtagagcaggggtttggactcgaggctgctgagttcctctccagcttccatgcccagtggcagtgacttatcaactggcccacccggtggatgtaggggtgatgcagccctgctctgtcctcttgagtgctgggtggccatgagagagggaggccatgagagggaggggagggttctcatctgcttagtgccaccccctccccagcccaccccaggtcctctgccgccttgggttcctgcgtgagcagtccttctcactctgggcgatgttcgctttcaccagcccaaccccaagaagtccaccctggggaggacagagggrgtctccacggctccacacccccatgctttgtcggagatctggccaggcagagtggtgccctcttgactgagcctcgagcctttgctttccccttactccamataaagccgcagccctggcgagggagcccagaggcctgaggacagcctgctgggtgcctggcactctctagatcctccctgcctgggcggtgggcatctgcaattctccctgtctcgaactgcagcagaatgtgtgggcagggttaggcagatagagagtgggtgcctggactcattggtcagactctaagaccgcccacccccgccgcccccgcagtccttcccaggactggctgacccaccagataggggagggtgttgtttcttattattacattttttgagaaaagctatgcaggcctgggagacgtctgtgccctaggagtcccttctggcctgaagactcaaggctgcaaacaggtgctgagagggaacaagaaggggagttggggtgcaacacacccagtgacagaccaggagtgagtgctgtggccacagattctaatcctcacaactgcagtgtgatttaggctaagccccttgcctactccgattcttgccttaaataagtgaaaaggaaagtcaagtttgatgagttgtggctctttagtgggtggatttgcatgtaccatggattacatttaccagggtctaggaattgtcaagcgcccagcaggctgccatcaggcctcygagctccttcgccaggcggctttatttggagtaagaggaaagcaaaggtttgaggctcagtcaagagggcgccactctgcctggcyagctctccgacaaagcagacgggggggtgtggagccgtggtgaccccctccgtcctccccagggtgggctccttgggcttgggctggtggaagtgaatattgcctgcagcaagaagaaggactgttcatgtgggagcgcaaggcggcagcggggttggaaacccacccccacacagtcaacacctgctgtcacaccaggctaatcaagaacacytttctttggtgcattaaccacctgctattaaataaarggctgttactaggtggcaaagtaacacactgcagtagagcctatttgtaatctgaratcagtggctgtaagkcaccatccttgagccaagcaagtactaataytcttgttatcttaattagaatgcaagagatcgtgtttttaaaattctctttgaatctgycactttgccctcctcttcctgggtgatacacctggtagtgctggtgggggccatcataatgccccttgtcccagattcccttcttttagatgggactcgagcactgatcatttcagccctgtatctctcaggtcagcgtggttcagtttgctgtgcagagtccaggggagataaccacgctgtgcacacatgagattggctgacttggcaggactgtgcaattgtcagaaggccgtggggagtgggggccagtgcctgcakcctrccctgcctctctcacaggcccttagagcatcgccaggtgcagagctccacagctctctttcccaaggagtaatcagagggtgagaacrtggagcctggtggacaggtgaaagcactgggatctttctgcccagaaaggggaaagttgcacatttatatcctagagggaagcgacagcagtgcttctccctgtgctgaggtacaggtaaggagggtggtttgtaaagttcactggggagggtgatccctctttattgttctaatattatgctcgcagcctccttgacaacatcatgcaaaatgtgtcttactagyttctagtgcataaaatattggtggagctcttcrctgtgctgggccagtcaccagtgctgggcactgtgggtcaaggcagtgcccaggacgggcacagccctgccttcccaagctatggtttattgtggtaggatctgcctgcccagtgaagtgtgttcagctgctcctgttgctgggggaagctctgctctctgccttcggctgcctcccacacgctcccatgtgtctcccagtccctaacccctagtcctgctttcaataccgcaggggcttttagctgactttwctccatcttcttaaagggcaggatttcctggcagagacataacgtctttctggaaatgaaagaagctgatgcatgttttttcttttctgaattacttaaataagaggaactcatttccaggtattccctgccttgtttttattgtgggagtgtggtcccagctgcccatctgatcagctgacatagggtccttggggcccaggcactgttactgcttgggattgaaagatgaaagccacagggccaggcacagcagctcgtgcctctaatctcatcactttggaaagccgaggtgggcggatcgctggaggtcaggagtttgagaccagcctggccaacatggtgaaacgctgtctttactaaaaatacaaaaattagcaggaggtggtggtatgcacctgtaatcacagctactcaggagtctgaggcacgagaatctcttgaacccagggacagaagttgcagtgagccgagatcgcaccactgcactctttgagactctgtctcaaaaaaaaaaaaaaaaaaaaaaagggaaagcaatggcctggcttggctggagatggaacatgcatcaaygtgtcccacgtgtctccagcagggatagcgaaggcctgccccctggcacatggtagactgagtaaatgttgatcagtgagaccttgaggcactttagagtttcacaatccagagagggagatagaktggaagttcaagggtggacacctgggcatgattcccaggacgaaggctgcagtcggttctaagaagtatgctggtgactatgagagaagaggttgtgggtttcctctcttgaaagctgtctccataatcacatgtggggtgataagggctctggtccaggggagggggcgaggcacacagggggctgaatctgatggcatgaggacttggtgatgggctgtggggaaagaattggagatgactctagggcctgagggtgggaagctgggagttcactgggatcactgatagaaacgcggaggtggggggtgccaagctgattttcctgattagatttcctacagaactgcaggaataaggcgagagccatcgccctgggtggatttctgtttggagctctatcgctggaccactgtggacaagtatttcatagaacgacccccagtagcccaattctaggtttagaggggcagctcttgacaggagcaaactccagggcctctgcaaccccccagcagagtcccaaacatctgacatgtagccaatggaggacatgcaagtggtggggttcccagcagggaccacctcctgccttgggtttccaagacagagcgaggggygctgctggggcgtggtttgcaggggccttgtcagaactcgatgctttctcctccktctgggtcctaactgcagtgcatctagagaccctcctctgactcaggcataaggacggcccgcatattcatgcaggttactctgaacaagaacagtctrtgggttacttccctaggaatgaggaagatgaagagctagataacaatgctgggctggtatctgcctgatagtgctttgccaagactatggtttcttcctcttctgatcaaaaaagacacaggagtcagacaaatggggattaaaagacaactgagttgatgtgaaatgtaacaggcaacactrtggacacagaaagtagattagaggctgcttaggacctaacgtggagggcagtaggggagygacagctgaagggtatggagtttctccgtgccgatgaaaatgttctacagttgactgtggctatggctgcacatgtctgtgaatatcctagaaaccactggagggttcactttaaatgggcgaattgtatggtatatgaattatgtttcaataaagctcttacacagctaagstgtgtggccatggctgggcttcctagcagtgtcccccaaccccaaattgaacttactctcccagcacttgggcctccccattaccccctgtctgccctgaggataagcctctctccaagaaggacagagcaggggctgtgggccaccattcaggaaaggtgctcctctcccctgggggagggaacccagaggtcatggacagaagccttctcagacatgcaaaaaacatgaggctgtcgggcgccgtggctcacacctgtaatcccagcactttgggaggccgaggcgggcggatcaygaggtcaagagattgagaccatcctggctaacatggtgaaaccccatctctactaaaaatacaaaaattagctgggtgtggtggcacgtgcctgtagtcccagctactcgggaggctgaggcaggagaatggtgggaacctgggaggcaaaggttgcaatgagctgagattgtgccactgcactccagcctggtgacacagtgaaactccatctcaaaaaaaaaaacaacatgaggcctcagaaatgtagctcccaaaaccccctacccagggctgtgcagaagccaaaccaggttcctattttcccaggatgatgaacagttttcaaagcttagtaggattgtgggtgattttgtctcattgtctgttgtttttccatttttctagatcatatatatataatatttatactatatataatatgtatatagtgtgtgtatatatatatataatatgtatatattaggtcaagtgtaaataaaatcagggacagggttggagcgcagcaggaaagagcctgctggggatcagagtctctgggctgtcagggccrggctgggcgggctccrttgttaatggcttcccctcatcttgcaggagccatgtggctagaaatcctcctcacttcagtgctgggctttgccatctactggttcatctcccgggacaaagaggaaactttgccacttgaagatgggtggtgggggccaggcacgaggtccgcagccasggaggacgacagcatcygccctttcaaggtggaaacgtcagatgaggagatccacgtaaggcaccttgggccggrccgggctgggcagtggagagggtggtgtgtcgaagacaggggttgggtcttaggccagatgygggaggggacgggggcttgggaatggtccatcctacttgggagtgtgtttcagtctgcttttcctctgctgggcaggtgcaggttgctttggagagggatgcccagccctcccactttctctcttctcctttccctacccaaggcccagcagtgctcaggcaggagatggggtaacctgtatcaaaggtcacagaaagcagctgtcatcacctcctctatgccctgcctgaagccttgggagtgaggttgtgggagaaagtgagcaggttcccgtcagagacccaggaagcactgagaaggcagggatgctactggttaggcaccggctgtgtgtcagccattcctggtcacattcaatccctacggtgatcccgcggggtgaggattgttgttcccaaactgcagatgcagaagctgaagctcaggggcataaagcaactcgttcaaggcggcctagctaacatgcggaaggatttgaagtccaatctaatcctgaagctgctgcccctcctctgcacagggatagagtcaggaaggaggtgactgggcaggtggggtgaactgagaatgcattctcggggaggagcaaggcttgagtgggggacaggacggtaggcaggcctggcatggccctgccaatcctttctttcattccgtgggttttgagcacctactgtgtgcaggcccagtgagtgcttgggagaagagacagccccttccgtccaacagcatacagtccagtgaatgagaaaaggaatgtgcacaaagaaaagtagactaaaagataaataaagataggctaggtgcggtggctcacgcttttaatcccagcactttaggaggctgaggcggtggatcacctgaggtcaggagttcaagaccagcctggccaacatcrtgaaaccccgtctctactaaaaatacaaaaaattagccgggcatagtggcgggcacctataataatcccagctactcgggaggctgaggcaggagaatcccttgaacccaggaggcagaggctgcagtgagccaagatcacaccactgcactccagcctgggcaacaagagtgaaatgccatctcaaaaaaagaaacagatgcataagrataaatgtcacaaaaagcatggataaaagtcatgagagttccaaggaggaagagatttaaaagcagaagctgggctaaacccaagagcaaccaggctgaggctccctgggtaggacttgcttgctgcagccttgctatttagggccaaggctgagccctaaggaaagctcctttagggaattagactcctaagggagtctgagatttccaaaatctgtttgggggtaactgaaacacttgggaagaagcctgggaatggtgatgcttgagaggctctctaagctgacatgaacttcctccctctggggctggccttttagcctratacatgycaatgagacttgcaccctctctcctggtctgtaaattttttagtttttggagacagggtcttgctctgtcaccaggctggggtgcagtggtgcgatcttggctcactgcaacctccgcctcctgggttcaagcgattctcctgcctcagcctcccaagtagctggcattacaggcacctgtcaccatgcctggctaatttttgtatttttagtagagatggggtttcgccatgttggccaggctggtctcgaactcctgacttcaagtgatccacctgccttggcctcccaaagcactgggattacaggcgtgaaccaccgtgctgggcctggcctgtaatttttatcccaactcagttataatgtatcattcaatgttgtatatcaggggtcaggaaaccaggcccatagaccaaatgtagcctgctacctgttttagcacagcgcccatgccaagaatagtgtttacctctttaaatagttagggggaaaaaaatcaaaagaagaataatagtttgtgacgtgaaaattatatagcagtcagatttcagtgtccataaatttttattggaacacagccacccccattcatctgtgcattggctatggctgtccataaataaagttttattggaacacagccacccccattcatctgtgcattggctgtggctgctttcacactatgaagacagagtggagtcactgcagcctgcaaagcctagaatatttactatctggccctttacagaaaaagtttgccgactcccgctgtagagacgcctgggtaaattaaagatgagtatcgtgtatacacttaaagagtaaaagatgagctgggcgcagtggcttacacctgtaatcccaccactttgggaggccaaggcagacagatcacttgaagccaggagttcaagaccagcctggccaacatggcaaaaccccgtctctactaaaaatgcaaaaattagccggacatggtggctcacacctgtaatcccagctactctgggagctgaggcatgactggcttgaacctgggaggtgggggttgcagtgggccgagatcacgccactgccctccagcctgggcaacagagtgagaccctatctcaaaaaaaaaaaaagaaaaaagaaaaaagaaatgcgaagtctacagtgaagaaggaagaagtgaagaacacatccgctttgggagtagccagtgatgtgggaaactgccttgccactyccagagkgcagtatcttgtggctgcagggtttgctgtgttttctggaaacagactttgctcttgtgctctgtccttcccatccctctcaacttggggtcctgaattttgctccaggacttacaccagaggatcgayaagttccgtttcaccccacctttggaggacagctgcttccactatggcttcaactccaactacctgaagaaagtcatctcctactrgcggaatgaattygactggaagaagcaggtggagattctcaacagayaccctcacttcaagactaarattgaaggtatgtttgcaaaacgccagccagagagggatgtatgtcatgagaacagccttcttccacaatgtgacttacagtcagataaagttggagagattcagaacccaattataggtsactgagatgtacttatacgttgtaaccttactaaatgcaaaaatattgcagtcacaacaaatctgtccatctttagagctaggcaggaacacatacatgcaatttaaaaaccaaagaaatgcaccatccagtccaatgatgtggcaatctttgagaggaaggatggagatgagatttagacccaggccaagtggggtggctcagaactgtaatcccagcactttgggaggctgaggtgggtagatcacgaggtcaagagttcaagcagcctggccaagatggtgaaatcccatctctactagaaatacaaaaaatagccaggtgtgttggcaggcagctgtaatcccagctactctggaggctgaagcagagaattgcttgaagccaggaggcggaggttgcagtgagccaagatcgcgccactgcactccagcctgggctccatctcaaagaaagaaaagactctgctctcagttcttttggatctatactcagaagtggacttgttggatcatacggtaattctgcgtttaattttctgaggaaccgccatactgcgttccgcagcagctgcaccattttactttcccacccaacaatgcctcagaatcccgattctccaaatccttgccaatatttttttcctttctttttttcggtaatggtcatcctaatgggtatgaaatggtatcacattgtggttttgagttgcattttcctaatgattactgatgttgagcattttttatgcggtacttattggattctttgtaatttctccgaagaaatgtctgttcatgtcttttgtccattttttgggtgttttattagggtttaggagttctctatatattctgaataaaatctcttatatttgcaaatgttttctcccactctgtgggttgccatacaattaatctttttcagagacaaggtcttgctgtgttgctcaggctggagtgcagcggctattcacaggcgtgatcatggctcaccacagcctcgaactcctgggctcaagcaatcctctcgcctcagacctcctgaatagctggtactataggcgagcaccactgtgcccagcttgttaattttttatattgaagaaattgtacatgttaggaatcttatttttaatgttttaagataatttggccttttcaaggaacagtgaagattttaatttgttaaaattctaggaattacttaaagtrtatgaaagacatgttggtcagtcagataaactaaagttcctaaaaaaaggaaattgaaattatagtgttaactgggtgtggtggcatgcacctgtagtcccagctactcaggagrctgaggcaggaggattgcttgagcccaggaattcaaggctgcagtgagctacaaggacaccactgcactgggtgacagatcaagaccccatctcttaaaaaaagagagagaggctgggcacggtggcgcacgcctgtaatcccagcactttgggaggctgaggcaggtggatcacgaggtcaggaggttgagaccatcgtagctaacacggtgaaatcctgtctctaataaaaatacaaaaaattagccaggtgtggtggcgggtgcctgtagtcccagctactcgggaggatgaggcaggagaatggcgtgaacccaggagatggagcttgtggtgagctgagatcacaccactgcactccagcctgggcgacagaatgagactctgtctttaaaaaaaaaaaaaaaaaacaggctgggcgccgtggctcacgcctgtaatcccagcactttgggaggtcaaggcgggcagatcacaaggtcaggagatcgagaccatcctggtctaacttggtgaaaccccgtctctactaaaaatacaaaaaattagccgggcgtggtggcaggcgcctgtggtcccagctacttgggaggctgaggcagaagaatagcgtgaacccggaaggcggagcttgcagtgagcccagattgcgccactgcactccagcctgggtgacagggcaagactctgtctcaaaaaaaaaaaaaagaaaaaaaaaaaaagccgggtgcggtggctcacacctgtaatcctagcactgtgggaggccgaggcgggtggatcccaaggtcaagagatcgagaccatcctggccaacatggtgaaaccccgtctctactaaaaatacaaaaattagctgggcatggtggcacgtgcctgtagttccagctactcgggaggctgaggcaaaagaattgcttgaaccagggaggcggaggttgcagtgagccgagatcgcgccactgcactccagcctggcaacagagcaagactccatctcaaaaaaaaagggagaaaggaaggatggacggaaacctcgacttggaggtgccagggcagcaaacatccttgttctgatgcaagcaggccaggcctgtgggagaatgagccagagaaaagctaagtcaaatcccagtggtgtgtgtcctggaactagagcccatcctggagctcagccaagaacactaaaaaaaaaaaaaaaaaaaaaatctggaatgattttttggatcaaatttggacttctcttgagtgttgctgtattctttacagtaatttgatatcttctattatgagcctaacaagaggatccaagccacttaatcccagccaaactgctgtatgcaattaccataggttcctgtttggattcctggcacgaaattgcctggcttccttgagtttgacttggatccctgtgttgtcccagctcttcagtgtccatccagcagaaactaacagggcgcctgctgtacccaggcattctgctggggctggggacgcatagagaggacagggtccctccttcacagctcataggctcttcaggggcaattccagcacatagtggcggtgttctgaaggaggaggctctgggagcttcatgagccccacaatcttcctttgaatgtgagggaaggcttcctggaggaggtggcatctaagctgaaatgagtgggactttgccaggtgtgtggggaaggtggtccaagaaaggggaacagcatgttcaaaggcccagaggcaggaggcagtaaagggccctttccatcctggcagctgccagccttaccccactggaccctttcagggttcttcatgagactgggttttttttagagacagggtctcactctgtcagccaggctggagtgcagtggtgtgatcacagttcattgcagcctcaatttcctgagctcaagcgatcctcccacctcagcctctcaagtagctgggaccacaggtatgcaccaccacactaggcttttttttttttttttttttttcttgagacggagtctcgctctgtcacccaggctggagtgcagtgacgcaatctcgactcactgcaagctccgcctcccaggttcacgccattctcctgcctcagcctcccgagtagctgggactacaggcgcccgccaccatgcccagctaattttttgtatttttagtagagacggggtttcaccgtgttagccaggatgatcttgatcgcctgacctcgtgatccacctgcctcagcctcccaaagtgctgggattacaggtatgagccacggcacccggcctttgttttttctttcctttttttttttttttacatttttagtagagacaaggtctcaccatgtcacccaggctgatcgcaaactcctgggctcaagcaattctcccaccttggcttcccaaagtatcaggattataggtgtgagccaccacacccagctgacattgggcatttatggtacaaaacctccctcaggtacaacggctccaaaagagccagtttccagcattgaattcatcgtggacttacccatgtgtggttctggcaccctgcccggggctggaggcctgttcttggccttggtcctttagaataggagtaaatttggcaacataggaggacacccaggatacattgttaagttaaaaaaaaagagattctaaaatagaatgtatgtatggttctatttttgttaaaagttatgttctctaagtctttttaaaaagtttgaactgtcacagccaagaagggtctaaagagacatgayagctcagtggtgtgtgagtcctggatgggatcctggaacagaaaatggatatcaggggaaaaactgaggaaatctggctcatattttgttgtgtgtagataccagcattatccaggttttaaaaaggagaaaatcctggccgggtgtggtggctcacgccagtaatcccaacactttgagaggccaaggtgggaggatggcttgagcccagtagtttgagaccagcctgggcaacatagcgagaccccttctctacaaaaaaaaataacaaaaataggctagacatggtgttgcccacctgtagtcccagctacttgagaggctgaggtgggaggatcacttgagcctgggaggttgaggctgcagtgagccgtgattgtgccactgcacttcagcctgggcaacacagtgagacctcatctctaaaagaagaagaaaaaaaaaggaaatcctgcaatgtgtgacaacatgaataaactctgaggaaataatgctaagtgaagtaagccagggacaggacaaataccgcatgattccacctatagaaggaatctgaaatagtcaaactcagcagaagcagagaggagaagggtggttgtcaggggctggggaataggggaaacggcattgctgatcgttgctgtgtaaagtttgagtcctgccagccgaatacatcctagagatgggctgtacagcagagcgccgtcagtgttggacacttacaatctgttaaaagggtaggacccatattaagtgttctcgccatataataaaaagtgtaaacactaaggaaatcaatggactttatagttaataatatctcagtctggttcgttaattgtaataaatgtaccatgctaacataaaatattaataatggaggaaacccggtgggtgtgaggtatatgggagttttctggaytctttgcagtttttcagcaatctaaaactgttccaaaataaagtttagacagacaacaccatgttttctttagagagtgggattacatgtgagtcttccccctttggcttatctgtgttttctaagttttctacagtaaacatgtattatttgtataatatattaacgacagaacagaacattagctagaccatgctgactgcaccagccctggtggcagagagttccaagcatggcagccgccctcactgtgaatgccgtaaggccccaggtgctgtccagggcactggcctgggaaggggctgccttcttttgatatgcagaggccccaagtcagtccagaggagacaagaatccattcacctgcccttggctatgatgatgttttcagcattgcacttaaaaaaaaatcttccactttattttattttaattttttgagatggagtcttgctctgttgcccaggctrgagtgtggtggtgtgatctcrgctcagtgcaacctctgcttcccaggttcaagcgattctcttgcctcagcctcccgagtagctggaattgcaggcgcctgtcagcatgcccgggtaatttttttgtatttttagtagagacggggtttcaccatgttggccaggctggtcttgagctcctgaccttaggtgatccacccgcctcagcctyccaaagtgctgggrttacaggcgtgagccaccacaccaggcccaaaaatmctccactttaaagaaaatatcatttggtaatcagaaaaaggtgacattttgtcaatgtgtatgaaaaaaattatgcatttaatacctgttcattgtagaaaaattggaaagtacataaaactcaaagagaaattaaaagcactggaatctactgctcaggaraactgctttttacattcttggagtttatcctcccagacttttaaaattcaccaatacatrgtataagtacagtataagcatagatgactttttataaaaactgggtcacacaatggatatgacttgatcatttgcttttacctcccagcaatatcttctgatcagttttctatgttaaataaatatacatctaccttgtcagtttagatgactgtactggactccagtatactgtcaaactatacttgattaatcctgtattgctggatacgtggggctttctccctaccctccagattttaaattattgaacaagtatttatggaggcctgctgtgagccaggagctgtcctgagccctggaaacccagcagtggctgtacagacctggcccagctgtcagggggcacctctaaggaaaccrggaggcaataatcgtagctcccttgcagggaggttgtgaaggctgagtgaggacatctgtgcacctggagcacagtgtgagtgtgaaaccagtgtcagcccttattactgtcaataccatgaaggggsggcgggggcactaagggtggcaggactcaatatctaggctctggggggtgccagagcctgaccgtgcagggtcttctctctccctccaccctgactgtgctctgtccccccagggctggacatccacttcatccacgtgaagcccccccagctgcccgcaggccrtaccccgaagcccttgctgatggtgcacggctggcccggctctttctacgagttttataagatcatcccactcctgactgaccccaagaaccatggcctgagcgatgagcacgtttttgaagtcatctgcccttccatccctggctatggcttctcagaggcatcctccaagaagggtacggggctgctagaggttccataactgccccrtcctcgccaagggtgggcccggtgttcccaccaggctctccttccrgcggggtgagcagggagttggcccgaggaagctgggaaaggaggggcctgagaggccggccccagacacaccgccctccggggctggagatgccacccctatatttgggctccaggattccttcttgcctctgtgagcttttctgacctccacctgggggtaggcgggcctgagaaatttcatagaacaccagagggcccaaggagcaatctgcctgtgactccgtgactccatgcctttccccatcactgccagggttcaactcggtggccaccgccaggatcttttacaagctgatgctgcggctgggcttccaggaattctacattcaaggaggggactgggggtccctgatctgcactaatatggcccagctggtgcccaggtgaggtcactgttggggtggkgtgtgtgtgtgtgtgtgtgtgtgtgtgtgtgtgtcctctaagaagtggacctgtgtgcagggtgggccaaggaccccccaggggagaggagggagtgtgacctgtcactcagcagtgcctgaggcaygttgrcttggatcctcctgtctgtaacccagggttgcggctctgggtcaggttcccaggcagagaaggcctgtgataggaggggaaggtcaggcattagacctctctgctggaccaagctctgggacagccctgagcagaactccccagaaactgtatttttcccccaacctcccttctccaactcccatggcctccccagtggggccagtgctgaaagaggctggctctgtgctcgctcctcagccctgaggcctgttcctccgccatctctcctctctccctgtccttgacaccagcccagcctcaccccggcccctctctctgccttcagccacgtgaaaggcctgcayttgaacatggctttggttttragcaacttctctaccctgaccctcctcctgggacagcgtttcgggaggtttcttggcctcactgagagggatgtggagctgctgtacccygtcaaggagaaggtattytacagcctgatgagggagagcggctacatgcacatccagtgcaccaagcctgacaccgtaggtgagtgtgctcaggggtcctcgcccactgccggctccactggggcagggagacacccgcggggtaacctcaccaccccaccccaatgctgcccacagaaggaagcctcttgtaaggacctcccarctctttagatctttaaactgcattttcccatagaatcaagaggatggaccctcagcagattcccaggccaatttagcaactctgtttagccgactcagtattcatagtggctttcacccctgatctcccacccctgagtctatatcctacactgagaagcagagggatggagggggtgaggtaggaggaatcctgggagtgggcagctctggggctgcaggggagaggggagagggtgccctggggccttggggaagaggttcccaggcagtgagggagggcccagcaaccatgtctgccaccagggtcctgttaaaggacaatactttttcaaaaaggtaaatttataaaggaaccagtaaaattttaaaaagaaacaattcaaagacaaataagaacrctgaaattaatttgctaacagacasaaaacttgtcaacatccacagagtaatatcaattaaatctccatgggacaaaattcatttgcctctatgaacaagagtcattcgcattaccctcagttctttacaattcacagaactgtaaaatagctcaatgacaaggaaagatgggacccctgtagcatcacgtcagtccggaaggtctgctaggtaactccctagatcttgtccagaagacacccaggaattgtcttgcccatctcaaagttcttcatagttttcatggcaaacccatgcccacacacacgaggcagctcataatcataataatggcactttataaaagtcagcatttttctctgattataaaatacatgttgtcaaaaagcttaaaaatgcaaaaagtacaaaacattaaagacaatctcatataacctcttctccctccccacatcccytctccttcaaaagaacttgtgaacattttggtgagaattttcacaagtgaagtacgtccatmtcaccaacatggccccaacactccagatgcccctcggggttctctcccaggtaccacgctctgacttctgactgagatggttttgattgtgcctgtttaagtcctatgaatagaatcacagagtatatacccttgagtctggcttcttttgctcaatattatgtttgtgagattcatttatgccattgtcccagctttatttatttattttttctcaagacccagtctggctctgttgcccagggtagagtgcagtggtgtgatctcagctcactgcaacctccgcctcccaggttcaagcaattctcctgcctcagcctcccaagtagctgggattacaggcacctgccaccatgcctggctaatgttttgtatttttagtagagacggggttttaccatgttggccaggctggtctcgaactcctgacctcaggtgatccacccgcctcggcctcccaaagtgctgggattacaggtgtgagccaccgcacccagcctgtcccactgtcccagccttttttttttttttttttgagacagagtcttgctctgttgcccaggctagagtgcagtggtacgatctcggctcactgcaacctccacctcccgggttcaagcaatttgcctgcctcagcctcccaagtagctgggattacaggcatgcaccaccatgccctgctaatttttttgtatttttaatagagatggggtttcaccatgtcagccaggatagtctcgaactccttaccgcaggtgatccacctttctcrccctcccaaagtgctgggattacaggcatgagccaatgcccccagcctgttccagccatttttaatgactgkacagtattttggcttakgagtatatcaatatttgtaactgatcccctattttagacttttttaggtggcttctcatttttcatgaatcagagcacatagactgaaaaaccccgcctttttaaaaacagcacttctcattgggaccccaccaaatgcagaggcgtaggcccttcagtttgaaggaagctgagcaggcagtgtgccaggccctgggagacagtgggaaggtatcgtccctgtttatcagatgaggatgccgaggcagagttaaggaagcgaggcatgtgagcacccaggagttaaggcaggcctgtgctcgaacgtggcttcctgcacacagccccgccctctgcggccagtgccacacatcacacctgaagctccagctctctggtccccaggcctgagtctctcccttgctccccgctccccgccaggctctgctctgaatgactctcctgtgggtctggctgcctatattctagagaagttttccacctggaccaatacggaattccgatacctggaggatggaggcctggaaaggtgaggccctggtttgcccctgcagtcatgaccctggtcccagcagccaacctcctcaccctcttcatccccttgtctggttgctctgcatggggcactcagcaaattctattgttggctttcttacaaatcctcaccctgtgaccaacgtagctgcattttttgggtgaggtggcctggtgggttgttcccagcctcacagtgcatggtcaagactaggatgcaggctcacctgcttgtgctccttttgctgaacaggcccctctggggattagggagcccacagggcagcaggcaccacattattgtcaagagcacctgggcttttcctcctgattccctggagagcctggcatcagggtcacgtgactgcgtgttccaggagggtggtcgcagaaagacaggaggctgttaatctctcagagccttagaggctgtatcctctacatgcctgactcccagctctgtggcctgactcaggcttcaccaaggtcagctctgacccaccctttccagggcccatccctttattccttcagtgacacacaggaccagacagtgctggggatgggaaagacagtaaaatgagactgaatcctgccttgggggtagggactctgtcttggccatgctgtagccccatcacctagaacaatgccgggtgaacagtgggagagcccagtacatagatgttgaatgaatgcgcaaaggactgtgagagtccagtggaaggaggattctttgtctaagcggcagagaggggaaatgaccaggagaatgtatctgatttgggccttggaggataagtaggagtttgctggatggaggagagaaacttaggcaaagagaaaagcaataaaaatgcaaggaaagggtgcttggaaagggtggcttgtccagaggctgaagcaggtacactggggccagatcaaaagcaaactcattcctgcaggcaggtcctcacctcctccaagagcctcagcagggccttcgtctgggatctgtttcccctgccctacattcagcaggacacaggggttgatggagcttctgcaagaccaccttggcagggggtctggcctgctccttgcacacggatacctggagcaagatgtgaggccccaccagactatcccactaggccactcctgcagctctggccccgggttacagggagcaccaaatccctgagcaggaggtagacaggatcagatctgtgttctagaaagaacaggaatacactagggtggaaatggtggtcgtggtcgttttcaagctgcgggcagagcygaaagggagatggaagcacttggccaacttgcagaaatccagttcacagaggtgatgtgtatactggaactagttttcattgaccagttttcattttgccaccaaaatcacattgaaaaggctgttccctttatctctgtccctgctccctgctgctgttgctagagattcagggtttgagtgaggaaggtagggttgggagggcgtgctctggggaaagtggaaggtggggtgggggctgtggagtatgcatcctggacccaagctggctaggtttggattctccacttaataagtaaaatggagataatagtacctatgtcccataggctgttgagaggaaaacatgaattaaaagaaggtaaggagcttagaacatgctgcctggtatgtggtcaccacagtagctggtgccctgagcagtttcacggtgcaggggttgaggggagggaggagaggtcagtggcaggagagaggggacaggtgtgtagaggcaaggtgggtggggggaggaccttggggtgataagagacacttcaactaaatccatgcgctccagtctagtgccctgggcgcagcctgcctgtgacacgaggataccacacacgttgcatgaggtctgaggagggaagccgcatgggcagggcctggcatttgtaggactttctggctgccctttgtcacacaactgcatgtggcactgagagtggggctttgtgttctgcgttcccaggaagttctccctggacgacctgctgaccaaygtcatgctctactggacaacaggcaccatcatctcctcccagcgcttctmcaaggagaacctgggacagggctggatgacccagaagcawgagcggtgagcctggctgagccgagaacaggggcctctgaggctggaggcagggggacggccagtcttgggctccacgaagggcacttggtggtgggataagtatagccttgcctgcargtgccccaggggcccttggatgggaacactaaaggtcgaggtgtttggagaaagccctcatggagggaccaggtgcctggctcccgggcggccctcagtaccgctccccagtctaggatgctggtctggagtggcactgatggttctgggatttccaagtctcacatggaaaccctcaaaggtggggatttagaggctgtcccatgcccctgcctgggtggccctcccagaaaagagaaggccctcagtgaggggagagcggttgagaccctggatttgtccttttctttatggctccttgtgggtgggccagctgatctcacccccaggcgctttaaccccctgctgtgcaggacggaggggcgcagggccacagcctcacccctccgtcggctctttcacttccaggatgaaggtctatgtgcccactggcttctctgccttcccttttgagctaytgcacacgcctgaaaagtgggtgaggttcaagtacccaaagctcatctcctattcctacatggttcgtgggggccactttgcggcctttgaggagccggagctgctcgcccaggacatccgcaagttcctgtcggtgctggagcrgcaatgacccacccctctccccccgcctgccacctccccccacaagtgccctccaggcttttcttggggaagataccccttttctgaggaatgagtttgcctccgtcccctgcccatgctgggagcccacgctcaccccctcacccctccaagctcactccccaacccccaactccgtgtggtaagcaacatggctttgatgataaacgactttactctaaaagcggctggaactcagtgacatgagcgtgcgctgaccccacatggggccccctgtgcaagcagagctggccggcccctccttgctggcagaggcacgggaggcctgctggggatgaggccactggccagggctatgctgcaccagaccaatggcaccgcccccacccctcccagcgcaggggcagcttggagcagaggcagcactggccaccrctgcgggggcaagtcagcgtcaagagagtccctgagtgagaaggcccagataagcccaggccccccaggccagcggacaggcacaggcagggcctacagaggtgccaaggccccaggccagttgtgctaggagcctggacctgctcttccacacccccatcccgccccwactgcacaggcttgtgccttggtgccccctggaggcagcagggaggaggcttctcaggcagaagtcttaagttgcatcccattccccagaatccccaggagggagaagagggatgggctgcccctccttcctgccagagccacagctcamgggcagtgggatggccctgcacccagcccaggtaccccttcctctgtgccgaccatgctgtcctttggctccgaggaggccctgagcactgcccacccccacaccttggagggagcagacggagggggtgagtactgcacagagcctgcctggaggtgcagactcatgcactcagccctgaagaggtgagagaggctggatcttaactgtggtccaatgggcatattatgagtggtccttgtccctgcctgctatggggtaaccctgacccagctagcgtccctgacaacatgatacaaaaacacagaactctagcgggatacagagatgtgtgcacagctggcaggagcactggccacctcccaacctgttccccatagcttactcctggatgtagcctggagggactgctgggctggggagggactggccatggagcagggagctggatgccagcgggacctcagacctggactgcagcatctctttggttatcggttgtgtgtgtgctcagaagggaggaggccttccccttgttacatctctctctccatatattctcccggactcatcagtttggggggcgaaaagtccaccacatggtcttggcgacaaaccactggggatgtcaccccagctgcagagctggaagcttgtgccggaggggaaactgggtgagcaagggaggggcgaggcctgcctgtgctctcctcaccactgctgggaccagaaaagatgggcacctgatagctcagctgggcagtcccaacgcattcccactcagccaagggcctgagccccaggccattctggttgtgtcttttcagagcagtgagacctaaaacagatgggaagaagtcatgaacttgggagtcaggccgcttcacctgtcttctcaccccacaggctcccctgagcctggcccagccagcagctcacccagcctcaggcctcctggggggcagcagccacactgcccgtggcgctctgcgccaagcactgtccagggatagtcccgctgatgttgtggatggcaccataggtctgctgctgctgctgctgcggagacagtgctgtcctctccgaggccaagccgttcagaatccgaggcacgtagggctgtcagcaaatggatttgtgcttggcctggacaggcatgagcttccacactgcatccctcccctcctgcccttctcccaacaggacacagacagtggccataaaggacatatgaagaaacaccgacatccatttaggacattaagaccgaaaatatgacacctgcagaatttcctagcagccagggcaaaagagaaagcacagttatacagttctcatgatcacagaaggaagcacaagagagcagttctcagaggaaactaaacttcctagccctggatcctaggaggatttctcactttgtagaagaaacaagtctacctatataggggggcttagaacgctgccctgggacccctgggatgctcaacatatctgtgtgagtctcattttgagtctcatttcctcccaatcccaggctccagccactgaccccaggcacagagccctgccatactcctcctgagaccctggctgtgagggcttgacatcatccacctgtcctgcatgttccctgcttggccagcatagccacaggtgtgtcgctgggtaatgagtccttctgaggccctcccttgtttggaacttgtccaaggacagacaccgataagagagcctgacacctgggaggcagccaccagaaagaaccctgcagatgaggtcggctctgtcctggccacggctgtcaggaaggctggtgactacagctctggaaccctggggctctgctttcccttcccagccccaccctaggagcaggaccctggaggctgtgtgcagagagaactaggaaggcaaggagccctgtgtctctctaccatggggtcttcctctgaagcaggtgcaatgttcatttcttgaattcaaagggaagtctgcctgacaccctcttggagcctagtggaggacctcgcacaggcaggtgcatcgctgatgacaaacctttgtcaaaccctagcgccttaccatgtgccttcactaaagccccaaactcaccaggcattaaatatgcagagaaggaaagagagcagggaactgaaaccaagggggatggccatgaatcgagacaagactctatctcctcaacagtttcaaatatgcaggttaaaatacccagggggaccaggattccttctctgccattaattcacaaacttgcctgccatgtgatcttagcaagagatgatcaaagatttgccggggcccatctggttgggactgttacaaccaaagcaaaaaaaagggcgacaagctcagaggctgaggggcacagcttactgtgaacggtgggggcatgtgggcctctgcctcacttcctttgtcacttgcaggctcttctgtctgcagataacagcaaaaacttgcgatgataaacaaaactgatctctgtgaacgaacaccctccaaacacacagactattaacacccggaataatagtaccagctggcaccaagctccccagcagcccgagagaggatggggtgggggagtgcagggatgaggggaggaagggaagctacacatggcacccaaccacccacgcctttcccatggagaagcagaatctggagaaggctgctgctgtgttgatacagacaagggtgggcggggttgacagcgagcccgtcccaccatctgttcctcccagggcttgaccgggcagtggggtcgggggcctttactttgtagttcagagggctgaggtgcttgaagcatccaaagcaggtgtgagccaggcagaccaggatggtgagcagcagcaccaggaaggtgaacagagtggcgggggccttcatacctggtgatagagggtggctagccttggggtgggcagggaggggccaccacctaccctcaccctgctgaggaaggggccgcacctggtgtggaaactgcccgtgacttctccctcaggcagaaaataaaggcaaggcctaaccccccacccccacccctcaactccagcagcaaggatggtgtcttcacagccaggaacacacagagggacccactgaatgactggcatcatccctggtcagatttcaggcactggggtgccaagtcaatggcaattcttcagcctccttgctggtccgttccctccagtctccagtgccctgggctagagaggatggaccctcccacacccccagtctgaccggggcagacgtgtctttcccccaggagtgtcagttttctctcctccacgtccccacctcttccatgccaggaggtacaaggagctgggcccaaccaccagcctcaaagggcaaatctggatcagcttccccatttcctctggttcagtccctgcacagctgataaaggcactatcttctctccagggatgtatgggacaattgaccaggccttcacaagggttacacctgcactcgggctagcttaggagccaggctgtcaacaccacacccaaccagcccctcaccctgggtatcatgttttgattggacacctaaccagtcctcactctgggcaccacattctgactagacatgtaaccaaccctcattctgggtaccacgttctgatgggacacctaaccagccctcactctgggcaccacattctgactggatgccatgctgatgctgtgaaagcaatgagggatctgactggctggtggggatgcagggctgggaggccaagggctggccccaggtcagaagggctgctcacccaggcgcaggaaggaaaagaagtagagccagaagaggcacaggatgggggctgccaaggcctggttcacagcggcaaagtggatccccttctccagcttggctgggaggtagacgaagtagaggttgtgccggtccaccatgtgcttgagcaggatgtagatgaggcctgcaggggatggggctgtgagctggagacctcgcagggccacacagacacctctgtcctcttcctctccggggcggctattttggcaaggagccagggctggggctgctgctctactgcctgaacacaaaatgaggcatcctgcacctctggctactagttttttttcactttctctctcctacccacttcctcacttatctgtgaccccaaggtgtaggggatcggtcagggtggtgggagaaaatttaagataaagttataggaaatagacacaaaccttcttggaaagccgagaggtttgcatagcttcagtaaagggtttggctgaaggcagctgaattctcttaaaagcttagggtgcagatacataggaatgtgggggagtttacctaaatagcttgtttactcatgtggtcctaagaccaacctttgatcatccactggtgcatgattgctcgctattcagggggtcggcaatgttaattaccctctagtggtgtttactcgagacctttgtcatttagtctgtactaaataaatgcgaacttcgcctggcattgaggactacactgcagactcaggctgcagagccccttagccgcactgacaggcaaaatatctgtcagtgtatgtctgtctgtctgtttttttgagacagagtctctgttgcccaggctggagtgcagtggtgcgatctcggctcactgcaagctccgcctcctgggttcatgccattcttctgcctcagcctctcaagtagctgggactacgggcgcctgacaccatgcccggctaattttttatatttttagtagagatagggtttcaccatgttaaccaggatggtctcgatctcctgacctcgtgatccgcccacctttgcctcccaaagtgctgggattacaggcgagagccaccgcacccggcagtgtatgtctttcatccgtcgctgggtcagggtctgtgggacagaccctgcaccaagggagtcacagtgtctgtgatcctgtccccacagaacactaacattccagaatcatcttggaaagaggctgtttcacagttggatgcctggcctcaattcctccccagcccttcccatgctgagcccctgtatgtcagtgctcccacacccctggccttctcccacccggctgatccctgccctcatcacagtcaacagagaatgaggcccaagggtcttaccccaggggtggcacaggagcacacaggggaccaacagaaagtgggtgctgccttttctattatgccaggttcttttgtttttttattttttattttttttgagatggagtctcgctcattggtcaggctggagtgcactggtgcaatcttggctcactgcaacctctgcctcctgagttcaagtgattctcctacctcagcctcccgagtagctgggattacaggcgcctgccaccatgcccagttaatttttgtatttttagtagggacagggtttcatcatattggccaggttgttcttgaacttttgacctcaggtgatgcactgcctaggcctcccaaagtgctgggattacaggcataagccatcgtgcccagccccaggttcttttttaaaaaataaattttgttttgaaagtgtaaatactgtagatttttaaaactacacaagaaagtatacagggaaaactaaaacaacttttccccctaaaactcagctatcactgccagcagtctcttgggttttttgtttccttctagagcctttcattaatctgccagttgcagatgttttatttcagtggccaggaccttggtctttaaacagtcctgagttcaaaggctggttctcctgcttactaacaacatacgaagttattttgtgtgaagggggaatagaaacaggaactgccttgtaggatgaggtgagaaatgtggtaatccacgtggaggcaggcatctgccagagtgaaagcagcacgagagctttgattgtgactctggcactgtcttacttgctgctaaagaaatcaaccatgaacgacatagtcagtgggcagagaacctcagaccagaaatactaagagaggtcctagctgagggccagtgggaggaattcatttaaaaatgaat

SEQ ID NO: 94824 - DNA, 14263 bp, Homo sapiens
aaaaatatagcgagttctttattcattcattcaaattactatttattgagaacttactgtagactagacacagaaaacactttcgacattaaacatatagaacttgttaaatagttatgttttgttcagtggttgtacaaatctaaaattaacaattaaaagtgtgtgtgtgttttttaaggggtgggtgggtaggaagtctcacagatggcgagtccagagcagaagccttgaaggaaaatcaaggtgtcaaaggcagagcacactgccccttagctattgctcagtgcaccagggtggagagctgctgccagcctattagatcctctctccagggaattcagaatgtggattgatccaagctagtcattccctactgatctttcaaacagaggtgaggcacgcccgtatggagagcagtttctttagcttgcacaaaccctgtgttcgtcaccagtgtccaggacaggctgcaggtgtggctggggactgtgatcttcttgtagggcctccttagggattgtgcaaccacaaaggcagaagcagctcttgcagagtgtgatgacgttcacaacctatatttgacttgtactatattctcatcactacaggagaagaggcccaatgggaaatgtgtgctgttctaaatatagcacctgcctcctatacctgctagatttaggttgaatctttcactgcctgtgaaggactttagcaggcctcagtgaccggaaagatctacccacgctttcaagcacaggaaggacggtattggaaggccttggggtccagcccagggcttaaagtcagttccattggaatgccattttcagagagttttcatcccagactctccaagggtggcaggctcttgtatcagccctgggacatgtgtcctctagcagtcaggtagttaggcaggcacctgtctatcaatttgttgtttttcttctcagttttccggtaagactaccccgagctcttcaatgttttctttgcttttgtttacattgagtgtatgacgcgggatgggcttcgtaggctggttgtgggttattacagcttcccaggaaggggagaaacccaattcttgccagcacgtggtgggcgcaggcgctcataaatacttaggaataaatgaatgtataagtgagtgcatgaatgggtgagtggacacgaagctttcaaggtgggtgcagggaggtgggggtgtgaagagccatcgaggctaccctgcggccctggcccccaggctatcccgcgacgcgcgtccacgccgaccagcggaaggtgcccagccagtgggggcggggcgagctagccgcgaggacgcgcccgcgggggggcggggctaagaggacgcgccgggagcagcggagcgacgaggacaggccgcggggaggggcggggccacggggggtgcgccgggcggaaggggcgggaagagggcgggcccggcgcgcggtagcgcgggcccctcagtgcacaatggctagagcaggcggcggagccccagccccacccagtgcggagcgcgccgcgagccccgccgcaagctgagcgcctccgcccgccaggcgcgccggcgccgggccatgtactcggggaaccgcagcggcggccacggctactgggacggcggcggggccgcgggcgctgaggggccggcgccggcggggacactgagccccgcgcccctcttcagccccggcacctacgagcgcctggcgctgctgctgggctccattgggctgctgggcgtcggcaacaacctgctggtgctcgtcctctactacaagttccagcggctccgcactcccactcacctcctcctggtcaacatcagcctcagcgacctgctggtgtccctcttcggggtcacctttaccttcgtgtcctgcctgaggaacggctgggtgtgggacaccgtgggctgcgtgtgggacgggtttagcggcagcctcttcggtgagttggactgggagaaggcagcctcccctctgcaaacttccactccccaccccgctgcccgctccgtgcgtccgccccccagcccgccccgcaccgcttcccgctcggccccgcgccccccgccctacaccgccccgctccccgctcgcctcctcaacgctgcccgaccccagccgcatggcgggtgccttcctcttcctccgtcccctcccgccccacgctgtccaggactccattcctgtggtctctcatctgccccccacgttgaccccaaaccccggcccgcctcctttcttatttgtttttacctcctaagatcactcaacaaggcacgaaaccacggctttttacactttgaggaaagagacgagggcctgtagagtcaagagattcaagaaaaaaagtgattaactcgtgaaagttggagggagtgatgagattagattcatgtactactatttgtttcctaaaatgagagtagaaaaccaaaataacaatgtgtaaaaaaaaattctcattagtacttgtaaacctttgaatgctttctagggaatgagacagtttcattcaggtcctcagaatgcaaattggcatgtgccctgtaagctgtttttactattttccgtcttatagatgggttccagcacaccagaatcttgggtgagattacaaatggctcagccaataccatctcaggtgaacaaatactgtaattagctctgcaatcggtagatttcattaaagtagaacttcattgttgaagatgtatttcgacagtactcttattatggaagatttaagtttcactgagacatgatgttttgaaggatgatcaacaactcagcaaatcattgaaggaagcgtagaaaggaaattatttttttgtgtgcctcaggaatttcatttgtagggagatttgaaatagaaatgtgtatttctcaaggcttaaagttccttttttaaatcctgaaatccattgatactttattgctttaatcttggtaggtttgggagaacaaaaatctttgtagaattatcaaaaatattttcttattcagtaacctctatgctatgacaaacccaaatattatatttgtaatgattcattttttggcgttttgaaggaaataagaaaatagattttatttgattgcttcagaggttataatattttcctccccgcccctcataagctttaatctgataatttcatttgaacaaacatttgaaatttagggaggggactgcaagtgtatgtaggctgtggtatggacgactatgggattacactccttatattaattgtaaaatacctatcaggcagtttcttcggcaatgctaagaaggttattcaagcccaagcctaaagtatcatcagtagtgttctccagggtagtcaacaggtgtttgttcacagacatcaaagttcttttttccttgaagtgccttttctgtgctggaaaattctgttttcgtgcccgggagtttgaacacaagggtgtactgagttctttataagtgctagctgtcatccaccctcttcctcacctctttcctctgctgatcccaccctcctgtgtctcctggtcacttctcccttcctgtttttcttcttcaccatccctcctagggtcccagcccagtgattttctaagttcacttagatttttgcctgagggctgccctatttttcagggcatttagtgctttcaaccatgactttctccctgtttttaatgtagaggtggaaaccctgagataagagattccgagacttaagccctggggggcaagttagtagtgaagttactatagagtttaaaaagtttttagcgaagatgatttctttgcctggagtaaattccggagtttgtgcttctagatccaggttaaggatgaagaaaaggagggcacttcctgagttatccctgagcaagaactacctaacagtggagtattgaaggggaggaagttaaaaatgagggaagtagcttcttgatgcagaggcttttggagaggcttgccctatctgttggaaagaccattggtctgatggcacaagagtggatcctgttccttatcctgcgactcatgcattgtgcgggctttctcaagtcacttaatctctccagctatcagttctctcatctctattattgggtaattcagcttaatgctctgtaaggccatcctacttgctttgcattttgatgacccctttgatatctgtaggttagaacgtgcctgatcttagcgcttattgattgtgtcttctgctcctactcctaccctgagccctgtctttctaagccaagaagcagcatgtactatggttacacctcttcagataccatcatagattcagtctccatcttcacaccctgctggaagaagcagaataagtaattcagacatacttatatttatacttgagtgggccaggcaactgctgcattctgtacttagttcctggcttcttagggaatgccaaaaatgagtggaatccttgatatttttgagacagaggctttgactagacaggactgttaggattgccattttagttaaactaaaggtgtgtgccctatgcaatttaatctaagttccaattgaatggcttgtttttccagtatccaggattattagtcatcttgggctagacaggtacagcttgtactgatttatatttcagtaggtttaacagtagtgaaaaccagagctcaaaactgtgcaatgatgaatattagaaagtttagcagtattgttgctttagcctaaagactttcaggtgagtatgctcttcagcaccttggcctttctacctctggccacacagggcatcacacagatgtcttccgcacatggaatgtaaccagcattatgctcaaagttaacaggagaaccttattattttttttttttttaaacttccccttcaaaaataagaacaaacagtgttagtcttggcagaggatgtttagatagaccttttgcttgggatgcagagattcagggttgcagagacagtggcgaaatgcaaacatcactgtattcaaatgttagaagtaggtattatttatgttaagatattttaatatgaaatcagaagttttccttttttacttacacttacacacttttttcctttattacttatatgcatgtgtacattcatataatatttttaatacattttcctcctcagggctattatgagcctaaatatttttaaatggccagttgttttactgaattaatccttttgtaataatctgactagtaattgagtagaaatagtctcatgttgctaccatgagatcctaagggtggttgtggcatggaaaggtcttatattcagctgttctggaatcacacatagactgtaatggccacagaaatattttgaatcatggcagtatgcacatagtttataatctgtttctataaacagtggagccatgcgttccttttagtctaagctcacagctgtgtatagatttattcacatgatagttttcttaaaagctaaagttagagaattgtattatgttatttcttctttatttttgtggaacattatgttcattctctattactatgttgcctgattcttgggagggctgttatatctctattgtccattctcaagaaattagaaaatatgtgagaaagcatttaagacatgctttagtagaggtttatgtccaaataagatgtcacactccaatggattgtcattgttgcatgaaattatttttctcttatattgtttacaatgtattctttcttgaattttcttctttcagagaagagttccagtcacaaatgcatatatgatgcattttgacatttactgctaagatgaaatgcagaaatgaaaccacacatccattttagtattctcagatgtgattagatgtacttgctcatgtttttatgctactgacttataagaaaaaaaatattttaaaagggtaaccgttaaacagctaggacctgcaacttcagtgcttctgggataactggaacatcagaaggacagattttattacagcataatcacacctcatttctttcatcagcagttgtcaccagacgctgttacttcctaaaatggcggacaatcttcccacagagtttgaygtggttataatagggacaggtttgcccgaatccatccttgcagctgcatgttcaagaagtggtcagagggttctgcatattgattcaagaagctactatggaggaaactgggctagtttcagcttttcaggattgctatcctggttgaaggagtatcagcaaaacaatgacattggggaagaaagtactgttgtatggcaggacctgatccatgaaacagaagaagccatcactcttcgcaagaaggatgaaactattcaacacacagaagctttttgctacgccagtcaggatatggaggacaacgttgaagagattggtgctctgcagaaaaatccttctttgggggtgtctaataccttcactgaagttctggattctgcattacctgaagaaagccagttatcrtattttaatagcgacgaaatgcctgcaaaacacactcagaaaagtgatacagagatttcactagaagtaactgatgtagaggaatcagtggagaaggaaaagtattgtggagataaaacttgtatgcacacagtttcagataaagatggagataaagatgaaagcaaatctacagtagaagataaggycgatgaaccaattagaaataggattacttactctcaaatagttaaagaaggcaggaggtttaatattgatttggtgtcaaaactgctgtattctcaaggattgctaattgatcttttaatcaaatcagatgttagtcgttmtgtagaatttaaaaatgtcactaggattcttgcatttcgggaaggaaaggtagaacaagttccttgttccagagcagatgtctttaatagcaaggaactcaccatggttgaaaagaggatgctaatgaaatttctcacattttgtttagagtatgaacaacatcctgatgaataccaagctttcaggcagtgttcattttcagaatacttaaaaactaaaaaactaactcccaaccttcaacattttgtactgcactcaattgcaatgacatcagaatcatcttgcactacaatagatggtcttaacgcaactaaaaacttccttcagtgtctcggacggtttggcaacaccccctttttatttcccttgtatggccaaggagaaattccccagggtttctgtaggatgtgtgcagtttttggtggaatctattgtcttcgtcataaagtacaatgctttgtagtcgacaaagaatctggacgatgtaaagcaattatagatcactttggtcaaagaataaatgctaaatattttattgtggaagacagttacctttctgaggaaacatgctcaaatgtgcagtataagcagatctctagggcagtactcattacagatcagtctatactaaagacagatttagatcagcagacttccattctgatagttcctccagcagagccaggagcttgtgctgtacgggtcacagaattatgttcttcaaccatgacatgcatgaaggacacctatctggtacatttgacatgttcatcttctaaaacagcaagagaagacttagaatcagtggtgaagaaattattcactccgtatactgaaacagaaataaacgaggaagaacttacaaagccaagactcttgtgggctctttattttaatatgagagattcctcgggaatcagcagaagctcgtataatggcttgccttccaatgtttatgtctgctctgggcctgactgtggcctgggaaatgagcatgctgtcaagcaagctgaaacacttttccaggagatctttccaactgaagaattctgccctccacctccaaatccagaagacattatctttgatggtgatgataagcagccagaggctcctggaaccaataatgtagtaatggccaaactagaatcctctgaggaaagcaaaaacctagaaagcccagagaagcaccttcaaaattagaaaagagcaatctcgaaatgctgttttggacctccttcatggcatcagaattttctcatttaaaggacagtttcccatatgagtaattagaagtggttatatatgatgaatgctatgcagatgttgtctttaactctcagacattcagcattgaatatctttgttaacctatcaatgagtgatttattgattattgaacattttgtttagaatgggctatatgacccagaatcttaaaacagagttagctttattttagtattgggtatatatgtaagggttccatattagcaactcagcttaaaggtaatgtatttgctaatgatcttcagattttatctttgtctacagaacaattagtaatacccaagtaatattttaattacttttgcagctgttacagttgctgcggcctgttcgaatagtgaaacatacacaaatggtaaattatgtggatcttttgcatataatataaatgtatagacatggtggtaggaatagcaactaatacaaatgccaatatgataataaaatacatttgtctataatcgtttaaagattagctttgcatgatcctttatgcactgtgaaggtctgaagtttataatactcacttgacccttgtaactgatgaggcaatgatgccaccacagtgttctaatttacaaaaagaattggagttcaattagtggttgtaaagctcattttggggaggttgattgcaaaggaaatttgaaagataagatttattcttatttaatacttcagaaaatttctgcagagccctgccctggcacttaaaatagcttccaacaagtaacttagaccaaaaggaaaaatgaagtgccccaggagaagatacttcagaagggctgttctgaaattcctaaggaggaattcttaggaattcctaaggagaaacagagtgaggcctttttaacctgagattacagatacttataaaaccctctataaatagattacccaaggtttttcagtgagaatgaaacataccaccttgttggctctaccactttaattaatatcactataacataactgataggaatgaatcaaaggaggatttaccatgccctttcggttgtgtcccacttaacaaattgtgaagtaacaattttctgtaatctctcttgcctcttagctgttatccagagtatagaaactttttttctcccagagccacccaacgtcataaaactggtagtactctaatggtgaaaacctgtggagctgtcagaagacatgaacttgcttttcctctagtccagtttccattcttcagtcagagtatgatgatccctgtgacagtttttgctctgaaatagtatttatcatgtgtttggtacctagtattatgctttctcatgacagtttctcaacaatcctgtgaggcaaattcgcatgtaccctctgtattagtgtgttctcatgctgttgataaagacacacctgagatggtaatttgtaaagaaaaaggtttaatggactcacagttccatgtggctggggaggcctcacaatcatggtggaaggtgaaaggcacgtcttacatggcggtggacaagagagaatgagaactaagtgaaaagggaaacccttttaaaaccatcagatatcgtgagacttatttactaccatgagaacagtatgggggaaacaactccatgattcagttatctcccaccaggttcctcccacaacacgtgggaattataggagctacaattcaagatgagatttgagtgggaacacagccaaaccatatcaccttcaaagaagaaataagagaattattagtaatttgctcagaatctggtatgtggaagagccaacatggggacccagccttttgtgattctaaaacctttgatctttctactaacattcactgttagagagtgtaggcgctgcaggagaaagagaaagtgcccacgaaaattagtctagcattgccgggggtaaaaagcacacactggtcctgcagcttattgaatcagagaaatgtgaagataagatgaactaaacaaacatattttagagcatggatctcgaagcagaatttggctaaattttaacaaaatgttcttcagtaacacatctcatgatctgaagattgtgttacaaaaaatattatcaggccaaaatttgttcggaatacactaatttttgctcctctatatgtgaggaaaatgagactagacagatttaagtaattgacaacttacttaaagtagcaaagtcatggattgtattgacttttaaaaatatagtaaaagtcatatttaaactttatcctaaagtttaaatctaacagaacaactgaaatacttgaaatagacctataaaatagtaattaaaatgagaaatacataagatgataaataaaatgaaggtgaaggtattccagatctaccgaaaagattttcagtatcacagattattcataagaaattgagaaaaggaacaatcagaagttgcaaaagatggtatagccgaatataatggaaataggaaaaattagtcgaaaataaaggttgatttagaaatgaagaaaatgaatatatttcttaatacaaaataagtgggaaatgagaagttataccaataaaaagcatttaaaaatttaggggatattgtaacccagtataattttctgacaggttggactttgaccctaatggacttactggtgaactttttcaaatgtttaaataatgtctatccatgtatcatgaaggacagtatgcttcaaattgtcttttgaggcagacatgttctcagtactaaaagacatttttagaaggattttattctcaacagatgcaaaatgcaaaataaaatattgacaaacaatacagcaacaaataatttactatcactcaggattataaggctggtgttaagcagaacagccattaaatcagcatcaaaagaacaaatagtaaaatccaaagtattaattacagataacttttcaaaaattcatcattcacccttgatttaattatttctctggcaatgatttaatagacttctcggagtctgttaagtacttaaaccaagaactaccattattcctactgggaaaacataaacatttctcaagtggaaagtaaacagtgttggcactatttttatatatggttaaagagacctgtcattgcaataaaagccagcattcacaaaatgaggaagataaggaaagtagcataaatattttctattaacatggctttacaactgctaaaacttatagtataaaaatgtactaacaaagactaattcaagaagttgcaggatacacaatttttaaaaatctcatttctacatcttagcagtgacaaactgcaatttaaaaagtgtgtttggttattaatatatatgagacttttaaagaaagttatataactacatagagataaattaagaaagatgcctaaatagaagcaagtttaaagagctatatttttaaacatgaacaaactcccatgggagccatgccagtgtagtggaaaagtagtacatggggagatggggagtttttttgaaaaccagaattacagttctcatttcactacttaccagttgtatactcttgggaaagtcactcctagtatctatttcaccatctacagaagagaaatacttcacagaattattgtggggattaagttagataatgtgttttaaaatataaagctacatccaaagaaatgccaatatgtgacattagtatgaaatttactacagctccatttaacattccaactggttgctgtgtggaatatggcataattgtaataaattatttaggaaagcaagcaaagatgtaagtttttttaatttagggggaaaaaatgggagccttgctctccaaatccttaaaacatgctattaagcaacctttctgaatattctgtggtgccaagtagaaagtttaactgaaattaataagccaatggaaagaaagaaatattaataactgctggtggaaagactagctagatgtcagtgtggaaagattagatccactttacatgtgatattccaaatgaattaaaatgttaagtataaaaagaaaaatactacaagtctcacaccaatagtggtataaaggaacttcatggcaattggcaaggtagatcaactaagagaaaaagttttaaatgtgtagtaaataggaaaaagacaaaacaagatggaatttaaaagaagctatttgcattacacatggatgcactcagtttttgtaaaactatatgcatatccataagggtttgtactcttaggcaaatttataaagcgatcgtgtataaatgatataaaaaatcaatttgaatggtattcaaatttcctaatattaaaaatgcaactttgacttagttcatgctattgtattagcaaaactgttttaattgcatgtgtccttatagcagcagcattgtgtattagtagccttttaagagaactgtgtagaagactataaaaagggctttataactgatcttttgacatactcactttgagtggcatatgcccaggaaaatatttaaaagaaagaaaagctatttgtacaaagttttctagcagttccactcagataactttaagggggaaaaaagcccaacgattggaaatggttaagtaaattttggtgtattgctagtgctatcacagaatgttatatagccattcaataatattgatatatgtcaaattgtatgcaaaaaagtgagattcaaaaatgttaataagaacataaattgtgtttactgatacatgtgaaaatttaggtctacattgaaaagaatcagaagataacatgtaattcagtttaacattaggggttctttatttttcttctgttaaatattgatgtatgcaataaaaaataaaagattaattggtaaagtggtttactgaactggtgagaaaattactgatttcttagaagtttctaaaattctattttaaattaaaatatacatttctaggtgttaaagtcaaaaaagatcatcttcagatatgtgtggcagaaagttttacaaatcttggtggggaggaattcttggtcaagatggacttcataatttattttttcttagttgatcaccattaaggaatagtaatagaaatattagtaatacattctaggacatcagcatgaagacgtcatatactaattaaagtatgcccctaaatgcaaacatgtcacttgggaatcttaaaaaccgtggagatgaaagttggattcatagatgtgaccgaacctggtttgcagagagacctgtgcgaaggccagatcttgggggactgaggatgcgacagaccctttcttccagtcagcgtgagagatccaaatcaaggtgatttaatttaataagcatccattgaacacctactgtgggttatgaattggcattattctgggaaattagagatacaaaaataagtgctctgtacctgacaaacattctgttggaatgttttccttaaggtaaggtaccttttaccttaatgagcatttaagacattttttacccgtctcactccccactgtaactagcacttcctgtttcctggcaaaagaaaaaacaaaacagaagtctctgccttgtgcacggcatcccttttaaaaggtgccaaaactcactacacagttgaaaacaggtggcttaaaggttaaaagccgaatcgtttaacactctccgaagtctatttcggatgacattcagtgagttaagtttttcacattaatcagaaactttttcttttgcctggggaaggagccaagaggagctctaggggattgggtctagaagcccaggacatcaagggcttagggagaggaagtataaagaaattagatcataaagtttcaataccaagaaattctgattaagattaattttatttgccttcatcttgatggatcaagtgaaagtcatgctcctgttgcataaaggtggctgcttcctctgaaaattttcagatttttattttagtatttttaccttcattataaagaggtatttgtagtgtagttcatttccttttaaccagcaaccaaatgtattcacatttcaacagcagggggcacagtacttccagctttctgtaaggcacgaacagtacaaaagctgagtgattcacctgaaagaatttggctataacaaaaatatatgac

SEQ ID NO: 94825 - DNA, 97224 bp, Homo sapiens
  misc_feature (1)...(97224): n = A,T,C or G
cattaaggcattgcctgcactgggcccagcacgctgctctgatcccatgaagaagctcaggtcctggcctgaacgcatactctctaagtaggctaggtagatgggggcctcagagatgactggggaaactgaggagggagtaatagtgacctttgaactattctgaccacttcaaatggccttaaagaggcccctcatctatctgaaattaacctgtatagatcaaaatgcccagctttttggttcttggctggcagtacacggtgtccyggcagccactgtgcttattgataagcatcttttaaaggaatgagcaaattttatgctggttgtaggctccaggtggcagttttgcatatttctgctgtatgctcagggaaattatttattcccccattaaacgtactgtttataggcaacagtgtttttgtttattcgtttagacattttttcctttttttccagcattctctgatctgggagggcaacagcttttaaaacatggactcatgacaggatgcgggggaataataatcacagctaaagcttatgtggcacctactgtgtaccagggaatgctctaagcactcccggcagttactcatcttcattacaactctccaaggcagcttccatttctttcccatgttacagatgaggaaactgaggtgcagggaggtttaagatcactcggctagtaagtggcagagacaggatttgaacccaggctgagtggttctggagttcacactcccaacaccagaatatgactgcttctccaaataaatgaactaatcagaataatattagaaagaaaagagtgatgaaaaggttgcttattagtgcccagggtcaatgtcctctcttttttttgagatggattctcactctgttgcccaggctggagtgcagtggtacaatcttggctcactgcaacctctgccttttgggttcaagtgattctcccacctcagcctcccaagtagctgggattacaggcgccaaccactatgcctggcaaattttttttttttgtatttttagtagagatggggtttcaccatgttggccaggctggtctcgaactcctgacctcaagaggtccacccgcctcagcctctcaaagtgctaggattaaggtgtgagccaccgcacctggccatcctctttttttgaagtgaggaaactgaggccagatgagcagtgaggcacccatgcagccagccagactcagctctgtgccctgtggcctgctgcaccctctcctgacctccattcttgcttcttcactgtgctgcctccccacaaggcaaccccctgccgaccttccttgtgcctcaatgggccaaccaggtgccagggactgagaggtgcagaagaaacagagcggagtccggctctgaagggacgacggagagtggtgaaaggtttgctcattagtgccctgggtcaaggtcctcttttttgttgttgttttgtttttttgtttttagactgagtttcaatcttgttgcccaggctggagtgcagtgacgcgatctcggctcactgcgacctctgcctcccaggttcaagcgattctcctgcctcagcctccagagtagctgggattataggcacctgccaccacgcccagctaattattgtattttttgtagagatggggtttcaccacgttggtcaggctggtctccaactcctgacctcaggtgatccacccgcctcagccccgaagtgctaggtttacaggcgtgagcctctgcacccagctggtcctcttttaagtgaggaaactgaggcacagatgggcagcaaagcgtccaggagcagtgggatagaacgtgttctgggctgggtgcagtggctcatgtttgtaatcccagcactttgaaaggctgaggcgggcagatcacttgaggtcaggagtttgagatcagcctggccaacctggtgaaaccctgtctctagtaaaaatacaaaaatcagccgtggtggcacgtgcctgtaatcccagctactcgggaggcagaggcaggagaatcgcttgaacctgggaggcagacgttgcagtgagccgagatcacgccattgcactccagactgggtgacgaagagagactctatctcaaacaaacaacaacaaaagaatgtgttctgatcccgtgttcagagcagacgtgttccrttaagaaaacagtgcacttgttgctctgagtcctttccgtgcacgtcctcttgctgcgtgcaggtgctttcgtctgcatcaccctgttctgtcctcatgaaaccctggtgatgcaggctcagcaaagtggaactgaccatatttactcaacacctagaggcccaaggtgcaaggtcagagggactacaggcttcggagaggagagggaagcacaccacactgagatttcaacactgtttcctatggggataccagagctgagttccaaaaaagtcgtacacacttctggatcagaatctgctgggagctgccagcaagaaatgaggctggcgagatcgagtggggactcagctgtgctcttggcaggcaacagggtttaccattttctgtaacaattgttcatctattttaggtgggacaatgatagtatggtcatattttttagttaagaatatttatcttttagaggtttgtactcgagaatttgagggctgggcgcagtggctcacacccgtaatcccagcactttgggaggctgaggcagatggatcaccagagatcaggagttggagactagcctggcccaacatggtgaaaccctgtctctactaaaaatacaaaaattaccgagcatggtgatgcacgtctgtaatctcagctactcgggaggctgaggtatgagaatcgcttgagccctggaggcagaggttgcagtgaggtgagattgcgccactgcactccaacctgggggacagagcaagactccatgtcaaaaaaaaaaaaaggaatttgtggacataacggtaggatttctgaatttgctttaaaataaacagtaggactgggcaggagtgggtaggaacacaggcatacaccttggccctagctccataatggttgatgttgagttttggttgtataggcctttattatactattctggttaatttttttcaaaggtttggatttttcaaaatattagccaggcatggcgggacttgcctgtggtcccagctactcaggaagctggggtaggaggattgcttgagcctaggatgtcaacactgcagtgagctgtcattttgctactgccctgcagcatgggcaacagagagagatcctgtttcaaaaatgaatgaatgaatgaacgaatgaataaaaaggtttggatttttccataaaaaagtattttttgagtaaaaagagaaatcttagcggtaaataaaaacattacctgcattaaaaagaaaatttttcttgtagctatggtaggcaattgctacagtattcaaactggggcagaatctgtaaaaaacaaggcttgagaaagattactctagtttcagaggcagacatggagacgtttttggccccagggaactgaggctcaggcccggagctccccgggaggcctcgttctctgcttctttattaatagactcagctacgcagccgcgggagccgcagacccgggcaggagagctgcagcgtggtcggcgggaggggaataaggcctccccagtgcggctgcagttgcaggccggcgcgggctcgttgcagctgccgagagcccggccaccatggcacaggtgagcgtggcgcctcggcgtccccacagactgggtccctgtccctgccccgcccggcctgcaggtggcacctaggcggcgcgcagggaagggcgcacggtcaaggccgaagagccctgggaacagacagggcgcggggccaatcccagctgggcgcgcaccggggcgctgagcgagggaggaaatgaccttggagcggggacctgtcggtggctgaggttccagggaaaggagggaagggcatttgcggtgagaatgacagtccagcttccgtagtgcaaaccgcgaaggcccacgtgcaaggagagcctcacgcgcgagagccgcccgggctcgtggggtgcagccgcgcgtcaggaacgtgtgccctggcccagcccactggcctcttggggcggtgaaatctgcgggggtcgagtgcctgggctcactggtggtccagacaagcgcaagcagggggacaaacccccaacttctaacctcaaagaaatgcaaattaaaaggagagatgagagattcttccctcccccacccctccttttaggattggcaaagattaaaataatccataatcggagacagggccccgcttgcacgcgcgggtggcagtggaagttggtaaacttttcggcatggtagcttggcctgtgtcaccaaaatgtcgcacgtgcctggttgcttcccctccagggatctatcctacaggataatcaggagctccaggaggtacatcgacggccaacgcagcttttatttatacctgcaatggtggggtggggggcggggaggaggccctaattgtscaatgggggccgcgtaaatggatcacagcatagtcaaaggaaatcttatgcagccttgggaaggccggtggtcatctccgtcccccagcagagacctgtctacgacgtaagccaagtgaaaacaaaacagccttacagacagcttgcatcctagccttcctttaaaacagcgagcccgggaaccgcagggagagttaactgcagcggtggtggggggcgggatcaaaggagaactttcattttctcttctaaattcttctgcggtaacaactaaatgatacagaaagaaggatggttgcaaacatggattttttcataactagaagaagtggtcgaacttaaaaagagcagggttcataaaagaggtttaaaagagtctttgttcataacatcggtgcatttatggagcacctgctgtatgcagagccgccagctcgcgcctggaagcattgcgggcaaagataggggaggggtggctcccggtcaggaagacccccttggccctcctgttacgcttggggcccctctccctccccctcaaccccctgggtcccctgcagctgcgctcgccctagactcctgggaccggtggatgttcagttcccgctcccggcccctctcccgagctccagcacaagggtctctcggtcgctctgccctggcctccagctactcctctcccagcacctattatgttcttgacgctggaagaattattttagtaaatctcaccaaagccccccaagtgaggcatttttatcctagctagatgaggaggagccacgctgcctctggatcgcgatgactgccactcgtggtataaggtctgatttggggcatgggctgtggaatcagatctggacccaatgtccgatctatcacttccccgcgcttttttttttagagacggggtctcgctacgttgcccaggctggcctcgaactcctggcttcaagcgacttcccgcctcccgagtagctgggattacaggcgcgccccaccactccctgtggatcggttgcttctcagctcggtgatgtggggtaacttatttcctggcccgcgacccttgtctgcatgaaagagtcaggggtgaataccatcagggggtgcctggagcattacacggggcaatgccgatagataagtcgcgaggatcagccaggcacggagctaagcgattttatgcgcacggcctccacgagatggctcgttttacggatgaggaaactgaggctcggagggtgaggaatctcgtcctagaccccattccggcagaggtcgaggacgcgagcacccgctcgagcctcagtttccctcccctcctagccccgcggacgccccgccccgccgaggccccgggcccccctccgcgcgccgggagtcacccgcctgcaggcgccgcagccggacccgcctcagccaatccgctgctgccggcgtcgggtgcgctcggcctcgcccgcggccctccttccccggcttccgctcgccgctcgttcactccacgcgccgctgccgccgccgccgccgtcgtgccgtgccgcacctccgtagctgactcggtgaggcccggtcgcccgcggtggggagggtggcggggccctgcgggctgcgggggccggggacgggcggggcgcggggctgccgggaaccggaccgggtgggggacgccgnnnnnnnnnnnnnnnnnnnnnnnnnnnnnnnnnnnnnnnnnnnnnnnnnnnnnnnnnnnnnnnnnnnnnnnnnnnnnnnnnnnnnnnnnnnnnnnnnnnnnnnnnnnnnnnnncggaccgggtgggggacgccgccggaaccggggcgccgagaggaaccccggtattccccccggacggcggggttgtggagatcctgaacccagaaagaggccggggctccccatgttccccaggggattgggtctgagggtccaccgggggtcggtccatccgcaggcgggtcccgtgcggccgcgggagggatgctcggccctccggacttggctggacgcctccggcccggggccagcggggccaccggctcccttgtctcccactccttaatccgccctggactggattgagtctgagggtctgcccaggggtcggtcagcctgcgggtggccgcgggagggatgctggacgctctggatgctttycaggatgccttcgcccggggccagtagggcctccggctcctgtccctgcccatcccaccctggctctggagaggattgggtctgggggtccgcccgtgggttggtcacctacgggcaggtgcagtgcggctgagggaggggtgctcggccctcgggattcggcagggcgccgctgaccccatcccagcgtccgtctccccggtccccctccccatgcccgccctcgcggtgcagccgtcgggacacgcccttggcgcagggactccaggcgcggtccgagcgctgccgtgagcaggatgagggtgccgggcccagtgcctgcttgggagcgccccgcagcctctcccgtgcagcgctgggtcaagggcgggtgggcgcggagcatgtgcccaaggtcgtgccgggctgggagcggcggggccgcgggagggtgggggtgtcacgtggccgtgccctggcgaacttggcctgcgagcccgacggtgcggtcagggccacgcggggcagccccttctcggagccaccgccgcggccagccaacagccggcttctttcggtttgtcaggagaggccatgggtcagcgtctttataatgtaaatccgcccttggctttcgttaaagccgcagaactcaaagatgagggccgatcttactttaaaaaaagaaaacaactcagagagttaaaaatcccaactacctaccaggttaaatacataacaaagttaatattcccaactcggcacaggctttcggttcctctcggctccgtgtgttataaaatatttaagggcagattttagtaggaagctggtaactttgtaagttaccgaataaaatgaaaatcggttttaccttttgcaacgttgtattttgttacaccattttcttccacaggtgtccggtttctggtcattccagatatgcaagcatgtttatttcattctaagccacaaaccaagtgaataaaaaatggctgagcactggtcttctatttatgccaggaagcacccccacccccgggcctttccaaattctttaaggcgactctgaccgagtgaacgtagcaataaattgaggacataagtgtcgctgagaatgcacaccgctgaggccagcgaacatccagctgtcagttggtctggggactatcagcattcgcagctggttctttggattggttttgcctcaataccaagagcctgtggactgcttttcgcatgtaaattactggtttccttcctgtgaagcattgctagcctagaccttgcacttgaaccctatcttaacagttggaatcaaacaataaaaagggccaggtttgggagtgcacacactttgtttcaaagtggcagaagttggcatcatgcacaggccaaaataacgtttcgagttggtactaaaaacaagccgcctaccctggaggggaagagaattaaactgggtcccttccgatactgctgcggctgctgcgtttggccccggccccggaccagtggtcaccgagcggtcaagttgggcctccggggagccctggaacgagggcctgcccttacccaaccctggccccgagtgctcattcataaaaacaccgtcagttttcactgaggcttcacagtgagccccttttagacgcgccctgggctcttgagcgcggtgcctgcgtttctggctcgttggatgcagcatctgtcatcagaagcactgagcaccgagctgtccccacagctgggcaccgcagggctcgaccttcccacggagaggtgcgttgcatttctcccgctgtcgctggggtggccacagggacgcgcgccaactcgctccggaaggtctctgtgggcacggcgggtggaacaggatccgagcgcctgggacgcgccagcctgggggcggggctgctgctgacctttcccctacttttctcagccgtcacgtgacgccgcccggggcttgggggaaggggcggggcgcgaagccgcagttgctggcggtgcccttccgaggacgctttccaagcgagcaattaaacttgctgcccgaaatctaaaggcgcaggggcggtggcagcggcggcgggaggcggaaaccggagcctgcgcgggccaagggctgcttctgcactttgatcgtttgcattttttcctttgttggaaaaaatgtttagtcactctgcatggttattattggcaggccagaattctgttgctggtggaagcctgaacttgaattccggaagaattggtgctttaagaattaaaatggctgttcgagattgtttgtttaaagtgtgttggagagaatctctcgagaatctctccaacacactttaaagaggcctcacttgtcttctgccagtcttgagcttttcttgtgaagacttttgttttgttttgtttttacaaataagcgatataagcatacgatgcaaagttaaagaggcacagatgggcccggccccgtggctcacgcctgtaatctcaatgctttgggaggccaaggtgggaggattgctttgaggccaggaattcgagaccaacctgggcaacagagccagacccctgtctctacaaacaattagtagggcctggtggagtgcatctgtggtcccagctactcaggaggctgaggtgggaggatggcttcagcccaggaggtggagactgcagtgagctatgattgcaccactgcgctccagcctcggtgacagccagaccctgtctctggttttttttttttttttttttttttttttttaaaaggtgcagatacagagtagagtccttctcacttggttcccctctccagatgccaccactattaccagtttctttgacgacatgtacaggatatgttttttaaacaaattgattgcttaacacaagtaaggacttttttctgcttgctagcttcaaatatttgttaccttgtgtaaatttcaacttttaccccatccaaatgtcaggtgaaggttggatctccagcaggccctgggctgaggccagctaccctatttgggtatcttgacggcctcagaagtgtctgcctttgccttttttttggtgaggattgttcttcggtccaggaacgtctttggaagttaacartgaaagaaatcatgctgctgagtgaggcgtgccctctccagggtgtgcaggagggtcaccgtcaccttggagggttgggcagtagggtgggtaccgctctgcttcctgagggatataggttaggcattggacaccaagtcctttatgttaagaaaggaaggcttcatactcctgatgcgggtggtttgtggtacccagcccaggagccggagagccagcctgcattcttcctgttccctaagcccccacatgcagccggggctaagtgctgctacttcttcctaactcacccttacattcaccttcctcattatttcagtggcccagagcagacattcagatatgtgttgaaggaatgacagaacatttgagacatcctttctttttttttctttagtgacaaggtcttgctctgttgtccaggctggartgccrtggcgcaatcatagtgcactcttggcctcaagcgatcctcccacctcagcctcccaaagcactgggattacaggcataagccccctcgccctgcccgaagcaccctttttccactctggattgccataaccgcctgacgaggggcactgttattcctgtttgtgttatgggaagttcctgtgagggaggcagggagcagaggagcatttgggtcccccctcaatgcaccttccttcatgctgctactgtggctgaggacatctggacccgagaccacgtccctattctctccccacagcaagctgctagctctctgcagtgatgtctgcttcgcccaccagccctggctcactcagggggtcctgtggtcatcaggtcacattgagtcaccacagacagctttcctaacgctgtgttctgatgccctggagaaactgtcagctaagcgcagtggctcacgcctgtaatcccagcacttctggaggccacgatgggcggaacatgaggtcaggagatcgagaccagcctggccaacacagtgaaacctcgtctttactaaaatacaaaaaggtagctgggcatggtgatgcacgcctgtaatcccagctactcgggaggctgaggcaggggaatcgcttgaacccaggagttggaggttgcagtgagctgagatcacaccactgcactccagcctggttgacagagcaagactccgtctcaaaaaagaaaagaaaagagaagagaagagacaaaactgtcatatgctatcactgaaatttgactttttataaaatgattcttcatttataaaagcatttatccctgatttgccaactgtcatctcctctggtgccctgaaaaagatttaatacatggaggtttgctttcctttttctttatttccttcattccttccttccttccttccttccttccctttcttttcttggagattttgtttcatttttctttctttctctcttttcttttcttattttcttttcttttctttcttttgaggaaatctcactctgttgcccaggctggagtgtagcggtatgatctcggctcactgcagcctctgccttctgggttcaagtgattctcctgcctcagcctcccaagcagctgggactacaggggcatgccaccatgcctgcctaatttttgtatttttagtagagatgagtttcaccatgttggccaggctggtcttgaattcctgacctcaggtgatctgcctgactcaccctcccaaagtgcggggattacaggcatgagccactgcgccaggagtttttttttccgaggcaggatcttgccttggtgcccaagctggagtgcagtgccgtggtgccatcatagctcaacgtaatctcccatttgggctcaagggatcctccttcttcagcctcttacatagctaggaccacaggcatatgccaccacacctagctaattttttatatttttttgtagagacaggcctcactatgttgcccaggctggtcttgaactcctggccttaagtgaccctttcaccttggccttgcaaagcrttgggattccaggcatgagccaccacgccgggcttcctggtttctttatacttcttcaaatacacacagtggctcaatgtgatgtccagtacagtttgcacaaaatacaaccacagattgctaaaaggtatacatcgaagtcagaaggtatcaaatgctggcattgagatttggcatggggtgggggtgcaacaggtaggaagagaaatccacattcctagagggtttgcattggcaccacagggctacagttggaaagggacaaagaacgtgttcctgcagtaaagacctaacaggtgtcagagctggctgccacgtcctcctgcagtttgccggaggaggtaagggcrtcctgcatactttatgtgaggcaaatacttgctcaaggtcacaggtctgagtaattggtagagctgggatttgaacccagatctgtgtgttttctttccctttcccaggctgcttcccagaccactgggcagccagagggcctgggttttggaggcccccactccctaccccatgcagactgggtgtgkcactgaatccgcctctagggtttctgggtttccatttcctcatctgtaaggtggtgggtctgaacctgtcattccatgtcacacgagttttgtgaggatccaatcagaggtcagatgtgaagagagttttgagtgtgtaaagtaaatacaggctctagcaaacaatgtcctggctgcaggcggcatttagggacaccaatgtattttgcagtccccacattagaagttcagttcaagttcagtttgaattagaagttcaagttgttatattctgtgcaaaggtgaagaatatgcatgggagatacaggggacaccgctcctgttgtcttagggacatttgtgggaacaatatactggtacgaagaggaggtttaggatgtcctttgggcaggtgcaggtctccyccttgcagtctgagctcstgcccgagtgccgatgctggctagaggcagggcaggcacagtgggaaagaagtagcagctgttaaacttctggtgggcttctgaatagctaggtcagataactgggtctgtcaatacgttggctatcttctttataaaattgtgaatctttgtggcttttccaaattttttttctaagatcatatttgtctgtatttatctaaccattacttattgacgtggtgcactataaggtctaaatttgaattggcttaattttttttttttttgagatggagtctcgccctatcgcccgggctggagtgcagtggcgcaatcatggctcactgcaacctccgcctccccagttcaagcaattctcctgcctcagcctcccgagtagctgagattacaggcatgcaccaccatgcccaggtagtttttgtttgttagtagagacagggtttcatcatgttggccaggctggtctcaaactcctgacctcaagtgatccacccagaattggcttaatttttacagtacttggtaagacagggtctcgctctgtcatccaggctagagtgcagtggcgtgatcatagctcactataacctcaaactcctgggctcgagtgatactcgcaagtagctgggaccacaggcatgcactacccacaccttggctaatttttgtattttttgtagagatggggtcttgctacattgcccagattggtctcaaatacctgggctcaagcgaacttcctgccttcgcctgccaaastattgggattacaggcatgagccaccatacccagtccagaattccttttattttattatttttattttttgagaygaagtctccctctgtcacccaggctggggtgcagtggcatgatctcggctcactgcaacctctgcctcccgggttcaagcgattctcctgcctcagcctccygaatagctggattacaagtgcccaccaccacacctggctaatttttgtatttttactagagatgaggttttgccaygttggccaggctggtcttgaactcctgacctcaggtgatccacacgcctcagcctcccaaagtgctgggattataggcatragccaccgtgcccagcccagaattccttttataacctgacgacccattatattgaccccataaatgtgaatagtccattatgataaacttcagtacaggaaatccactgtgtggccaatttaaataatgtgaatattgaatgatcagtcatgaattcaagacgcaacctttcataatgaaagctccaggctgggtgtagtggagcacacctgtagtcccagcttaggctgaggcaagatgatctcttgagccaggagttcaaggtcacgctcggcaacagaacaagaccctgtcttataaaaaaaaaataataatgaaaatccttcacctttcttgtacatgaaaccctccgaaaaacataaggtgagtcttacattctcacttctaaggtgcttccatcaggttkgggaaacaatttctttttttttttcttttttgagatggagtttcgctcttgttgcccaggctggagtgcggtggtgggaccttggctcactgcaacctccaccaaccaggttcaagcaattctcctgctacaggtgcccaccaccacacccagctaatgttttgtatttttagtagagatggggtttcaccatgttggccaggctggttttgaactcctggcctcaggtgatccgcccaccttggcctcccaaagtgctgggattacaggcgtgagccaacacgcccagccaagtttgggaaacaacttctgtttgtgtgtatacacatttactggaaaagtacaagggcaccattacagatgtgcatatctgcaattgaataacgatgtggctcatacagtgcagagagcgcacacccacacttgcctggagaagaggagctgctgcttttcttccttcccattattgctaatttttgcctgcatctcagttcagaagagccatgaactttactgcacatgtgtgctagttctagggaaccccctgggctgctgctgtccttccagagccttcctggtacttcccttgaagttctttgggcagcagtgaggaggccaggccagatttttgccaccttggamatcatgcatgttgtgaaggtggtttccccgagctggagccagtcccggaggctggcactagctttctagcgaagcagaatcttcccaggcattggtcacccgggcatccaagaatgtgttgtagatgatgagataactgccctgcccttcgccagagacactgcttctgaccctgcctacagcgccttctccagtttttccagggatgaggcccatgtcatccagcctcacactttctctgttcctagaggccctgcctggtattcctgctgagctaagctgtcgcttcccatgggtaacattttctcagaggatttccaacatagttgtttaccgctggaggagatgggcagctgttagctaggtttgaatagaaagcagagcctgctcctgtgtgcatgggcactgtgcaatgctagtgggaagactgcagcatgtgaataattttacagttggcactgatggtgtttatacttactggagttttattgctggctgcaatctcatcattttggttacaacagtgacctaattttatatctgtgttgtaactttaggaatcctaagtagaactttttgtgtagtacctaccactttactttgggagttaagagtataagttttggagttggacctgggtttttgtttgtttgtttgtttgtttgtttgtttttgagacagagtctcgctctgtcacccaggctggagtgcagtggtgcaatcttggctcactgcaacctccacctgccaggttcaagaaattctcctgtctcagtttccctagtatctgggactacgggtgcatgccaccaagcccagctaattttttgtatttttagtagagacagggtttcaccatattggtcaggctggtctcgaactcttgagctcaggtgatctgtccgccttggcctgccaaagtgctgggattagaggcgtgagccaccgcacctggcctgggcctgggtttgatttccagccctgctatttgctggctgtgacactgggcaagtttcttgacatctaagccctggttttctcattagtacatggagatagccctagtacccatttcctagggtgctagtgggaattaaatgatctaatgctagtcaaatacatcaatataaaaatatatatgggtcacattgtctagcatatgccaaagggtttggtaaaaagaatgttctgggtcgggcacagtggctcatgcctgtaatcccagcactttaggaggccaaggcagacggatcgcttggggtcaggagttygagaccagcctggtcaacatggtaaaaacccatctctactaaaaatacaaaattagccaggcgtggtggtgcgtgcctgtaattccagctcctgggaaggctgaggcaggagaatcacttgaacccaggaggcagaggttgctgtgagccgagatcatgtcattgcactccagcctgggtgatggagcaaaacttygtctcaaaaaaaaaaaaaaggaatgtgctgtaacttcattattaaaagcacaaaaaggaatctttatgtcttacctacctaccttcccacacacctatctattagtatctccatacgtgttgattgcaaggctgtgttgaaagacttctgccccactcagaaattatttacatatttcagttgctataaagaccattttcttggaagtccgttgtcacgtatcaagttttattgtttgttttatattacagaggcaagtcccatatctccattttccttgggcgtgttttgaaacctggcaatgcacggtgcatcaagctgacctttcacctgctttcctcrgccacctgcctgtctcagctctgcaggactgggggtgcaggagtggggaggtttgctcaaagggcatagggacctgtgttgagtgtcttcttgattacrtggccagtgttaggattcataggccaatgacttcgaaagaggtgaaaggttttggttaaaaggaattgattatggagaaagggaacaaagtgaacactttcaaaaaacaaagtaccagagcagtttattggccaaggatttgggggataktgagcaaagttgttaaaatgaagttaatcgtaagcaaaattgaagatgtgtyatcaccttcccccccacgattgttgatgtagcattcagcgttggagaactgtccatagtcttcaggattcaattcggatgacacaaggattcatgtccttgagaagtgtatttggaagactggacacataactcacaagtgaaggtcatttgccagctggtgcaggtgacattgctaaatgtctcttgtagaatttcttggggagtttggattcgtgggctgccccctaaagtgctgggagctttaagctaagtatgaagaaaggagaaaacagaaatggaaaaagagctgaagacttcccagctgcgagccagttagtggcataggtcaaggctggtgggcctggcggaggggcaggtgacagggagagctgagcttggaaggtggtaggaacaaccatggaataggtgagctggagacgggacagcggatttgtgacaattgtgatgaaggggttgcagccttggctggggcctcttattctgcatctctgtgtggttccgagagcagattagcataaggtgcttaagtgctatggcacagacctcagtgatgagtcccatcatagcctccaggatggcatgtggcctggctcccatgctccacctgggagttggtgggcaccccgtgtgctccgggcaaggaggtctgtgtgagctcccagcaggtgggctccaggtgggcgatctccacccccaatcccccaaccccactcagcctttcttttattttttttgagacagggtctcactctgttgcccaggctggagtgcagtggcacagtccgggcttgctgcagcctcgacctcccagacacaagaaatcttcccacctcagcccccagaatggctaggaccaccggtgtgcgccaccacatccagctaattttttgtatttttggcagagaaggagttttgccacgttggccaggctggtcttgaactcctggactcaagcaatcttcccatcttgccctcccaaagtgctgggatttcaggtgtgagccactgcacctggcctcccactcagcctttcagggctcgtgtccacttggggcagaggtacaggccaggccccagccaccatgccagcttctcagaagtgatttctgtactttcagtgaaaatagacacatccgcggccccatgacaatgccagacgatgtgttgtttttggtgtggtggaggccgccggggtgttgccgccacctccgatttactccatagctggcccaggggcacacagcaaggaggggtcttagctcaggaacagcacccaagggtcctcctgttttacttacccagagctgcctcctccacgagtccattcccagggctagttcgggattcccgtccgagggctccgcgatgatttgtgggaacgagtgagtgacaggggagaggttaagttcccttttcatccatctgtatttttctgtattttctcatttcttccttttaacttttcttcctcctcttttctgcctttccagtaaaagcgttctctcctctagccatccttgaacttggggcacaggtgcacgccctgccgtgcagcttggatcccaatggtcacgctgtgtaaactttgtcccccgggacaccaccttttcccaccagggctgtgatatgtctccgatacctgggcatggaagaaaatcacagaaggagaggggctgcagataggccggcccctggggtgacgtggattaaagagccgttgggcaggtctctctgggaagtctctgtatgggggtggcttggagaaaggaaggctgggctgtagagcggacgtgttgctggtgggacacgcggcccggggaccttcacatcagcaggttctggggactggagtgaacacccctagtccatccctgcttcttcccaggcagggcaggtgccggygttctcagtaagagaaaccctggggaggatgcgggcacgtggacaggtggtgagattcattgtcagctggtgaagttttggctgggtgaagacgtgcttggaaggtcaggtgcagtgtgctcaggttgaagctaaagtcctggggggctggctgactcccagggtgcagggggagccacctactagttcagaagccagaggggcccaaggcagcagcagatggaccggggccagcttgcgtgcctggtggcctcccccaggaggaagaaggaacgggaagtggggctggcccacagagactaacggtttagttgtacaccgtgagtgggatgtggcagagcccccaccagccagaggaggcggacgcttgcccaagcctcaggccatgccatgcccctgccaccctcctcactacagcctcaggaaggctgaaggggtgagcaaagaggctgcccagtgttggtggcctggatccagacgcaggcctggctgccagctggcctaagggcccttctcccagcgtgctggggctcccagccacagtgcccagtctggcagggtgtgcccaagaccccagggaaggcttccgggaaggggagttgtaacacatgggtgccctggcctcctgccctcgatgaaaggtgctggggaggggaagacgcagtgagcctggtgagggactcccacgcaggtgggaggtggggggccctgacccaggcctggctgtagcggacaggtggcccattctggacacacagaagcggaaggaacacaggctgcaaagtggtggagtatgcccccctctccaagaagcccctggctggggccgatgtggcagcgatggcgaggtgggcagggcactcagacgccttgggaaagctgacttgggagacacagggagatggggtgtcgagcagctggtgggacttcagcaagggcaaagagggcaggatgaccacatcaagaaggagctggaactttggtagagcaggcagggcagggcaggcataaggaagtctgccccagaggccaggggtgcccacgaacactatgctctttttctactcccattaaaatacgatgctgcaacatggacaaggccactgtctgcttctttgtttgcaacagtgaaaaagtgaacagagaagttccctgagccccagcagggacacaagagcagactggttcctgccagcaggggggtgcaggacagcagggccagggctgtgtaggtkggyrtggggcagcttggaactcaatgtggacgagaagcaagttgcaggaccgcgcacagagtaggcagcatttgtgtgtgcctcgcacgtgtrtggtggcactgtatgcacttgtagatactcaaatacgtagggaaagatgagccccgcattctggggacagggagaggaggttgtatctattgcatcttagaaatttttgcagggctgggcacctgtaatctcagcagcttgggaggccaaagaggaaggactgcttgagtccaggagttcaagaccagcctgggcaacatagtgagatcccatctctacaaaaacaaaaataaacaaacaaactggtgggggtggggtggggtaggggggacattctaaatcaatacagcaaaatgttaaatttgttgattccaggagggtacacaggtgttattctctgcttgcctgtgtgtttgcggttatcttatgatttaaagcatttaagacagaaaacagtcttgctgtataatatagtaaagttcactggagcttgtgtatgtgtatgttttgagacaagatctcgttctgtcgcccaggctggagtgcagtggtgtgatcatggctcactgtagcctcaacctcccgggcttgtgtgagcctcgcccttcagcctcccaagtagctgggactacaggtgctcaccaccgcgcctggtttatttttgtatttttagtagagatgagattttccacattgctcaggctggtctcaaactcctgggctcaagcgatctgcccgccttggcctcccaaagtttttgtgaggcttatctgaggtccaggaatttattagtgactggcgttcttccacctggacaccccacctcacccccactcctcctccytaagcaccaggtccttggaagagctttgcgcccttggccctgggcttgtcgtctgcccatcccagtctcagctgctcacctgcctcacctggctgctgtctgtttccaggaaggtgaggttagccacctgtagtcccagtcctgtttatgccagtgtggtgaggccgcagacccgatttactttgaggaatcccgtttgtgctaagtaaagtatgttacagaaagtcacgctgagggccaggttggttttcttttttttttttttgacagggagtctcactctctcacccagkagtgcagtrgcctgatctcagctcactgcaagctccgsctcccgggttcacgccattctcctccctcagcctcccgagtagctgggactacaggcgcccgccaccacgcccggctaattttttttttgtatttttagtagagatggggtttcaccgtgttagcgacgatggtctctacctcctgacctcatgatctgcccccctcggcctcccaaagtgctgggattacaggcgtgagccaccgygcctgacctttttttttttgagacggagtctcactctctcacctaggagtgcagtggcctggtctcggctcactgcaacctctgcctcccgggttcaagcaattctcctgcctcagcctcccagttagctgggaatacaggcgtgcaccaccagatccggctaatttttgtatttttagtagtgacagggtttcaccatgttggccaggctggtctcgaactcctgacctacagtgatcctcccaccttggcctcccaaagtgctgggattacaggcctgagccacagtgcccggcctcaggttggctttcagtgcgggggtacatcaaggcaggaaacgtgctgaccactctcagactctggtctggggccctctactctccagggccagggagggaaggcgggtgtggtgcgaatggctttatctggttaccattcttatgagttcctcggttttagagacattaggaaccctctgccctgtgtctggagtgagtgaggctggcccaggagctgggtggcactcactggggtgggttggcctctgtgaagccatggtgcccgtgtcttctgcagtcccccggctttgtttccggtgactcagaggtgggagaagctgccactctgcatccactcccagctgggtgaaaggcagggagcaggtgtgcccycttctggggagaggtgaagtccctgcgtgggccaggagtgtggcctcctgcctgaagaggaagcacctggaagaggctggctgggtgaggtggggggcaggcactggagggaggcgggcactcrgggaggcgggcactggggggaggccctgcttttcctttctcatcctttttacaccagggtcataaaaatcctgttgggttgggcaagcaggtggtgactgttcaggtatttccagattgtgggtagtggggacggggtaagggggcttgggcatggccaactttccacatgctctggccccggaaacctttgctcctcctggttttatcttccctggctccggatgggttacgccgtttctctgctgccagccctgttgtattgggtgggctatggggtgagaagtgtgtgcttcccttcctgggaggtgggcacctggggcacttggagtatctgaggagctctccaaacatgagatttttgagctccaattgcagcagatgaatgtttcatttcattcaacacattctaaaacatcaggagatctcaaatgtgcgtagaagagacacttacctaccgggcttgcacagccctgcccttcacccgttctcacacatggctccttcctacccgtccctccatttttcccaccccaagtgattttgaagcaagtcccagatatgataaaagataaaattaggctgggcacagtggctcacagcactttgggaggccgagttgggcagatcacctgaggtcaggagttcaagaccagcctggccaacacggtgtaatctgggctatattgaaaatacaaaaatcagctgggtgcagtgtcgggtgtctgtagtctcagctactggggaggctgaggcaggagaattgcttgaacccgggaggcaaaggttaacgtgagcctagatcgtgctactgcattccagcctaggcgacagagcaagactcaacagtctcaaaaaaaaaaaaaaaaaaaagatacaattgcatgtagcaatatgttaggatgtatcaataaaagatgggaaccctttttaaaaataaccactgcctgagtgccatggctcacacccacggtctcaactactcaggaggctgaggcaggaggattgcttgaacccagagctgcagtgagctgtgattgtgccactgcactccagcctgggcagcagagcgagactctgtctcttaaaaaacataaccacaatatcttgtaatacctaaaagataattcacagaaattccttaatgccatgaggtaacagttgttttgaatgagtctttttttaaatttaatttaattttagatttgggggtacacgtgcctgtttgttacacaggcattttgcatactggtggggttgggtttctggtgtacccagagtgccctccatgaaagggaagagagtgaacattgtacctgataggtaatttttcagcccttgccctgctgcctcccttcccttttggaatccccaatgtctgttatttccatcttttttctctttttttttttttttttgagatggagctttgctcttgtcccccaggctggagtgcagtggcccgatctcagctcactgcaacctccgcctcccaggttcaagcgattctcctgcttcagcctcccaagtagctgggattacaggcgtctgccaccacgcctggctaatttttggtatttttagtagagatggggtttcaccatgttgtccaggctggtctcaaactcctgacctcaggtgatctgcccacctcggcctcccaaagtgctgggattacaggcgtgagccaccgcacccggcctgtcacttccatctttatgtctatgggtacccattgtttagctgccacttataggtgagaacatgcggtatttggttttctgtttctgagtgagttcacttaggataaaggcctccagttgcatccatattactgcaagggacatgatttctttctttctttctttctttcttttgagacagagttttgttcttgttgcccaggctggagtgcaatggcatgatctcagctcactgcaacctctgcctcctgggttcaagtgattctcctgccttggcctcccgagtagctgggattacaggcatgcaccaccatgcccggctaattttgtattttttaggagagatggggtttctccatgtcrgtcaggctgttctcgaactcctgacctcagttgatcctcccgcctcggcctcccaaagtgctgggattacaggcgtgaaccaccgtgcccggccaatttcattcttttttatggctgctgaatgagtccttaatgtgaccagagcattatggtggacaggatatggaagaaaataataacatatccacccccaccatcatatatttgaggagagaatggttaggtgcatagacattaaatagataacacttcttcagacagtattttttggtaacagctttattgagagattcatataccataaaattcacccatctaaartgtacacttcggtgagtttgggttttttttgagacagggtcttgctctgttgcccaggctggaatgcagtggtgcagtcacggctcactgcagcttcgaacttccaggctcaagtgatcctcccacctcagcctccttagtagctgggactacaggcacacatcaccgcacccatctaatttttgtagtttttgcagagacagggtttcgccatgttgcccaggctttcagtggtttttagtatattcacagagttgtgcaactatcaccacaatcaattttggaatgttttcatcaccctaagaagatacccccaactccttacccatgacctccctatcttcccatctgctccaagccccyggcaaccactagtgtactttctgtctctgtagatttgcttgttccagacatttagaataaatagaatcagcaatatatgaccttctgtatggcttctttcactcagcatcacgtcttcagggtccatccatgttgcagcaggtgtcggaggtccattccttttcattgctgaatactattccacagtatggatggaccacattatatttatccattcatcagcagaatgtattgccactttttggctatcatgaatgatgttgtgagtgttcgtgtgcagacttttgtatggacatgttttcagttctcttgggtatatatgtagaaatggaattgctgggtcgtatggtaagtctatttttctacaattttcttttttttttttaagacaggatctcccctgttgcccaggctggagtgcagtggtgcaatcacagctcattgcagcctccacttcctgggctcaagcgatcctcctgcctcagcctcccaagttgctagggttacagcaatgcactaccatgcctgggtaatttctttgatttttaatagagatgaggtcttgccatgttccccaggctggtctcgaactcctgagccaaagcaaycctcctgtcttggccttgcgaagtgctgggattacaggggtgagccactgcacctggcccaatttttatttttttttttatttttgtttattatacagagacaggggcttgccatgttgcgcaggctggtctggaactcctggcctaaagcagtctttctgctttggcctcccaaaatgctgggattgcaggtgtgagccacggtgccaggccagtaactctgtatttaagcttttgaggaacggacagactgtttgccaacgtggctgcaccatttgaccagccatgcatgagaattctgatttctccacatcctcaccaacacttgctatcatccatctttgtgatactagccatcctcctgagtgtgaagtggtgttttcctatggtttagatctgcactccctattggccacaggaggcagtcttacacttgcagtggtccccccttatccttggggggatacattccaagacccctggtgggtgcctgaatttgcggacagaaccaaacctatayggtcagctttgtatcctcaggctctgcttctgtggatttaaccaaccaaggattgaaaacatttggggaaaaagaaaaaacctaaataataacaaaaaataatacaaaataaaaatacagcataacaactgtttacatagcatttataaggtattcattattgtaagtaatctagagatgacttaaagtatacaggagggttgggygcggtggctcacacctgttaatcccagcactttgggaggccgaggtgggtggatcacctaaagtcaggagtttgagaccagcctggccaacgtggggaaaccaggtctctactcaaaatacaaaaatgtaggccgggcgcggtggctcacgcctgtaatcccagcactttgggaggctgaggcgggtggatcacctgaggtcaggagttcaaggccagcctggccaacgtactgaaaccctgtctctactaaaaatacaaaaattagccagtcgtggtggtgggggcctgtaatcccagctactcaggaggctgaggcaggagaatcacttgaacccaggaggcagagggtgcagtgagccgagaccgtgccattgcactccaacctgggcaacaagagcaaaactccgtctcaaaaataaataaataaaataaaaatacaaaaattagccagacgtggtggcacatgcctgtagtcccagctactctagaggttaaggcaggagaatcacttgaacccgagattgcaccactgaactcccacctgggggacagagcgagactgtgtctcaaaaaaatatatatacaggaggatgtgtgtaggttatttgcaaatactacactattttctataagggactgcacattcatgggttttggtaagcatgggggtcctgcaactagtccccctcagattccgggggacagatgtgtatacgaggtgttttcctgtgtagtactactgtgtagtaactccctgtaggcagggagtgttgacagcatgggtagcctgggcaaaggggtgattcacgtccctggaaggagggagtgggacggtgggagttttcatcatactgctcagaatgctgcacaatcgaaaactatgattttttttcttttttgagatggagtctcactctgtaccccaggctgaagtgcagtggtgcaatctcagctcactgaaacctctgcctcccagttcaggcaattctcctgcctcagcttcccaagtagctgggattacaggcatgcaccamcatgcccagctaatttttgtatttttagtaaagacagggtttygccatgttggccaggctggtctcgaacccctgacctcaagtgatccacccacctgggcctcccaaagtgctgggattacaggcatgagccaccgcaccaagcctggagttttccatttaatattttcagatggtggttgaccatggataactgagacttcaaaaagcaaaatcactagacatggtggctcacacctgtaatcccggtactttgggaggctgagatgggtggatcgcttgagtccaggagttcgagaccagtctgggcaaggtggtgaaacgctgtctctacaaaaaaatacataaattagctgagcatggtggtgcatgcctatagtcccagctactcaggaggctgaggtgggaggatcacctgagcttggggagtagaggctgcagtgagccatgatcgtgccactgcactccagcctgggcaatacagcgagaccctgtctcaaacaaacaaacaaacaaacaaacaaacaaacgtgcaaactgtagctgagaggggactgctgtaggtgcggctatatcagtgtttttaagcataaggccactgatccaggccagaacccagggtgggatttgcgctcattacatttgcacagggagctcctctggcccttgttggattcactcatttctgctcatggctcaaagagggagaggctaggtcaggacagcccatctcagctcctgcagaagtagaaaaacaaattgtgcaccttaggggcatttagaactcttagggttaccctgaaccagtccaaataaacaagtccttcattaaactcagatcgctctgcgagggcgtttcactcctagaaaggacactataattacctccagtctgactcttcctatcagaggttagatttctgagcaagtgttggatacataactttggagggacttggctacagacgctatatttaatccactgccatgaataatgcctttgtgttctgtatgaagcccaggagatcttatcaatcgtgcagaggtagccagtcacgtcactttatttgccacsgtgcatgctttgcagagtcctcttctgggatgccttcctcatggttactgcgaaggctttgatggggaagggggctaagagttaaccttgaggcggggcgtggtggctcatagcagtaatcccggcactttgggaggccgaggtgggcggatcatttgagctcagcagttcgggaacagcctggccaacatggtgaaaccctgtctccactaaaaatagaaaaaattagccaggcgtggtggcaggcacttgtaagcccagctactcgggaggctgaagcatgagaatcgcttgaacccgggaggtggaagttgcagtgagctgagatggcgccgctgcactccagcctgggcgacagagtgagactccgtctcaaaaaaaaagttaaccttgagactccacgggagtcttacagctgcttagatagctttttgagaaatggttcagagctgcttgctttgatgccctcttcaacccatggcaaacatctgcttggtgatcttgctgctttcaaaaatgggatccattcctttaaaactggccaggccrtgggagttggctgcgtgcctactaaataatatgtaaatactgttgttttgttgttgttgttgttkagatagggtctcactctgtcgccctggctggagtataatggcgtgatcatggctcactgtagcctctacctcctgagctcaagggatcctcctgcctcagcttcccaagtagctgggactacaggcccatgccaccacacctggctaattttttatttttttcagagacggggtttcgccatgttgcccaggctggtcttgagttcctggactcaagcgatcctcccacgtcagcctcccaaagtgctgggattacaggtatgagccatcrtgcctggcccatacatattgtcgattgctttgcaaattgctctaagctgaagttatagctggtggaakgtagttttgccaaattactctttccgagtcattgaggcagagctggcaggttctgtgctgatacctcccgggtgtgtcrtcttgcccagctcctcccttgctctggcgatgtggggcatctccacccggatgtcctggtgacatttcacatgtggcaggtccaggcatgaattctcagcttctgccccagcctgcctccttccctccctgagactgtcccttgtcagtacctggcttcactgagtgggtggctcaagacaggagcccgagggcccatttcaccagcaagtgcagctcaaggtgcctctgcagactgtcttgtgtgggtcattgtccacactgtcactgtccctgtcactgacagagtgggccaggcccatgcaccttcctggaagacagcctcagcttcttaactggtcctgcttccccatccccatccatactccatacagcagccagagtggtctttagaaaagaaacagtggcaggttcccctttctctgggcccttggatgcttctccattgctagcacaaaaccctgccacctcccaccggctgcctctgccttcctctccaaactaggccccctgtccttgaacccagacaccctgtcgaccccagccacctgygcttgacccyagacaccctacccttgaccccagctaccctgcctttgaccccagacacctgcttttgacccgacaccctgcccttgaccccgctggcctgctcttgaccttagctgtcccgccactgacccccccccaacagcctgtccttgacccccagccaccctgcccttgaccccagccacctgcccttgaccccagacacctgcccttgacccccagcctcctgcccttgaccccagcttcctgcccttgaccccatcctcctgcccttcctgcctccagctcttgcctgctcttcccatggttgctccttctcctggcttccctgtctcctgagaggtcccctcggcttctccccttcctgcaccagagcactgctcctgcgttgcttgttagcccggtctaagctgtgggagggcagagggaccttttctgctggtgtgcagctcttctcctcggctggcacgttggaggcagtcaacaaatatttgtaatatggacagatgtctgaagtcgggtgcctttctagggcctgccagcggatggttctgtgttttggctggtggaggactgagtcaggctgatttctgtaacaggggatctttgaaactgtgatagccactgattttgatctcaccttcagagggcatcagtgggcgaaaacaggaaaatcatcctgtggtgagaacacgcacacacacccacacacacacaccacacacacacacacagacacacacacccccacacaaccacacatcaccacacacccacacacacacaccacacacacacaaccacacacacgcacccacacacacccacccccacacaaccacacatcaccacacacccacacacacacccaccccccacacataccacacacacacccacgcacccccccacaccacacacacaccatacacaccacacacactcaccccacacacacaaccacacacaccacacacacacccacacacaccacacacacatatacacatgtacaccacacacacacaccacacacgcacacaccacacacatacaccacacacaccacacacacataccacacacacgtatacacacacacaccacacacacacacacgagtttttggatttttattatggtccttgaaagttttttcctcttagcttctcttttatccatttagtactttgtggcaggcagcttgggaggaggtggaggaggcaccgtgagaagggcaggagccaccaccccggggggtccaggaggggatgggggtgggctgtgttgtgctgagcggctgtgccaaggagcctgaaggaaggcggccggagccaggatgaagggtacaggaagaatgtagcagatccggaagcagttttctgcagccggccaggggatgctctccccaggggctgtgcttgggtctggactgcagcgccccgggatccgtttagcccgtgggsscgccaaggcacgttccgtttcagccgctgcctccaaggaagaaggcccgctccgtctgtggacacccattcttgaggtgtctgcgcatatgactcatggagtcttcgtgggtctctccgaaaccctagaacagtttctcgaaagagcagccacacagacaccagaggcagaggcatttgggattgatctgcgctcgaagttcagrgtctagggctgtcgtgggctccttcgtggactcctgcgtggacactctgggcctcttctaatgccagcctccaagggcctggctgcaagattgagatttgtctgtgctgtgcgagttgctgaagcgccgtgggctttacgtcagtaggtgtggcctggatgctggcttggaggcgtggttccgggggacgtccagggccagggttggggtaccacgggcctggatgctggcttggaggcgtggttcccgggaatgtccagggccagggttggggtaccacgggcctggatgctggcttggaggcatggttccgggggacgtccagggccagggttggggtaccacgggcctggatgctggcttggaggcgtggttctgggggacgtccagggccagagttgrggtaccacgggcctggatgctggcttggaggcgtggttccagggaatgtccagggccagggttggggtaccacgggcctgactcctgatgatcatctyggggctctaagcagaggtggcgactgtctttgtagcggtggacaggcaagggggtgccagctgtggtgatggaattggtctgttgatgaaaagtattaaatctgttaagtggcgaggaagaacttaagttcagaaggaatggcacttctgtatgagggttttttagtgtctggtcacacgttccactgtgttacattttctccttctccttccaggtactctctgaagatggcagaagctcaccaagctgtggcctttcagttcacggtcactccggacgggattgacctgcggctgagccatgaagctcttagacaaatctatctctctggacttcattcctggaaaaagaagttcatcagattcaaggttttctgagatttgttgaaatctacacagtatgccttttaatatctaagaacggggctctggctgctattgaggtctacgtgtttcrgactggcgactgcatatcacttacctgtttccatggtacttaaggcttggggacaccgtcacatagactttagctcactggatgcttggagcagttccattaggcaggtggagggacttggcatgcgttaaagcaggctgggaaatcgaggcttaaagggccagcgacctacttaataggaggcrgagtaaagactagaattcacatcttctgctctgagtcagaatcctttacaccttgttcaaataggatttttccaggccaggtgcagtggctcacacctataatccctgcactttgggaagctgaggtgggcggattgcttgagctcaggagtttaagaccagcctgggtgacacgacaaaaccccatctctacaaaaaatagaaaaattaggcaggtatgttggcatgcacctgtagtcccagctactcaggaggctgaggtgggaggatcacttgaacctgggaggcagagactgcagtgagccatgattgagccaccacactccagcctgggcaacagagcgagactttgtctcaaaaaaacaaaaaaatattttttccaaacttcagcaagtggatgtaataactactttgtttataaaacattcacacattagaaactctctgcataaggtccgggtgcagtggctcacacctgtaatcccagcactttgggaggccgaggcgggtgratcacgaggtcaggagatcgagaccatcctggctaacatggtgaaacccccgtctctactaaaaaatacaaaaaattagccgggcgtggtggcgggcgcctgyagtcccagctactcgggaggctgaggcaggagaatggcacgaacccgggaggcggagcttgcagtgagccgagatcgcgccactgcactccagcctgggtgagagagcgagactctgtctcaaaamaaacaaacaaaaaaaaagaaactctccacaagttcaaatacagttgagtccacatgttctcaattctgtttatctaaagaagtagaactttgttcttttttaagtaagtgtcttgtttttccatgtattttaatttattttaaacatcatagaaggaacaagtgcatgtttgaaaacatgcaaactaggtgaaagttcatcaagtcaaaagtggaaatccccccccgctgacccccctgccagccccagcggtaactcagttcagtttgtgcacttcccggtgctccttctccgagggcggcactgaagtgggccactgagaaaggcctaagctcaagagcaggtggcagcagggacagcatggcgggcaagcccctgggagccagtacagctgcacgggtgtccctggggctcagcctgtgggttcttgggcccagataaataacccaccaaggtgacatccgagatttcactgaggcactagctcggctcgccgagagctgctctttttcaccttggaatctgggaaaatagaaacttggatgcagaggcttggccatcatattcaacccagtgggaatgttgttctccctctcccctcccctcccctctttttttttttttgagacagggtcttgctctgttgctcagggtggagtgcagtggtgcgatcacggctcactgtagcctcactgggctcaggcaatcctcctgtctcatccacccaagtagttgggaccataggtgcacaccacaatgcccggctaattttttttttttttttttttttggacagagcctcactctgttgcccaggttggagtgcaatggcacaaccttggctcactgcaacctccgcctcctgggctcagtgattcttctgcttcagcctcctgagtagctgggactataggcgcccaccaccacacctggctaattttttgtatttttagtagaaacaggatttcaccatgttggtcaggctggtttcaaactccttacctcaagtgatcggcctgcctcagcctcccaaagtgctggggttacaggtgtgagccaccgcacctggcctgctttggtcatttttaatccattatcttggtgaaatcaatatcttattaggatggtttaggaagaattttttttaattggagttgtcaaacatacacaagagtgaagaggactgattaaagatccccaccattcccttccttgtttcaacaattttgccaattttgtttgatataatcctttttttttttkggctggagtattttacagcaaattctcgacatggggtgaggtctcccatgaaatcttcagggttaagcagcccttctgacacaggggcggcaagaggagcagttttggaaccggggtctcggggcattctagacagtagcaggctggggacaggacgtcatggtggctcagtgacgtccttcaccagctaaactagtgcctgggctgattatcatggcccggggcgtcgactcttggggaagctttcagggtgggttttggctcggaagtagtggaagggaggaaactggaatcactgcaggctgtaaactctggggagagtcccagctagtggggtgtggtttctcagtgcacgcacgctgtccacaccctcttctcactgcctgctgtcccagcagccctgctgccaggggccatgaagcgtcattgccctgtgggttgtgggaggacaccgctcacggcccgggtgtctgtctttagaacggcatcatcactggcgtgtacccggcaagcccctccagttggcttatcgtggtggtgggcgtgatgacaacgatgtacgccaagatcgacccctcrttaggaataattgcaaaaatcaatcggactctggaaacggcgtaagtaatcctgtgaaatctccaattgtctgggaagttaccgattttattgctgtttttatgtctcttcaaatgtgatgattgtcactgtyctggattccatatgaagctcctgatgctgttctcacgtcagctttcttcctgtctcctgggtgctgttaaggtccccctaggagtttgcggtcccctgcggcctttcctctgtagaccagggtgagaagagtggtagtggccctggggcaccccttggaaggtgtcagggcccragggtttggtcaataatgacagtgcccttagcctggccaatagsgctctgaaatggaatttctgctcaaagggctgattccccatgtagtcatttctttgcacttggagtctgttcattccagagttctgtgacccttgaactgactgctgtggggtcctctgcagggacctcacccacttaactctgtcagaatggtttagaaatctccagggacccccccgtccctcctacctctagggttttggattttcctggggcttatttcttgctaccaagagataagcccagagacaccttaggtaacattcagcacatgttcattttattttttttttctaaccacctgccgcctgttgatagcacatgtttattgcacacctgtgatgtctgttattccatccagttctggagatggcccagactcccatctaggaaggtcagagcctgcactgcagtgacctctcattagggtcccttttaccagtgagaaagcattcagacaggtgcaggtgtctgcccaagtcacaggaagagggagcggggaagctagagttcaaacccagctctgcgcagctctgaaatctgtgctttcttcagtgtagcactgaggtccccccaccccctgccccagaagcttctgtgagacaaatgcgagtgaacaccgctgctttaccaccatttgaacgtccagacagtggaacgcagggcractcagcttcctcgtgcagccgtgacccttgggcttggacacacattttactttcgggtctgaaagctccacagtgtctcggaagtgtccctgctgccccgtgccagacgtttgattcgatttctgtgctgcttgtttacaccaatggcatttttgccatttggacacggtggttcacacctgtaatcccaggactttgggagaccgaggtgggtcgatcacctgaggtcaataatagccaccaactcctcataattgggctttgttttggggccaggaattgcaggtggaaggcacaatgccgggtctgggctaagctaaaaaacgaagctctggatctttatagtcacgccttccaggttgtttgcatataaatattgtttaatcagaaagaaataagaaaataaaccggcagaaaaagagacgtaaacgaaaactcactcacagttaacggctgaatttgatttttttttggaaatggagtttttgctccgttgcccaggctggagtgcgatggtgcgatctcggctcactgcaacctccgcctcccgggttcaagcaattctcctgcctcagcctccygagtagctgggattacaggtgtccgccaccatgcctggctaatttttgtatgttttgtagagatgaggtttcaccatgttggccaggctgatctcgaactattgacctcaggtggtccactcgcctcggcctcccaaagtcctgggattacaggtgtgagccaccatgcccagccttgattctgatgactagaaataaaagattaagcagattaatggtctgagtctcctgatgacagcttgagcaagtgccctgattcctgaacctctttttgcgaagggtctgcagaggacccctccacatcctgttccttctccaggaagcccctggaccctccagagtcatcgagcgtccagctgagttgcttgcaaccttgaggtagctcaggaacgctggctcaggcctctataagagtctgcaagaaacataataaaagttcccagtcattttagcagaagcatgcctggctgggacgcctgccaggttccttgtctgcctgggtactgctgtcattgctgtcactcagaaagcagctggcagacctgggtgctcagggcaggcctggctgctctcttccttgaggtcccaggacccacaggcctgcggtgggtagctgcctccgagccttgtgtctggagctgttcctacgtacttttcattctctcatggggctaatgaatatcttcttttttttctttttgagatagagtctcactctgtcacccaggctggagtgcagtggtgcgatctcggcacactgcaagctccgcttcccaggttcaagtgattctcctgcctcagcctcttgagtacctgggactgcaggcacatgccaccatgcccaaccaatttttgtatttttgatagagatggggtttcgccgtgttggccaggctggtcttgaactcctgacctcaagtgatccacccgccttgtcctcccaaagtgctgggattacaggcgtgagccactgcacccaggccagttctttaatttactctctagtgtaggcgctctcttaaaactggattatatatagaagtgttgactgtttaaagcccttaataatctgggtctttgtaagatttgtttctttgtacctcttaaacctattttggtaaactgggccatccctggcctaaatttagaaaggccgggttaagggccaacgtcttccagcctcatgggccatttcctgtcctggaggggatctgcagtatctctgggctgctgccttcaaaagtggagtcaggctgggtgcggtggcctgtaattccagcactttgggaggccgaggcaggaggattgcttgagcccaggagttcaagatcagcctgagcaacatagtgagaccctatctcttaaaaaaaagaaagaataaaaaagtggagtcayccgtgtcatgtgaggtttgtctctgagtttgtccccgacagccttgtaaggagcatgtcctttcaaagaaagctttttgctaacgttttttatctgagtgcctctatgtctatacttttaaaaatcttgaatgtgtcatttatttgtttatgctaaaatatttttatttttgcaaatcaagtaagtatataggtctttttctttcagtaatctaaaatgtagattatctaaaagatagcttcttaaatccctaaacccaartttgtttataggttagatgaccagaaaagagtgtataggtttaaagaagagactacagtgaaactccagtgctagatttcacgggttatagaaagatatacattttggagcaaagagtatataaccttgaagataatttgtttttgtccacttaaatattatgcagtgttaaattagtggttttctttttttatttcttattttgaagaaatatttattattttttatttttattattttttatttcttattttattttcttttttaaattttatttttgtattgatggggttttgccatgttgtccaggctggtctcgaactcctggacccaagtgatccacccatctcagcctcccaaagtgctgggattatagacttgagccactgcacctggccaaattagtgcttttcaaatattagggacacctttaggttatatatattggtgttttaatcatttgaagcatgcttaaatagttttcatttaaaaaatattttgcagttcccaaaacaaccaaaactaaaacaaaccacaaaatagctgcatttctggccaggcacagtggcacacacctataatcccagcactttgggaggccgaggcgggtggatcacctgacaggagtttgaaaccagcctgggcaacatggcaagaccccatctctacaaaaaatacaaaaattagttggatgtggtggtgcgcacctgtaatcccagctactcaggaggctgagatgggagaatcatttaaacctgggaggcggaggttgcagtgaaccaaggtcacaccattgcactccagcctgggcagcagagcgagactcttgtctcgaaaaaaaaaaaaaagctgaatttcatctcatttttaaagtcccatctttaccataatatatactaccttccttcacaaacaaaaacatttcctgtatttaagttgaatatttacatgaccgttttacacagtccgtttctttatttgtgttaaatacacctaagtcaaaaacaagctcttttgatataaatactggaggtaacagttgtaacaaataatttgagattacgattacatctaaaagtaagtttgagagaaaaaaattcatcaagagctgaagaaagtggcccagaatctcctgcgcacctgccggggacgcacaggtcggcagggcatggctctcacggtggccaggtcctggcctcacagcatcccctctgccgttggtcctgaggtcctggaggaagctgtatctttttccagaagacacaaattagccctggttggtttcgaggccacccgagcagatcgggctgaagggacctctgggaagagagcaaacaggcccgcccygggcgcctgggtctgccagctactttcggcgtgattggttttggggtgaggaggagagtgcccgtgagtgttttaagagctcagttcctgcaagtgctctccctctgactttcccggctgtacctggggcaggctgctggrccctgcagcacgtggtgtctgtggygtcaccggtggtgttggtggcaccgtgtggcctcacgcacagcctcccttgtctgggtctgtctccacagcaactgcatgtccagcyagaygaagaacgtggtcagcggcgtgctgtttggcacyggcctgtgggtggccctcatcgtcaccatgygctactccctgaaagtgctgctctcctaccacgggtggatgttcactgagcacggcaagatgagtcgtgccaccaagatctggatggtaattgcgtgtccctctggctgtggagggggtggacagtttgggctttgggaagaaggacacccctgcggaaggacacccctgcgaccttttctccctctatgcttggttggtgacttgggcctcaaccttgaatggctggagaggtttgagtcaccatgacacaaaagcaggggccaaagagtgcttctcttttgtgacattagtgagacctgcagcattttatattgaggtctgctcggtttgtagttcaggtcattcatcaaataaaagtgctgtccatccggttctttgtagtgttcttgactcacttgttgtcaggcattaaatggttaccttagctgacccctcagacaggctcccgtgactcagacttagcttctggaatgttcctccagcttgctttggccctcagcccaagggtcccttatttaaggtaatggctttgccatatatgtggatgcttgtccaaatttcatgatttaaatgtttttcttttttatttatatttatattttttcattttagttttttttgagatggagtttcactcttgttgcccagactggagtgcagtggtgtgatctcagctcactgcaaactctgcccttccaggttcaagcaattcttttgcctcagcctcccaagtttctgggattacaggcatgcaccaccatgcctggctagttttgtatttttagtagagacggggttttaccatgttggtcaggctggtcttgaactcctgacatcaggtgatcctgccttggcctctcaaagtgctgggattacaggtgtgaaccactgtacccagcttttttttttttttttttctttttgagacagggtcttgttccattgcccaggctggagtatagtggcaccatcacgkctcactgcagcctcgacttcctaggctcaagtgattttcccacctgagcatcctgagtagctggaactataggtgtacaccaccatggctgactaatttttatatttttaatagagacggggttttgttggccaggctggtctcaaacttttgagctcaagtgatcggcccaccttgacctcccaaagtgttgggattacaggcatgagccatcacacccggtctcaatttaaatgtttttatgggggctgggcatggctactcatggctgtaatcccagcactttgggaggccaagcccagtgaaccacctgagctcaggagtttgagaccagcctggggaacatggcaaaaacacgtctctactaaaaatacaaaaattagccaggcaaattagccaggcgtggtggtgcatgcctgtaatcctagctacttgagaggctgaggtgggaggaatgcttgagcccaggaggtcaaggctgcagtgagctgtggttgtgtcactgcactcctaggggacagagccagaccctgtctcaaaaaaaaaaaaaaaaaaatttatgggcttagtttttctgaaaatcaaccctccaagatgggcatcgtctctggactttcgaggcctccgtctggggggctggggcccctgtgaccccctgcaggcgggtgtgtgccccgtgtaccatctgcccattgtagtcatggccctgggccttgggctttgctcggcacctcaagcccaacctgggtttctggggccagatgtgtgtaaagaaacatctgctttattcacccctgtcttgccaagtggcctaaatggttgtaatggaccaggtcatcatggaaacattttctgcagaatctttctcgaatggggctgatccgtgggtctgccggtgtatacgaagccgtgggtctgctttggtttcttgtctgccccgaccttggccccggtgcccttctgcttggtcgcctcgggatggcccccacagtggtgcctgcctggactgggctgctgtcccaacctctgggggagcctgcttgtgagagaagcatgggagtcactgcagtgcccaccacacaccgggactccactctttgccmaacaaawttttttttttttttgagacagcatcttgctctgtcacccaggctggagtgcagtggtgcaatctcggctcattacaacctccgcctcccgggctcaagcgattctctcacctcagcctccacagtagctgggaccacaggcacacaccaccacgcccagctaattttttgtatttttaatagagacagggtttcgccatgttggccaggtggtctcgagctcctgggctcaaacgatccaccctcctcggcctcccaaagtgctgggatcaacaggcgtgagccaccacacccagccaaaccaattttttctctcaaatcaattttctaccatttggatataaaatttctgatttctagagaagcagaatttaacacctagaagagactcaggggtggctcccacacttggcaaagcaggctaaagggcactccctccagtgggttcacagctgaggttcagctgagtcccaatgccctgcagtaccaagactccccgcctgggcccaaggactgcctttgttttggttgccattgaggtgactggttattatacaggcttgatcatccagcctaaaaccaagggccacagatgtgtcctytgggagacttggcaatgactgaaggaaagamactgcttcccctcggcttggctcagggccaggcacgttgaccctcctcactgttcctagagcctggagcccatcccgaaactaagggccttgcggaaggaggtggggtgagactcaccctaggtgcagaagcacggtcagggtcctggccagtcacgacgctggcagcgacatctcacggcctctgtcaggcttggctttgattctacctggttttttggtttgtttgtttttgttttgctttttgacatagggtctcactatgttgcccaggctggagtgcagtggtatgatcatggctcactgcagcatcaccctcccaggctcaatcaatcctttcacctcagcctcccaagtagctgagacaacaggcacatgccaccatgcctggctaattttttgtagaggtggggttttgccatgttgcccaggcttttattggcatggagggcagggttatatgcttatttgctagaacctgtaagtatggggcgggtaaaagatggaccasatgaaaaataaatygacacagaaaatcagtaagtggttggcacattgtgcgcacgggaaragtggcttcggatctttaacatagccttgtctttgaaatggtcattctcccatccaagtactaaccaggactgaccctgcttagcttcacgagatcagacgagaacaggtgccttcagagtagtatggcagtagtctgaaaatataattctctctcttcagggtatggtcaagatcttttcaggccgaaaacccatgttgtacagcttccagacatcgctgcctcgcctgccggtcccggctgtcaaagacactgtgaacagggtaggtgtggcttaggcctcacactgaaatgccagccatctgtggattaaggcttaggtcttaattatgatgaactaggtcaccgccatttggctcaagtagccttcagcggtgtgcctggtagggttctcataggaactcttttttttttttttctccaatgcatcactgctgcatcttaggtgttttttaaaaagtgtcaggtttcatagagaaactgcttgtgaattttttaaagctttattttattttattttattttattttattttattttattttattttttgtgatggactctccctctgtcacccaggctagaatgcagtggtgcaatctcagctcactgcaacctccgcctcccaggttcaagtgattctcctgccccagcctcccgagtagctgggattacaggcacctgccaccacgcccggctaatttttgtatttttagtagagacagggtttcaccatgttggccaggctggtctcgaactcctgacctcaagtgatccacccgcctcagcctcccaaagttctgggattacaggcatgagccactgcaccaggccagtttttgctactttacataattactaaatacaacattgtattaaatgattgcagtcaytccccattcttccctccccccacctagtaacttctcttctactttctgcctctggatttgccaatctgagggacctcatataagtggcatcatatcatatttgtccttttgtgactggcttctttcactcagcaaaatgtcttcaaagttcatacacatagcagcctgtgtcagaatttccctccttcttatggctgaatagtattccattgcatggctagaccatattttatttatccgttcatctgttgctgggtggcgaatgtttttgatctgattggtgagggtcaccagctgagggtggggtgatagtcagcttctagccggtctgaggacagggtgcttcttgacacagcagccgcacttcaaagccaggcccccaggggcaaggcactacctagaaagcctgtcatttcatcctcaaagctactcatttctttttcattttcttttttttttttttttttttttttgagacagggtctcaccctgttgttcaggctagagtgcagtggcgcgatcttggctcaccacagcctcaacttcctgggctcaaatgatcctcccacttcagcctcctgagtagctgggactacaggtgcatgccactacatatggcaatatttttttttttttgagacagaatctcgctctgtcacccaggctggagtgcagtggcgtgatcttggctcactgcaagctccacctcctgggttcacaccattctcctgcctcagcctcctgagtagctaagactacaggcccctgccaccacgcctggctaatattttttttttgtatttttagtggagacggggtttcactgtagccaggatggtctccatcgcctgacctcgtgatctgcctgcctcggcctccgaaagtactgggattacaggtgtgagccaccacgcctggccctattttttttttttttccagagacggagtttcactgtcttgtccaggctcgtgttgaacccctgagctcaagtgatctacctgcttcggtctttttttttctttaattgaacaaaaggagagggagcagctccatttctttgtttttaaaaaaattatggtaaaatrtacacaacatgaattgtactgttaaccattttcaagtgtacagttcaggggcactaagtacatttataatgttgcgcagccctcactgctgtctcgttccaggacmtttcatcccccaaaagctcatagccactaagcagtcactccccatccttctacctccctctcccagcccctcagaaccactaatctcctgtctgtctgtatggatttgcctcttctggacatttcgcataaatggaatcacgtggccttttgtgactagcatgtctttagagttcacccgtgttgtaggatggatgaacttcatccctttttgtggctgaatagtgttccattgtatggaaggaccacagtttatccacctgttcatccgctgttggggacgtatccaggagtggaattgctggctcatgggaattccgtggtaactcattgaggaaccatgagactctcacgcagctgcaccattttgcattctaaccagcagtgcatgggtgctttagtttttccacatcctgggactccaattttaaaactataataataagcaaaaacttctcgggttaagggtttgaatccagscttggttaytgagtccctgttggccttggtaaggtcttcccatctctgctcttttttttttttttcagacagagtcttgctctgtcacccaggctagggtgcagtggcatgatctcagctcactgcagcctctatctcccaagttcaaacaattatcttgcctcagcctcctgagtagctgggattacagatgtgcaccaccacacccggctaatttttgtatttttagtagagacaggattttactatgttggccaggctggtctcgagctcctgacctcaagtgatctgcccaccttggcctcccaaagtactgggattacaggcacaagctaccatacctggcccaccccatctctcctcttctgtgcccacgcttgcaaatcagggctgatgacggcccctgttccactggcaggatggggtgagcaagagatgcttgaccttcagtgacctctgtctgtgttgcgtagctcrgggttccacttcagctcattcagggcatgattttctgtctcattcacgggcattttactttgaataagcctcaagatgcttgacacctgccccctcccccttttttttggagacagagtctcactctcttgcccaggctggaatgcagtggcaccgtcctagctcactgcaaccttgaattcctgggcccgagtgatcctcctgccttagcctcccaagtagttggggccacaggtgtgcaccactatgcctgcaaatactttcttgtagagacagggtcttgccatgttgcccaggctggtcttgaactcctgggctcaagcagtcctcctgattcagcctcccaaagtgctggggttacaggcataagccaccgtgcccagctacagctggcccttttaagggagtggggtcttacttttcaatgtacagggagggactatagagagattactgttgcaccaagctttgttttttacagcagacaaacaacttgtcggattaaaatatgtcatgacaaattgtggggttagcaacagttttactttttgttgctgggggaaacagcatctcacccaggctggaatgcagtggtgtgatcatggctcactgcagctttgaactcctgggcccaagtgatcctcacacctcaaccttccaagtagctgggatcacaggcacatgccaccgcacccagctaatttttgtattttttttttttttttttgcagagatggggggtctcactctgttgcccagggtggtcttgaactggtcaagattgcttgggctcaagcactcttcatacctcagcctctcaaagtgctgggattacaggtgtgagctaccacacctgaccastgttactttctgtaagagcttgcttaggtgtgtagcagaagcttttgagtgtctttttaaacaattgctctctgtgtttccacctctgagcatttgttcaaccaaagtagcacatgtaaaaggacgaggcggggtgggggctggaaaccctgaacctggggcactggccttagcctggttccgtgacctattccagcccctcgttcccatcctgctgcctgagcacctgcccagccccagcacccagctctcagcatgactctgccccatctcatggtcaccatcgcaggtcatcaaaacttacttaggtcagaacagatcttttattaagggccaaataatagataagagacattcttgaaatttccttgttaacttttcttgtcaactctagaatttattttaaattctaaaaatttaatggtgattttctggtgatgcaggatttgggacacttttaaagctaataaaggaagaaaaagtttaattgttaaattatcattaccctatgacaccatttagcattgaagggagtttacctgtctaaggactgccaagaccaacttgggggaagagtctaaactttttcttttttttttttgagatagggtctcactctgttgcccaggctgggktgcagtggcatgatcatggctcactgcagccgcaaccttctgggctcaagcgatcctcccaacctcagccccccaggtagctgggaccacagacatgcaccaccatgtccagctaatttttgtcttgtttttttttgtagagatggggtttcaccatgttgtttaggctggtcttgaactcctgagctcaagcaatccactggccttgacctcccaaagtgctgggattacaagcatgagccaccatgcccagcctaaaaccttttcaatgtgttagaacttttcctaaggcacaagtgaggcaaacataggctttgattaatatgttttaacttgggtgatttttttttyccccaataatcccagtatctacagtcggtgaggcctcttatgaaggaagaagacttcaaacggatgacagcacttgctcaagattttgctgtcggtcttggaccaagattacagtggtatttgaagttaaaatcctggtgggctacaaattacgtaagtctgtatacacagtttttcttgatgaaatagcgtccgtatgaagacgctaattttgaggggcagggataacagggctgaaatgacagtttggattagccaaaatcacaccctaggaagttccagctatagttttacctctgtgcagagtggagtgtgtgtgtgttaggactgacgtgtagttacagtgacagtttcttggtttttggatttttttgtagagacagagtctcactatgttgaccaggctggtctcaaactcctgggctcaagtgatcctcccacctcggcctcccaaagtgctgggatcataggcatgagccaccacacccagcctacagtgacagttttaccctgagtgcaggtacaccagcacgatgctgtgttttgcacgcaggaggcttctccctctccctcttccccggagagtcctccygtgagctgtttctcctgcagcagtgccatgctgccccagagacctgctcccatcctcctctttggtttatcttgattccaagggcatccttcccgagctcgctggtggatgcagggatggtgtgggatagggcggtgctgatcgcccctccctggggttgagtgtggctcggtggtcccaggagcatctcctccaacgaagcgtcttagctggcaccctgtgtgcggggagctggctgggcttccacgtactgggagggcaagagcaggcctccggcagacaaagcaagggagggagtctagctttgaggaacaactaacacggaagagaaggtgtccaaagcraccctgacagaaccagcaggtggcgctagacgtggcatggtgggtggatgggcagtgcctggaggggtctctctagcctcagggggccgggcatattcgctggctgcaccggtgtgctggactggtaaacgtcagctctctgcacagstctccgcacacgaggcccttgcatgggcactgttctgtaggtacgtgtgtttcagcacaaagctgaaaggaagcgatccctgggtccagcaggctgtgaagggacagcagctgtgaggtggttggggggcactgcctctgggtggcctcaggacacatgtgccagggaatagagacaacacctgcggaacaccaggttagtgccacggactgggacggtggcttcttcaggcagacctgggaagcagtctgtggagcaattttgcataacattggtttyttctttgttttcttttattttctttagtttctgagacaaagtctcgctcgtcacccaggctggagtgcagtggagcgatctcggctcactgcaagctcygcctcccaggttcaagcaattctcctgcctcagcctcctgagtagctgggattacaggcgcccgccaccacacccggctaatttttgcatttttagtacagacggggtttcatcatgttggccaggcaggtccggaactcctaacctcaagtgatcagcccgcctcagtctcccaaagtgctgggatgacaggcgtgagccaccgctcctggcctttgtttctgttttcttttatttgagaaagggtcttgctctgttgcccaggtgggaatgcagtggcacgatcatagctcactgttgcctggaacccctgggctcaagtaaccctcctgtcttagcctcccaagtagctgagactacaggcgtgagccaccacacctggctaatttcttaaaattttttggagagatggaaccttgctatgttgcccaggctggcttcaaactcctggcatcaagcgatcttcctgtctcaacctcccaaagtgctgagattacaggtgtgagccaccatggccagcccatagttttggtttttaaaacatgttagcagtcagacatttatgatttactttccatttggtctcttaaacatttttaaatttttattttatttattatttttatttttaatgtagggctagagccttgctrtgttgcctagcctggtctcgaactcctggtctcaagcaatcctcccacttcggctttttatttcccttttgaaccatctacaaaatgaaggtgatgtaccttctttctgcctgtctcaacttaaaaagaacacttttcatttcccacggtgtcgcattccatctagttaggactgcgttccctgttctggaatggcccctgttagacgccgaaatgtctgccaaaagcactgcctgcccttccccgcggctctgggctgctgccagggagcctgcctggcccctgctgagcctgcgggtttgtctggtgtttgcgcccactaggtgagcgactggtgggaggagtacatctacctccgaggacgagggccgctcatggtgaacagcaactattatgccatggtgagtccacccgcccgggctgctgtctgacgaggacggtggggcggcgggtctgtccacagaggtggcgtcttcacaggcctgtggacggcctgggaaaactctggggattggctcatgctcctctctgtcctgcttccaggccggagaaccctatgagtacccttcagtgttagcctagtagcccagggtgctctgctactgcagggggatttgggttgcaaaaataagtttctggcaaacaggaattcctcactgtgctgtacctgtcctgctgtttttttgttttgttttgttttgagatggagctttgctcttgtcccccaggctggagtgcaatggcacgatctcggctcactgcagcctccgcctcccaggttcaagtgattctcctgcctcagcctccaaagtagctgggattacaggtgcccaccaccacgcccagctaatttttgtattttagtagagacggggtttgaccatgttatccaggctggtctcgaactcctgacctcaggtgatccacttgcctcagcctccctaagtgctgggattacaggtgtgagccaccgtgcccggcctgtcctgctgtttttatggcttagcactggaacttggtgccacagcggccttaagatccctgcagaacccctagagctcagggacagtgggttggccaagatcctgccaccagtgcgctgcgcttcaccctactgttttctgagacgccagaggggtgtgcatcgacggtagtttctggtttcctgggctttgtctttcaaagcatggatggttagaaggcctctcagtttgkgttcttgaccactgctttaataactggcaaatagaactcttctctttccttttccttccattccttcacttccttttatttttttccctcgtttattttttaatcatttactttttcttttctttttttttttgagatagagtcttgctctgtcgctgaggctggagtgcactggtgcaattcatctcactgcagcctctgcctcctgggttccagcaattctcctgcctcagcctcccgagtagctgggattacaggcacctgccacaacgcccggctaatttttgtatttttagtagaaacggggtttcaccatgttggccaggctagtctcaaactcctgacttcaggtgatccgtgcgcctcggtctcccaaagtgctggattacagacatgagcacctggcctatcatttgctttttctttctgtttttcttcgtttcaaaattgtcctttctttttctcttaactttttttttcccatctgaaataatctcaaactgaaagaaaaaccgttagtgtagtccatagaacttcttttcctgctctatttggaagtgagctatttatctgatgcccttcccgccaggagacctttgtttatttcccacaaacagaggcactttctacatcaatggggacatggtgtgtacatagactcttccaaaatgtaggttagacctgtgttccttggccttttcttccaattgtggaaaatgcagacatttggaacagggtctcaaaatttagaaagctgcaggcacagctctatataaacaactattttaacctttcattgtgtctcatccagaaaacttcctgattgtctaattgctccccgrctaatttttgctttcctttctctgtgttacgtgagggtatttggtgcaaatagttatctttaatagcgcagaagttttagaggacttatgttctcataaaacatttacaaagtcaaagtggagaaaatcaaattaccatttattttgtagcattgcagatgtaaccgaatatgtatgtatattgatgcatctctagaaatattgtgacagtgtgcaggatgtgctgtgattatttaaatttgcttatctttccctrtgcaaattctctccacctttgtcgcttttcaggatctgctgtatatccttccaactcacattcaggcagcaagagccggcaacrccatccatgccatcctgctttacaggcgcaaactggaccgggaggaaatcaaaccagtaggcaaacaaattgctttaaaaaaattattttcaaacagctttacagaggtataattgacatattgcacatgtttaaaatatacagtttgtggccrggcacagggtctcacgcctgtaatcttggcactttgggaggccaaagcaggcggatcatctgaggttagcagttcaagaccagcctggccaacatagtgaaaccctgtctctactaaaaatagaaaaattagctgggcgtgctggcacgcgcctgtaatcccagctactcgggaggccgatgcaggagaatcacttgaacccaggaggtggaggttgcagcgagccaagataacaccattgcactctagcctgggttataagagcaaaactccatctcaaaaaaaaaaattaaaaaataaagtgtagagtttgctaacttctgatgtgtatatattgatgcatctgagaaaccatcatcactgcagtcaggatggtgaatacatcagtcaacccgaaaacccctctgccctttgtcrtctctccctcccacctggtcctggaccccctggtctactatctgtcactctagattagtttgcaatttttaaagctttgtgtaagtggaatcataacagtatgcactctttttttcggaattctagtttctttcacccagcctaattattctgagatgtaattctccttgtgtctcctaaatgaatatacatctgttgtactttaattctgtaatctgccctttggagaagcccttgatgtttttgaactaatactagctgcttagttgctcataagaaacaagacttttcttcctggaatatttctttggttgtaagtgtcagttatcaataatcaattagaatgtgttatttaggatttaactgtgcaggaagttgcaccctggcatggtttaatgagtcccccaacgaatcattccagkgagccactggaaaagaggaagtcaaacgaagcaattcgcacagaaaacacattcagcatttccatgtggtcttaacttgcttgctgcttgctgcttttgttttctttttttttttttttttgagacagagtctcgctctgttgccgaggctggagtgtagtggcacgatctcagctcactgcaggctctgcctcccgggttcatgccattctcctgcctcaacctcccaagtagctgggactacaggcacccgacaccatgcccggctaatttttttgtatttttagtagagacggggtttcactgtgttagccaggatggtctccatctactgacctcgtgatccgcccgcctcagcctcccaaagtgttgggattacaggcgtgagccaccgcacccggccaacttgctgcttttcttctgtgggattttcgttgttggtttgaaatatatttttgttacagattcgtcttttgggatccacgattccactctgctccgctcagtgggagcggatgtttaatacttcccggatcccaggagaggagacaggtgagtcaagcttcttcagggccccctggagaatcggcactttccatccctatgctcagaattaggaagtgtcaaaggggccaaattgatttttgctgacccttcctgagattgtaggctggtgaacattccttctgctgaatttcctttgtctgtcttaggcctggacactgttgttgacttatttccagattttaatttctctttggttgaagactgccaactgtctcatagagtgtttgatttatttatttatttattttgacatgaggtctctctctgccacccaggctggagtgcagtgacatgatcacggctcacttcagcctccacctcctgagctcaaggaatcctcccatcttagcctccccagtagctgagaccacaggcacatgcatcatgcctggctaatttttgcattttttatagagatgaggttttgccgtgttgcccaggctgatctcaaactcctggactcaagtgatccgcccgcttcggcctcccgaagtgctgggattacaggcgtgagtcacacacagctgagtgtttttttcctgagtctggattcctcaggggcattttactccggctcacagtcagcgtttgtgatggaacgcacactgggtcgtgctcggaaaggtggatttgtgttccagccactcctttatcagctgcctgacctgggcagggtggccacgtaagccaccgtccaaaccaggacgtccttgagaatgacagggagggagaacaggcaccgtggggaacatccaggccaggcccaggcccaggctgtgctgtccatggcctccatttccccaggtgcctgtggatggggaactacccagagacacttggtgagctagagcccaagaccatcatggcaggcctgtatgacgggcgggcctcggggctgcttgggaagctggctggaaagggccagagctgacctgcaattttatttatttwtttttttttagagggagtctcgctctgttgcccaggctggagtgcagtggcgcgatctcggctcactgcaacctccacctcccgagttcacgccattctcctgcctcagcctcccgagtagctgggactataggtgyctgccaccacgcccggctaattttttatatttttagtagagacggagtttcaccgtgttagccaggatggtctcatctcctgacctcgtgatcgtcccacctcggccttccaaagtgctggaattacagatgtgagccaccatgcctggcctgacctgcagttttgagtgtcttgttgcagcccggtccttccagaccaagccctagtcaatattccagaccaagccctagtcagtagtgtgcactgtggtggtcattggggagcctttgctgtatccttgcacaaaagctggcctctgagtgggctttcctaagcagattctcccctttcctctgatcctgccttcagaggttctctaaaaacccattctggccaggcgcggtggctcacgcctgtaatcccagcattttgggaggccgaagtgggcagatcacctgaggtcaggagttcaagaccagcctactactggtctacaaaaccccatctctactaaaaatacaaaattagccaggtatggtggtgggcacccgtaatcccagctacttgggaggctaaggcagrcgaatcacttgaacatgggaggtggaggttgcagtgaactgagattgtgccactgcactccagcccgggcaacaagagtgaaacttcatctcaaaaaaacaaaaaagaacccactccatgtgtgttcacggatttcacagtgtttctggctaaacccctcctctcttcctgccacacactgtcgtccattgtactgtagctcaacatgtgaaaaacagatgtgttggccaacagcagtcctggggcagttgggcaacgaggtggaggaaagtgaagttggttctctccatcctctcacagtgtctccctgattggaggggcagttgccccttcactgaccagggcaggcagtgtccccaaagggaagtgggtcagggtgtcctggggaggctgtcacctgctgtcagtcagcaccgtggtatggggacatccttaagatcatttaagtttgagacatgcggcctacactgacagtgattccaggaggtaaatatgtatgtgtttaaaaaaataaacaagggaggccaggcacaaaggctcattcctgtaatcccagcactttgggaggccaaggcaggtggatcacctgaggtcaggagttcgacaccagcctggccaacatggtgaaaccccatctctactgaaaatacaaaaattagccaggtgtggtggtgcatacctgtaatcccggctactcaggaggcagaggtaggaggattgcttgaacctgggaggtggaggttgcagtgagccaagatcatgccactgcactccagcttgagtgacagagtgagactccatctcaaaaaaatatgtatatgaaataaaaataaaataaatcaataaacaagggaaatgctgggataaaacctagttacttagtgtacctggacagccattctgagcatgatacctgagtcagtttcttggggctgctggaataaatgaccacaaactggatgtcttaagacaaaagaagtttcttctgccacagctctggaggccagagtccgagatcaaggtgtcagcagggccgtgctcttttcaaaggctctgggggaggcctttatgcctcttccagcttctgggggggtccaggtgctccttggcttgtaggcatatcactctgatctctgcctccatgtcaccttggctctcacctctgtgtgtgtgtgkctctcttacaaggacaacagtcattggatttggggtccaccctagtccagtatgacctcatcttaatattgaattatatcagcaaagaccctatttccaggccagatgtggtggctcatgcctgtaatcccagcacattgggaggctgaggtgggtggatcacctgagcccaggagtttgagagcagcctgggcaacatggcaaaaccccatctctacaaaaaatacaaaaattagtcggacatagtggtgtgtacctgtggtcccagctactcaggaggctgaggagggaggatcacttgagcctgggaggtggagactgtagtgagctgagctgtgatcacaccactgcacttagcctgggtgacagaatgagaccctgtctcaaaaaaagaaaaaaaagaccctacttccgattaagaaataaggttttcacaggtaccagggctagaacatggacatatcttttgggtagaaacagctcaactcattacaacaacggaaaaatccaaatattgtcatgtaaagattttagttttctatatttcaaaaatacttcaaactgttttaaaaggtagataacaaattgagggtaagtgctcacaacagagaacagggttaatatgtaaagagttcttataaatctgccagaaaaccatgaagatcctaattggaaaggaaatgatgggcacccctggaaggagaaatgtttaaggagttatagaaaagcattcaacatcactgggaatgaaagaaatgtaaatacaaagcctgggagtggtggctcacgcctgtaatcccagcactttgggaggccgaggcgggtggatcacttgaggtcaggagttcgagaccatcctggccaacatggtgaaaccccacctctactaaaagaaacccacaaaaattaaccaggcgtgatagcagatgtctgtaatccctgctactcaggaggctgaggcaggagaatcacttgaacctgggaggaggagcttgcagtaagctgagatcgcaccactgcactccagmctgggtgacagagcaagaccctgtcaaaaaaaaaaaataaagaaaggtaaatgtatatgagcacgtgcaatgccattcgttggtgatcatcgggcaaagccccacccactttctcagacatccccacyggaggatcccatcagtcacaatcctcactaattagaccattcaaattccccaaaataaaaaaagggaaagaggtatagacttatcttaagggtcttaagttctggcatttttctatttaataatatatattgctataaaatggaattactaccaaaatttagaaaatcttttagcagaagatacagccctaatcttaccactccagtacaatcattattgacatttatgatgtacttcgttatagtatcaaaacaattccagtatgtgaacgcttttctttctttcctgttttcctttctaagtgacgctcagtgaattctgtgtatgtttctcccctgcatgcattggtcaaacagtctgtagagcaggcacctagaattggcttgccggctgccctggtkgacatttccagtcttactggcatggacaaattaccctcaaagtgattttaccaactttcacgtccccagcaatctataaaatacccttttcccttcatttttgccaaaagggttagcaacttttaaaatgttaactggacatttgggtttcttctgttgagaatattgttcttatattttgtatatttttaaaaaatggatgtgtatcttttccttattgatttgtagaaagtatttatatattccagacattctgcttttttttttttttttttttttttttacttttgtttgtttgtttgtttttgtttttttgaaactgagtctcactctgttgccgaggctggagtgcagtggtgcaatcttggctcactgcaaaccgcaccttccagtttcaagcgattgtcctgcctcagcctccctagtagctgggattacaggcatgcaccaccacacccagcttacttttgtatttttaatagagacggggttttgccatgttggccaggctgatctcaaactcttggcctcaagtgatccgcctgcctcggcctcccaaagtgctgggattacaggcatgagccactgtgcctggccccttttttgttttttaggcgattttaataaaatgtcatacttttctccatgaagtccttgcagcacatcatttgttcgagctgtttctaagcacttttattgttttgttccttttcaagaatattttcaaggtgttggttatgcagcgtgtaagtttgcccaggccaccataacaaataccacagactgcacggcttaagcaagacagcgattttctcacaattctgcaggctggaactccaacatcaaggtgttggcagaggtggttccttctgtaggcccctctccttggataaccatctcttccctgtgtccttacgtggtcatccctctgtgcgtgtcctaaagtctcccttttttttttttttttttttgagactgagtctcattctgtcacccaggctggaatgcagtgcacaatctcggctcactgcaacctccacctcctgggttcaagtgattctcctgctccagactcccaagtagctgggactacaggtgtccgccaccacgcctggctaatttttgtaattttttagtagagacgagttttcaccatgtaggccaggctggcctcgaactcctgacctcaggcgatctgcccacctcggcctcccaaagtgctgggattatagacgtgagccaccgcacccaaccctaaactcctcttcttaaaaggacacagtcacataggattagggcccaccctaatgacctcattaaagaccccatctccaaatgaggccacattctgaggtgctgggggttaggatttcaatatatgaatggggggacacagttcagcctgtgccctggggtataggaacatgaaaggtttttataaactgtgtttctacccagctgtattcttttttttttttttttgagacagagtcttgctgtcgcccaggctggagtgcagtggcaggatctcagcttactgcaacctctgcctcccgggttcaagcttctcctgcctcagcatcctgagtagctgggactacaggcacatgccaccatgcccggctaattttttgtatttttagtagagatggggtttcaccatattagctaggatggtcttgatctcctgacctcgtgatccgccttcctcggcctcccaaagtgctgggtttacaggtgtgagtcactgcacccagccactacccagctgtattcttattggcttaaacagctgataggttttcttggattttccacatgctaatcatagctgcaaatgacacctttgatatttccctttcaatcctttatcttttayttgtttcttattttattgcccggccagcatcctgagtgtaatgtggaatatacatagtcatggtgtgcattcttgtcttgtttgtgactttaaagcgaaggcttcaaatgccgtttggtccaagtttctggtaggaacccttcagcaaaccaaagcaggtctcctgcatccttggtttggtaaacattttaaaaatcagagcaggaggccaggtgcagtgtctcatgcctgtaatcccagcactttgggaggccgaggcgggtggatcacctgaggtcaggagtttgagaccagcctggccaacacggtgaaaccccatctctactaaaagtacaaaaattagccaggtgtggtggcaggtgcctgtaatgccacctacttaggaagctgaggcaggagaagcttgaacccgggaggcggaggttgcagtgagccgagatcgcgccactgcactccagcctgggcaataagagcgagactccgtctcaaaaaaaacatgagatcgggcataatattgattaattctgttcttcatctggccgggttcttcttaaacatcacttccttagtgggggtggaagggctttctcacatctccaggctaggttggtcctagtcctacactttctagccttttgtgacacttgtcctattttgtttttgtttgtttgtttgagataggatcttgctctgtcacccaggctggagtgcagtggtgcaatttcagttcactgcagcctctgctccccaggctcaagtgatcctcccatctcagctccagaataactgggactacaggtgcacaccaccacacccagctaatttttgtattttttgtagagatagggttttgccatgttgcccaggctgatcccaaactcctgggctcaagcaatcctccctccttggcctcctgaagtgctgggaatacagggtgagccactgctcctggtagcttgtcctatttttaatcatgcatttatttgtcttcctcactagacgatctgccttgatcagctgtcactgtgcatccccactgagcagtgcttaagaggacttgataaatattcgtggagtgaacgtacttcatcacatttctgtgatgtttaagcttactgaggagcttaaattactctgttttagtagtttttacggaatggcttggtttcgtaattttccactttctttctcagaacatttctcgggttctcagaaacaattatcggaatgtttctcagcatattttctaagttgccctattgtcattaattaataaaaagttactatacggatcgaatgcctatttacatgggctttacggatatcgtctcttaattcttgcacagtgcatrtggggaacatatgacctccattttactgaggagaggcttagggagggttgggtaatttgttttttttttttttaatgataatattccattttgctaagcatgctttttttttttttttttcctgagatggagtatcactctgttacccaggctggagtgcagtggkgtgatctcggctcactgcaacctccacctcctggtttcaagcgattctcctgcctcagcctcccgagtagctgggactagaggtgcatgtcaccacacctggctaatttttgtatttttagtagaggcaagatttcaccatgttgaccaggctggtctcgaactcctgacctcaaacgatcctctcacctcacccaatgtgctgggattacaggcgtgagccaccactcccagcctcccactgcgcctggcctcgggtaatttgtttgaggtcataatctaatgagtgactaagctgagctcagaagtcaggcctctccgatccagagctttaactccaagctgtccttaatcatttaaaacgtcttgaggaataggttcctgaggctgcctggagagacgcagagcagggactcccatgccctttgcagagtcagggtacggtcgtctcagcacgtgctgaacttgggactcttggttttgtgtctccaacctgcggcyggctcagacaccatccagcacatgagagacagcaagcacatcgtcgtgtaccatcgaggacgctacttcaaggtctggctctaccatgatgggcggctgctgaagcccygggagatggagcagcagatgcagaggatcctggacaatacctcggagcctcagcccggggaggccaggctggcagccctcaccgcaggagacaggtgcgcagcctaggtcccttgtcctgttttggggggtggtggaggcgctcttcctcactggggcccatccccaccagggcctgtgggaatcctggcacgggactccccacctcggctctgtttttctctggggtctcccggcttggcaggtctcaagagcaatggggacatggtggggggtccctggccacccctgtgtgtgtgtcaggcaaatgtgtgtggaaacactccagagtccaggacagggagaagtgaggattagaattaggctttttttttttgagacgaagtctcgctctgtcacccaggctggaatgcaatggcactgtctcagctcacagcaacctccgcctcccaggttcaagcagttctcctgcctcaacctctccagtagctgggagtgcgccaccatgcctagtagagacagggtttcaccatgttggccaggctggtctcaaactcctgacctcaagtgatccacccaccttggcctcccaaagttctgggattacaggcatgaaccatatgcctggccaggattagcctttcttacggggctgtgggcatatttattaatttaggaaacagaacaaatggaaaccaaggcccctgtgttagggttacatttccttgcctcagtgaaaaagaatcaggccgggcgcagtggctcacgcctataattccattgctttaggagaccaaggcaggagggtcacttgagcctaggggtttgagatgtgcctgggcaacagagtgagaccccatctctaccaaaaaattagccaggcttggtggtgcgtgcctgtagtccaagctattcaggaggctaaggcaggaggattgcttgagcccaggaagttgaggttgcagtaagccatgatcaaggcactgcactccagcctgggtgacagagtgagactgtgtctcaaaacataaaaaagaaagcgaatcagcccgagcttggttttctcgcaggtgtggtgtgtattgtataggagggtttctcacctcagagctgtgcacactcagggccgggtacctctttgtggggggcactgccctgtgtagcgttggatgctgagcagcagccctggcctctgcccaccgactgccagcagcaacctgtgtgacaaccagaagtgtcgcagacattgcccagcatcagggggacactgttgtccccagctgagagctgctgcgttccagcagtgtgacaactgctacgctatcgctgggagtaaggcgggaggggcaggtgttggggccccttctgcaaagatcaggagaggttctgtgctgcgtggaggggccgcaggtgggctgtgtcttgcagagggtgggagcagaccaggaggacagtgggtgtccagggggtggagccgcatgccccggggtagcagagcaggcaggagccgtggagtgggctgggcagctgggccacggtgccaagctggggagggtcccaggcacccaatcatatttgagcttgattctgcaactgggtgccgcttcaggtggtgtagggtggggtggggccgggggtgcatgagtaggttaatgtgggagattcttctggttgggcagggaggaggggccctggacacagggatgcttttcggtggcccaagtagtgagggcctgaaagagggccaggcctgggagcaggagcrggatggaggaggatgtgtgcgggcaagccggcgttgttcggtatctgctgtggtgttgacaaggctggaaagagcggcggcaggagatgcatctcgggtgaagatgcgctcatccgatgccctcctctcagagcctggaatccccagyggaggagacrtggggagcctgagccggcgccgcggggcctgggctccctgtgggtctgtaggcgcctcggtccygatgccccctctggatagggccagatcagcatcttacccatgggagtcattcacaggaagggctccgtacgtgccggccaccgtcascgtcacctttgttccccgagcggggtgcactgaggcctagcgtgtttctaggcttattcgccctgcgggccgccatagccaagcactcctagagagaagaaggtggggagagagccagatggccccgatctggaagggtgggcagtggcagagggycctggaggagctggagtgagagggacccgggagcactcgaggaagcccagctggtgggtcttccaagaaggaagtgggcrtcacaccagttctgtgtattcaaataagacgggcacggagacctccttgtggaggggtcacatgggcatctgtggaatgcacctgggggctgatggcctgggttccgactctgcctcaaaatagctgtgacctaatctttccgtgcttcagttttctcatctgaaaaataggtacagtagcattgagaagatcagtaagttggtacacagaaaaggtttggagcagagcctggcatgagggacgcactcttacgcacttactgtgacctgggctgccggaacttacctagggtggttcctgtagaggggagggagggtgtgtcagggagcgtggaacagggtgatctgggtctgctgcttcctggcggctttgcccacggggccagcctgcaatctggccgttcatttagtcagcatttattgaacaaaaaatacccaccgctccccatgctgtggtctggagaccaggagcaggtgagagtccttccagcaaacagtctcagatggggaacatcatcawcrtggagttttccttcgagaaattctgaaaaactgcaaaggtttgattgtgtcatttcaaacatcacgctccatcgctgcaggtcgggctgcctttaatcgtatttcatcttcactgcagagttccctgggccaggtgtcgtcaggcctattttggacgtgggaaaaataagcagtctcttgatgctgtggagaaagyagcgttcttygtgacgttagatgaaactgaagaaggatacagaagtgaagacccggatacgtcaatggacagctacgccaaatctctactacacggccgatgttacgacaggtaccgtccttaccttctgagagacaggagtttgcccatgagcttggaagaaataccctgtgtgcctgacactcacccctaagtatctataatgctaagaaagaaggtggcataaaaatataaccttcagttttattttattttattttttgaaatggagtcttgctctgtcacccaggctggagtgcagtggcttgatctcggctcactgcaacctccgcctcccaggttcaagcgattctcctccttcagcctcccaagtagctgggattacaggcgtgtgccaccacgcctggctaatttttgtatttttagtagagacaggatttcaccatgttggccaggctggttatgaactcctgatctcaagtgatccacccacctcagcctctcaaagtgctgagattacagatgtgagccactgcgcctggccaaccttcagttttcttccctctgccaaaactatcacacatacacagcctgagctgcaaatctgagattcttccctcctctgtrcatgaccacctttgtttggagatgctcatgagatgcagggctgccaggtccctggactcaggcaggggagagtggcaaacagggctaggcacagggttaggccagggtgttggcatgtggctatctcaagtcctctttttcttatctgtaaagtgttggccagccccgccccctgcagggtggagccaaggattggctgatgaaggggtcatgtgcccacgggaagagcctcccacctctccccagttgccttgcgataacaacaggtcctgacttcaggctgccaggatataagcgctcatctttgtgtctgggacagggaagaaatgagtgattcagtgtcctgtttgtactttcaccctcactccacagagactgagtgtctgctcactgttagagggacaggtgcaaagtgaattagtccatccaggatgaagcagagaggtgcaatgtctcctcattkttgcctctttaaacacttaagttccacacatgtgtgtttcacgtaggtggtttgrcaagtcgttcacgtttgttgtcttcaaaaacgggaagatgggcctcaacgctgaacactcctgggcagatgcgccgatcgtggcccaccyttgggaggtgagttttcacacttttcacttgaatgtggaagttgcttttgaaaatccaaacctggccaggcgcagtggcgcacacctgtaatcccagcactttgggaggccgaggcgggcagatcacctgaggtcaggagttcaagaccagcctggccaacatggtgaaaccccgtctctactaaaaatacaaaaattagccgggcatggtggtgcatgcctgtagccccagctacttgggaggctgargcagaagaaatcgattgaacccgggagacagaggttgcagtgagccgagatcgtgccactgcactccggcctgggcgacagagcgagactctgtctcaaaaagaaaaaacaaaaaagataatccaaaccccacagtcaatttagttttgtaatatttgcgtgattatagaatatgaatttttcacttgtactagtaatgcacatgaagttaaatcactagattaaaggcatccctgtcttcctttcccataacttaggtcccttgaacagcagtgcatctcctgccatctccttagggaacaaaagagtgaaatggcagttgactctcaggccgcagcttcacagcagaagtgaagctcggtttttcctggaataaactatcccttatgtgctggatttcctagtgtttcctacctaccgcattttttaggccaaatagaagcaagcatgtgaaaatctgggtttataaacatgcagcgtgtcttttacctaagacatcattttaattcttaaaattaccaggttatttgaaaaccacaaacccctgtccccctgcctgcacctgtggattggcctctaccattgttttttttttttttttttgagacagggtcttactctgtcacccagactggagtgcagtggcacaatcatagctcactgtagccttgaccgcccaggctcaagacattctcccaccccagcctcccaagtagctgggactacaggtgtgtgccaccatgcccagctaatttttgtattttttgtagaaacaaggtttccccatgttgcccaggctggtcttgaactcctgggcacaggggatctgcctgcctgggcctcccaaagtgctgggattacagatgggagccaccacactcagcctttkttttttttttttttttttttaataattcgttactctgaactgtttgacctgttccgtgtttggcatgagaaattaaatgaaagttttgtttccttaactcaccggtcaggttcttgtttaaagttgctaaattctaggatcatcatccgtagacttgacacagaaaatactgtggtcacttgttgtgatgagacttgagatctttttcttttaaagcaacaagcccctttgagattcacattgactataaagaccatctttttgcagtgttttaaattttcctgctggcctaataaatgaagtggaataaaatgacctgaaagtcacggcgtgtgtgggagacagggcccagctgcaggctgagcacctcgctgttcttgatagggcatggagccgggtttgtgtgtctgaaattagaaattagtagtggccaggcgcggtggctcacgcctgtaatcccagccctttgggaggccgaggcaggcggatcacgaggtcaggagaacgagaccatcctggctaacacggtgaaaccccgtctctactaaaaatacaaaaattagccgggcgtggtggctggcacctgtagtcccagctactcaggaggctgaggcaggagaatggcgtgaacccgggaggcagagcttgcagtgagccgagatcacgccactgcactccagcctggacgaaagagtgagactccatctcaaaaaaaaaagaaagaaattagtagtaaacttgtgaagacatcataatgtatgaccttcttttttctttaaacttctgtgaatgttttgaattttgacttttttttttgagatggcgtcttgttctgtcacccaggctggtgtgcagtggtgcgatttcagctcactgccacctctgcctccccggttcaagtgattctcctgcctcagcctcccgagtagctgggattataggcacatgccaccatgcccggataatttttatatatatataaacctgacctcaagtgatccacccgccttggcctctcaaagtgctgggattatggcatgagccaccacgcctggccttgacgtttctttttataatattgtgtctgtctatttttyccccwagagataaacaaattctggtgccagttttttcttgcaaagtcttcgcactcactctcctctctgcctggaaggcttttccccctggcttcccctggctcctggccccgtcaggtcttccttaggtctcagctgacctcacttcccctaggaatggcactgccctgctaccctctcccaagactaggttaggggctcctgtctcatcttcctctacctcttttaattgtcttacttctggttggagtcttggcaaaacctccagccactccttcagccaagggaggttttctatgtaggaaaaaggataaaaaggaaaaaaaaaaacatagtgctctaggctttaagacaccagtatgaccctaggacattaatacctgataaaaagcagccaatattaaaagggcttttcaccaccaccagggttctttggcgatgtcgacaaaagctgagagagccttttagctacagagcgcattgaagatcaagctgccttcagtgtctctggacgtagcaagaaggcacgctttaataaatctctgcacagcataatagcccgggcttgttataccccaggccaaggacttcccgagtcctatatgcctaagagctgttgtttggcaaaagaaaaagagtcgggaccataggcagctggatcacacagggtacatttatcaagtagagaaatctactggatatttacaagatcaggcttgttttttaaagttctctggataaggataaagggattttatcttagaccagggtgggcacgtagaagtagtggtgtttagttgttagcgtccagcagacaggatggcctgactccagggacccctggctgggggcttatgtgatccatacacagatggggactgacctagtctcacatgggggcccagtgcagtcccttaaagacagatctagtcaaacttgagtctgtttgttcttgttcttgttctatttttattttttattttttgagacagggtcttgctctgccacccaggctggagggcagtggtgcaatctcagctcactgcaacctccaactcctgggttcaagtaattttcccacctcagcctcccgagtagctgggaccacaggtgtgcgccaccacgcccagctgatttttgtattttttgtagagacggggttttgccacattgcccaggctggtctcgaactcctggcttcaaacaatctgcctgcctcagcctcccaacatgctgggattactaacatgagccaccacacccggtcttgctcttgatttatttctgatgtttctgtgtcaggctcttctggagctctgacccagagcaggtggaacctgatcaagtctgttcgttcgctggctcaggtcagcctggattgtgacccccacgtattagcggcaccttccacccgccccgccgcctcgccagccgacagtcacccygaccttgtgttgttgtttttacctccctcactagaatgtaagcttcctgagcacagggattcctcttttaaaaaaacttaatttttttagttgagatataagtcacataccttaaaatccaccctttaaaagtgtacaattcagtggtttttagtatattcacgaggtgcttgtgcaacagtcactgcttagcctcccgagtagctgggattacaggcgtgcatcgccacacccacctaatttttgtatttttggtagaggcggggtttccccttgttggccagcttggtctcgaactcctgacctaaagtgatctacccgccttggcctcccaamgtgctaggattacagtcgtgagtcacagagcccagcctaattctgtactatttttatcacctccaaaagaaatccctcattcctttctcccccaggttcctgatgaccactaatctttctgtgtgtatgtatgtgcctattttggacatcttatatagatagaatcatacaatatgtggtcttctatgtctggcttcttttttcttttctttcgctttcttttctttcttttctagagacagggtcttgctctgtcgctcaggctggagtgcagtggcacagtcatgactcattgaaaccatgacctcctgggctcaggtgatcttcccacctcagcctcctcagtaactgggactacagccatgtgccaccacacctggctaatttttaaaatttcttgtagagataagatctcactatgttgcccagctggtttggaactcctggcctccagcaatcctcccaccttggcctcccaaagtgctgggattactgaagtgaggcagcgcgcctgcctgcttcttttcactcagcataatgttttcaaggttcagtacgttgtaacacatacctggaattcattcctttctagggctggataatatctcattgtatggattgaccacactttgtttatctcttcatcagttgatgggcatttgtgttgtttccactctttggctattatgaataatgctgctctgaacattctgtacaagtttttgtgtgagcatctattcatttcatttcagtgagtatgtacctaggagtggaactgctgggtcatacaggtatatttcactttttaaggaagggcaagaattcttgtctgttttgttcacaaaacacagttcttgtctgcgctgtcaccagggcttggatgccgctgatgctacagtggttccaacccatagtaggtgcccaataaacaccgttgaataaattggcttaggtttacttgccagtgaaaggagagcgtcacaaacttgagcaagcccttagccctcgtctgtcctctctctgtcacatctgacatggagatcagatccacctcattaggtgctgagcatactggaagccttaacagctgtgattcaaactttgtaacatctctgcaaagaacaaccctctcttcatgttggaggttaatgtgttttatgtaccactgttagttttaataattttgttctatttttgacagtacgtcatgtccattgacagcctccagctgggctatgcggaggatgggcactgcaaaggcgacatcaatcygaacattccgtaccccaccaggctgcagtgggacatcccgggggaagtaagtccggattatccaaccattgttacttacctgggatgggaaacacatttgaagtcttacagatgaattttccaaccgtagttcctgccctatcatgagctcagttgaagaccactgaggctgaaagttgtttgctcagggagttccgtgggtctgcggggctgtcacagctcctgttgcctcggaagcctcggtaaatatttcttcttctgtttgaagctcctggctaagactgtcagcgctatttccagcttaaacttaactagacatctacagaatgctcataatcaaaaactaaaagccaaaatcacataggttagagctgaaagcctctaaattgctcatttatacttctcaaagtttaattcattttggcacctcttaaacatgctcagaggcagcccattcacaggagcccttttgggaaggaattttagggttgcaaataccaaatcctagttcacttaatccaaggagaaattccctggagtccaagataccattttctttttcttttttttttttttttttgagatgtagtctcgcactgtcacccaggctggagtgcaatggcgcgatctcagctcactgcaacctctgcctcccaggttcaaacgattctcctgcttcagcctcccaagtagctaggattacaggtgcctgccaccatggtgaaaccccgtctctactaaaaatacaaaaattagccgggcatagtggtaagtgcctgtagtcccagctactccggaggctgaggcaggagaatggcttgaaccagggaggcagaaggtgcagtgagcagcgatggtgccactgcactccagcctgggcaacagagggacaccctatctcaaataaataaaaattaataataaaaagtaaaaaaatgtgtttcttgattgccactgtgtgatgacgtcatcataagatgacgtgtgactatttgaaacaccctttggggtctcactggaagccagggtgcccccgtcccctacccatgttcctgttagcgtcagaacatatctgtacgggtctgcagcaacctcaattcttgccttctcagaacgaatttgactgtggggcagaaggcaggagagaccaagtttaaaagcgggaaagtttattttaaaaactttaggaacgaaaggaaggaaagtacatttggaagagggccaagcggccaacttgggagattaagtgcgaggtttgacctcttgacttgaggttttatacattggcatgcgtccagggtcttgtgttacttctcccaattcctcccttgttgtgggctgtccgcatgcacagtggctccagcgcttgggaagggagcatgcgcagtatgtttactggagttgtgcgcatgctcacttgaggtgttctgcccttgcctgtctagcactgctggaggaagctcatagtccagttagacgccgccattttgcctctcagtgcgcatgcttcagcccactcgcccaacgcttgagatcttatcgggaagctgctggtcaccagctccatttctatctactgagagactgcctttccctggcaccggctgtgacctattattattttagagagacagttcacaaccacctgaccrtcactgatggtcgcgtgatattcccagtgtgtgtcggaggaagccctctcctggcctgctcatgtcagacccgctacctgctataacattgcagctgctcctccggggtcarggagccatgcccctaacttactagggcttctgggtcaggaaaacgtttgtgtacttcccagtaccgagtttatagctgcactaaaaaccagcctccaatttccttctgggtgtgcgtcagtacttttctcccctcgttccgtaaaacctttttcttctttctctcaagtgtcaagaggttatagagacctccctgaacaccgcaaatcttctggcaaacgacgtggatttccattccttcccattcgtagcctttggtaaaggaatcatcaagaaatgtcgcacgagcccagacgcctttgtgcagctggccctccagctggcgcactacaaggtaagaactgaccgcctagggttttgtcgtgagcactttgggggttcctacacctgcccaagactgttcacccagtggggagggaaggcccgaaacccggcataggagaagcacagctccccccgaccccggtctccgggggccgggtggcgttgggtgtttcaccacgcacgcgggcaaagttcgcaaatccccctccagcaggcgtagattcccagctgacacgggagagggagagtctgggggatgaggacaaagtgagatctcatcactctacagagggagagttaagccccataataagccccgaatcctagcatttgctaaagtggaaatagtgtgggcagstaggggaatagtcagttacgtattcgtctggcgctcggtaaatctgcacttcacacaggtcaggtgaayatggtccacgtttcatctgtcgctctctgcttgggaacaaaataaaaagcttcttgcatgacttagctttcagcttaatcctttccttttggcagagtaaatcttcctttcaccatactaaattaaattttggtattttcatacagtggaatattatatagctattaagtgatgtctttgggcaaattacttaaygtctctggcctttgacatctccttccataaaaggagaaactccagccacttggaggtgccatgggctggatcccctgtatacacatggcatttccatctcccttttctgagcactggccatattttggcttgcacctggccaacccctkttggaggagcagcctgcacccctagcagggacataaatgggtcttcttgtccattggagggagcattccatcccagacagggggcccttggtttctgggggcarcacaagtcatcgtggcattggcttgagatattcccaactttttttttgagacagaatctcactcttgttacccaggctggagtgtaatggcatgatctcggctcactgcaacctccacctcccgggttcaagcagttctcctgcctcagcctcccgagtagctgggattacaggtgtgcgcccccatgcccagctaattttttgtatttttagtagagatggggtttcaccatgttgagcaggctggtctcgagctcctggcttcaggtgatccacccgccttggcctcccaaagtgctgggattataggcgtgagccaccgtgcccagccttgtattaaaacttgagtgctgtacacatatgcagcgtgtggcactgcccccccaaccttggtaacgattgtgccattgttgaattttgcttggtgcatcatgtacctcatgcttcactgtctctgcacctgggaggcactcttgttatcccatttttaaaaatttacaagtccccattatgcctcagaaaatcttgttttcccattttacaggtgaggaaacaggtgcagagaggccaggtgcttgccagggtggcactaggcagggataaagcgggccagcggctccagagtctatgctctctccacctaaagttaagaaaacagttacagagaagtaagaggcagtgttaatatcagatgaactggaatgaatgggccaaaatcgtatttaaaatgcatgctaatacagtctgtaaagactgtcacagttatgaagccttgctttcccaagtaacatgctcactatgcgtaaaccagaagcagctgggcagagtaccaggagcacagtgacaagctcctgtctgtgacagatcattgactaaagatcatgtgattaaaaggtgacatggaatagaggcatcgcatctcagaatcartgagctggattttgagaattgatgagcagattttgcccgtaaacgtgcagtatgagggcatgcaagcagttgataccttacctacagaaaggatgttattttatctttttaaatttttttcttttttaaaagaattccctgcaagtaagcgcaggacttaggagtttagtaaggaaatgccacgctccagtttagtacattttgaaacatgctgaaatgactattctgcaagcagtacaaattggtgacgttgactcaaggtagaaaacctgaaaaggyctctggtccagggaccaaagtgagaggttgtcagggagccacccttgtgactccaaagagcttgcagctcagagactccacaaaggaagccaccccatctgctccccagaacccacgtggcccaggtgtgggaatgagctgcaaggggcaccagccactgtgccatgtacttggcaggagcgagcgaaacttcaggacggcccygaggaaggcatctcttcatctctgccctccacactcggaggtgaagcatcttgcctgagggctccagctcgtacgcagcaggactgagatcggaagcaggcaggcttgttcgagaacctgtggctctcatcactgtgctgcagctaaacgcagaaaaaggaagcacagaccagcttcccgcatgaatggaagtgcagagaccctccataaaatcttagcaactagaatccagcactgtaggaaaagaatagtcacccacagtggcgtacaccagcggtgagaggctggttttgtgtcagtaaatccagtcatacactaaaccatactgttgggtcagagaagagcctagatagtgagtttcacagatcctaagaagacgtttcacgtttaacatccattcctgataagagctcttggtcaaggggcttagtaatagggctctttccttaacaggataagtggcatcgtgtattaatagctagctactgcttcaaagtaaaagtgtgggaggcagtccccttaaaacaagaaagatgaggatgcctctagcagatgacagggtaattgggcaggaagaacatttatgtctgttcaggagatggaacagcagaaaggctttgacgattaagaggcacacccagtgagccggcccagcgcagagttgcacaaagaccaccagctttcttgcacaaggatgatggccaagtgggaaatataataagagaatgtaatagaaacgagaatctggggccccaccttccaggcatacgtgtataaagcagactggactctgggaagaaggccgaggagcactcgccccccaactcctccccagggagagggagaaaaagccatgattttggatgaaaaaaaacttcagaaccatagaggaagggatgttcccagttcacactgttttttttttttttgagacggagccttactctgttgcccaggctggagtgcagtggcacgatctcggctcactgcagcctcggctgctcactcggctcccaggttcaagtgattctcctgcctcagcccctcgagtagctgaaactacaggtgcctgccaccacacctggctaatttttgtatctttagtagagacggagtttcaccacgttggccaggctggtctcgagctcctgacctcaagtgatccgcctgcctcagcctcccaaagtgctgggattacaagcctgagccaccatgcctggcttagttcacacatttaatatgaacacagtgagaggtcaggcaggggcttcaggagaggagcttgcccagttgatcttgaggcttgaaaaggctaacatttgagagtcacctgtaacatttttgaaaagaaaagcaatcaggcggaggcaggacacggggaggtggacatgtactttttcaaatcctaaaacttaaagtgtaggagttagaagactgttgtgattaaagtggtctcagtcctataatcctagcactttgggtggctgaggcaggtggatcacttgagtccaggagtttgagaccagactgggcaatatggggagactctatctgtacaaaaaatacaaaaaaaaaaaaaaaaaaattagcccagcatggtggcgcatgcctgtagtccaaggtactccggaggctaaggtgggaggatcacttgagccccggaggtggaggctgcagtgagccgtgatcgtgccactgcactacagcctggatgacagtgagaccctatctttaaaaaaattgtttttaataaaaataaaatgctgcagtcctcgtacaaaagcaggcctgggaaataacgtgtaatggagggagcatttgacatcagtaggggacggggagctggtgagtaaatggagctgggaaatctggctaagtggttgcctttggaaaaaaataatccaagagaaataaggagtcagaccagaaactgtggttcacaagagaggaaaaatacggtcaatgagtgtaggtaataagcttaatcttaccaagaatctaacaagtacaacttaaacaagactagatttttgcctacggggttggtaaaggctttttttcatgttggtgagggtggactgaggcagggatgttcatagagcagctgggaatagttttaataaatttaggggccccatggcaggactgggagcagcacagaccacacagttggaaacatgcatcggggaagaataactttgaccctgcacatgatccatgaaaaagggtaggtacacaaaaaacacgtgtgagcaagcttactgtaaaaatgtgaggaaatctggccaggcgcagtggctcgtgcctgtaaacccagcactttgggaggcctaggcaggtggatcacttgaggtcaggagttcgagaccagcctggacaacatggtaaaaccccatctctgctaaaaatacaagattagctgggtggtggtgcacacctgtaatcccagctacttgagaggctgaggcgggagaatcacttgaacgtgggaggtggaggttgcagtgagccgccaagaccacgccactgcactccaacctgagcaataagaacaaaactccgtctcaaaaaataaaaaaagaagaagaagaaatcttaaaagttaatgctggcaggccgggcacagtgggtcatgcctgtaatcccagcactttgggaggctgaggtgggcggatcatgaggtcagaagatcgagaccatcctggctaacacgatgaaaccccgtctctactaaaaatacaaaaaattagccgggcgcggtggggggcgcctgtactcccagctactcgggaggctgaggcaggagaatggcgtgaacccgggaggcggagcttccagtgagccgagatcgcaccactgcactccagcctgggtgacagagcgagactccctctcaaaaaaaaaaaaaaaaaaaaaaaaaaaagwctggaaactagaaagtgtctgagacaggtctcaatttatttagaagttgattttgccaaggttaaagatgcgtgcctgggagacaggcctgtgccttcctccaaaggtggttttgagggcttcagtatttaaaaggaaaagcaggcaggaggggaaggaagggagggcgtggccacgttacggaattcccatgatgcaagagaaaaggggcggtaggggaatcgtcagttacatatttgttacacaaaacccggtgaacccagagtggagacatttcgccttttatccgtcactctgtgcttgggaacaaaagaaaaaggcagcttcttgcacgaagctttcagtgtaatcctttcctttcggcagagtgaatcttcctttcatgatactaaattaaaatagggtattttcacacagcggaatattatatagctattaagtgatgtctaaggcatatatatgtgtatatatatttttgagacagggtcttactcttgcccaggctggaatgcagtagcacaatcacggcttactgcatcctcgacctccctgggtgctggcgatcctcccacctcagtctcccaggtagctgggactataggcatttaccaccaggcccgtctaatttttatgttttttgtagagatggggtttcaccttgtttcccaggctggtctcaaactcctaggctcaagcaatccttggcctcccaaagtgctgggattacaggtgtgagccaccacgcccagccatctatggcatattatacggaaaaatatttagtcataaaacagtttgtgaaagtcaggtgtttcttacaatgatctgcagactgtggctcataggccaaacctggcccttcaatgtttttgttttcatttttgttttcatggcttagaaagctaagaatggcttcacatatttagtagttgaaaagcagtcaacaggcgaccaatactttgtgacatgtgaaaattacgtgaagtctcagtgttcatcagtgaagcgttctgggcacggccatgcccggctttcacatgttgtctgtgctgttctcactccagtgggagagcggagtagtcgccacagagagcacctggcccgcacagcctgttctgcattttacagaagtttcccaactcttgctttgttacatgcaaagtctagaaaggataaatgcaaaatattagcaggtgatgttgtgaagtttcctttttcttttcttttttttttttttcctccttgatagagtgtcactctgtcacccaggctggagtgccgggcgtggtagttgacgcctgtaatcccagcagtttgggaggccgaggcggatggatcacctgaggtcagaagttcgaaaccagcctggccatcatggtgaaaccctgcctctaccaaaaaatgcaaaaaattagctgggcgtggtggcaggtacctgtaatcccagctgcttgggaggctgaggcaggagaatcccttgaacctgggaggcggaggttatagtgagctgagatcgcaccactgcactccggcatgggcgatagagtgagactctgtctcaaaaaaataaaaaataaaataaaaatgacagatccattaaagtgatctattaaaagtatacatcagatttattcattcaaaaattaacattcagaccgatctcaacccagctgggagctgcagagcctccctgtggttttacataaatccagaaccttgctgtggccctgtgggtctcttctaagcttctgaaccttttttctgccctggaccccttgggcagcctaggagascctggggaccccttctcaggggtccttcaaggttatacacaatataaccttgtgttatattgaccccttgaaggggtccttcaaggttatgcacaataaccttgtgtatttcattttataaagcataaccccagcactttgggaggctgagacaggtggatcacttgaggtcaggagtttgtgaccagcctggccaacatggggaaacgcgtctctactaaaaatacaaaaattatccaggtatggcagcacgcatctctaatcccagctactcaggaggctgaggcatgagaattgcttgaacccggtaggcagaggttgcagtaagccaagatcacaccactgcactccagcctgggcgacagagtgagactgtctccaaaaaaaaaaaaaggtagcccctcccgcattgttctgttccctagttcyctgttcctgtgttatttctattcagtggcctgacttgatgtgatagaatttttttgttcatccctgtctcctgctagaatgtttgctcattgagggcaaaggcatgatctgtcttacaacagtattgcctgtgccgggagcatcagtaaatcagtattgaatattgaatatggaktgaatgctgacactagacagtggtattaattctagtctgcagcagttatttgcctcctgctttggaagccctaccaacctgaatcattagccccatagtaacagtgctagtgtgtgatgccatatatgtcagtatatctatagactgtctttgaatcctgcttcttagaaactggagatgttttggtggcagcgaagggccatcctcctgatggcggctggtcacagtgggtcaagggtgctgcagttgtaacctggtttggctctttgatggcgtctgagctccagtggggcttgcacactaatattcaatgcatttgccaagaagttttttagatggctgtcttttaaactgtgggcacaaggcatgactgttctcataacttacacaattaaagtttgatattggaacattgatttcaaatgaatcattgcatcatatagttcaagtttacctttattaaataactaaaatgccacatttccgctttcccttttatctgcttctctccctctccccacttcttcatygtgagcgcctatgaagtgctctgtagtgaggagatgcgggaagggctctgaaaggcgcgtttgctatcagcatgggaagcaggaggccccgtggcctcatggcaggccccaggcctgtgacccccgctcccaagggaatcttgagtgtcgtgtcatgccaccagggttggtggcatctgtgggttggggaagagagctccccaaggcggccagctaygttggggggatcctgggggctcagccaggtcctcactgcaagtgctgcttagcgctggtgtccagcgtgctcccacggtctctagacgcttccctctgcaaagccgctgctcttgtcgacgccttcagtttcctttttctgctggctgatgcactctcatttcactggttctggacgcttccttctgcctttcaggggccctggtcctggacgctaccttctgcctttcaggggcctcctctcctccagagatcttggctgcactgtgaggagcctgacttcagctgggcctgtgtgcaggtgccaggccttccscggctgagcgggtcctgtgctctgtctgactctccgttccccagctgagtgggtcctgtgctctgtccggctccccgttccccagctgagtgggtcctgtgctctgtccggcttccccttccccaggctgagcaggccctgtgctcagcccagccttgcctctggcaccctcttctgggttcatttgacagtatcagcctgccacakggtgtcctttgcagatgggtgggtctgccaccctggggccaccagggcctgtgccagggtgcacactaatgtgcagggatgtgtctggtcaggaatcatttgggtccataaactgctgcttatcaccttctcgtccccacttggaacctggtcctctttgagctggcctggtggccccgggccccttcttggggcagcacgcagatgctgttcctcccacagccgcgtgctgccttggactcagtctctgtccttatccaccatctgctrttcccagcaggggcccttgctgcactatcccgtcatctccaccaaggctcagcctcaggggcatcagcccctcctgccgtgctgtcctctctaggcccagatgcccacgttccttgaccccatccccttgtccctccctgccctcccttttctattctctgggtgtgggttccatggttctttgggatcatcccttaccttgactccctggtccccctgaacttacctggggagcctgcagaggctcccgggttcagcccagctctccagctgctgtgattctgttcccaaggcaccagcctagctggaaaaaaagcattcaacagctggctcgtctcccctccccacgagtgagcgctgaccgcagtgggccaggcaccatgtttccatgcccctgaatgccacatcacacccctctcccgctgccagcacctcctctccagcctggccctcagcaggcccgctttcttctgcttcacccagaaaacaggagcttttggaagagaccttccctgtgcatctgccagcccacccgaggcttcctgtctaatggggcagtggctgtgcttcaggctccggccccacccacttcccgccctcctgctagacattcttcctgcaccccagcacagtctctcccagatcattctcaccatcttccagacgcagtggaattgctccaggcaatacgttgtgtctttaaatcatttcaaacacagatcccctgctgtgcacggcattccttctgtacactgctgcaggctgcaccttagcctgaagggaatgcagcagaggtgtgttggactcgggggtggggggggtgtcatagtatcagttgcatcttgaaacagaaacctggttaacctagaaactgacccacctccaccaggcccttcctgaagccagtgacacctgtctgctgccacgtcactacccacatgtaaaagcggccagagactgaaaatatgattcgacaataggctgggcacagtggctcacacctgtaatcccagcactttgggaagccaaggcgggtggatcgcttgagccaggagtttaagaccagcctgggcaatgtggtgaaaccctgtctctacaaaaaaaattttaaaaaaattagcatgcacctgtagtcccagctactcaggaggctgaggtggggggatcaccggagcagggggaggttgaagctgcagtgagctgtgatcatgctactgcatgccagcctgggcaacagcaagaccccgtctcaaaaaaatgttgacaatgaagtccacttctccttgccaatcttacccaatccttccttacgttttagacatatcagcatgccctgccrtgcactgaagtacttctctttccccaggacatgggcaagttttgcctcacatacgargcctccatgacccggctcttccgagaggggaggacggagaccgtgcgctcctgcaccactgagtcatgcgacttcgtgcgggccatggtggacccggcccagacggtaatgtgccatcaggctgaggacacaacgtgcttgtcacacttccctaaaaggcttctggaggccatcactccagcttctctgatctcatcattcctgtaccttcttctttaggggtgctcaattcagcttctttcctctgcccctttcaagggtacagaaggtattaaaatattaaaaggtaaaggtagggacaaggacagagacgcatgttayaaatgatacttctccaaatcatattctacttcctgagagtctttaaattaggccaggacacacaatgaggaaaggcatagcaggtggctgctttggaactgaacaggtggttggtgtcagggtaggtgagctgtgactgtcgcacgggaccttccattggttattagagccattgccacgctgggccccaagtgccaggctggggcctgggggttttctgtacattgtcctttaaattttcttagcagtggtcctgagaagtgtcatcagttcatttccatagataaagaaacagaggcctagatgaattcagcagctgctgggccattctgctcactaatggccgaggtcagacccaggccactgggtccgcctgactccagcgtgcaggtgctttctgctgatccccagagcgtgcaggtgctttccgctgatccccagaggagacactggccagggctctttttttccgagacaaacttcattctggaaaggctgtcasaccgggcgcggtgactcacrcctgtaatcccagtactttgggaggatgaggtgggyggattgcctgagctcaggagttcgaaaccaccctgggcaacatgttraaaccccgtctctactaaaaataacaaaaaatattagccgggtgcggtggctaacttagatccrtaactgctcaacttgagacatgcaacatatgtccttcccaccttttgtcactcaggtggaacagaggctgaagttgttcaagttggcgtctgagaagcatcagcatatgtatcgcctcgccatgaccggctctgggatcgatcgtcacctcttctgcctttacgtggtgtctaaatatctcgctgtggagtcccctttccttaaggaagtaagtctcttccacttcttccgtcagttgtattggctagaccaaaacttagtaaattactacagccttgcatgaacatattttaatgtcagaatgggcatttgaaaaaaacgggtctgtgggtgtagctgtcataaaatggaaaatgtgagcagcgcgtttagtactgcatttcttcaaaaacttcgctgtcacatgtagcccctgacttaatagacccgaagacctcgagagcttacgtcacagtaagacgcacggaagtaactagggagtgatgagctgtgagcgcgtaccacctttgttttaaaaatcctttattttattgtaagtttatgaaatatattattattgttttttgagacagggtcttacagtgttgcccaggctggkctcaaactcctagacacaagcaattcttcgtccttagcctgctgagtagctgatgtgcaccactgtgcccagctcaaatttaatttaagttttatttatttatttatttattttttattttttggagatggagtctcgctctgtcacccaggctggagtgcagtggcgccatcttggctcactgaaacctccgcctcccgggttcaagctattctcctgcctcagcctcccaagtagctgggattacaggcacacgctgccatgcctggctaattttttttgttgttgtattttagtagagacggggtttcaccgtgttgcccaggctggtctcgaactcctgagctcaggcaatccacccgcgtcgggttcccaaagtgctgagattacagacatgaaccattgcgcctggcaaatttaatttttaatagtggctgtatttaayagccagcttgaaaattctctgaaaatatggcagctggctcgtgggagttggtacaagtctgacacctctgtccccgttccgaatcttactccatatatctgttaccttcactgtctgagatgctatttgctggtatgcccccacccccaccctgcactccctgccccagtctgggggccccacccaccccgcatgctctctgcagatacgctgcccaagccagtgaggcctttggagacatagacttgtggtgtgtggaacaatcaaaagaccaagccaggcttttctcgtcttcccaaagcgactcctgagggacggtagaggaggggattaggaaacatttccctgtttcactcaataggttttatctgagccttggagattatcaacaagccagacccctcagcagcaagtggagctgtttgacttggagaataacccagagtacgtgtccagcggagrgggctttggaccggtgagtgcggcggggctgggcgaggcgcagtggggcgtggtgatgggatgggtaatggggtgtgatgggcccatctccgtgctgggtgccccygttaccttgcggttctaccgccgtaaaggaattactgctgatcattgctatggatgtccttggcagtcttgcacttattttttatttttttgagacaaggtctcgctctgtcacccaggctggagtgcagtaagcatgatcatggctcatggcagcctgaatctcccccatctcaggtgatcctcccacctccacctcctgagtagctgggactacagatgcatgccaccatgcccagctaatttgtgtgtgtgtgtgkatttttttgtagagacagggtttcaccatgttgtccgggctggtctcgaacccctgggctcaagtgacccgcctgcctcagcctcccaaaatgctgggattacaaggagaagccaccgagccccgccagtgttgcatttagaacattagaaagtccctttttcacgttgtctcatttcccagcaacaaattcaaattcccttgtcctccaggttgctgatgacggctatggtgtgtcgtacatccttgtgggagagaacctcatcaatttccacatttcttccaagttctcttgccctgagacggtatgtatgaaaagaagttcctttttctgaagatggggtatttttgctttattctttttaaggaaacacatctttaatttgacagaaaaagtcaattcaactgcctgcttttacttgatttcgggaattttcacataaatggactgcttttaaaaaaaaatttttttttttttggagacacagtctcactctgtcgcccaggctggagtgcaggggcgagatcttggctcactgtaacctctgcctcccgggctcaagtgattctcctgcctcagcctcccaagtagctgggactacaggcacccgccactaccccggctaatttttttgtatttttagtagagacagggtttcaccatgttgggcaggctggtctcaaactcctgacctcagatgatccacctgcctcgacctcccaaagtgctgagattacaggcatgagccaccgcgcctggcctaaatttttttaattaaaaaattgtttgtacagacagggtctccccacatttcccaggcaagtcttgaactcctgggctcacgcratcctcttacctcagcctcccagtgttgggattacaggcttcagccactgtgcccagccataagtgaatttcaaaattctctttacctagttttaaacaaatgtatctcagccaggcacggtggctcacacctataatctcagcactttgggaggctgaggctggccaatcacttgaggtgaggagtttgaaaccatcctggccaacatggtgaaaccccgcctctactaaaaatacaaaacttagctggtgtggtggcacacgcctgtaatcccagctactcaggaggctgaggtaggagaatcgcttgaacccgggaggtggaggttgtagtgagccaggatcatgccactgcactccagcctgggtgatggagtgagactccgtctcagaaaaaaaaaaaaaaaaaaggaaatgtatctaatttggtttaacatgtttacctctgttggcagcaatggttttgaagcttaacgttggagtgctgctgtaactttcagactctttagcacttggaagatgaactaaaaataatgggtacacactaagaaatctgcatacagagcaggggacccccggcttcctctgtggatggaacaagggacctcctccctagcatggcacattgcccttatttatattctgctttccttgtcgtacatagcctggcaacccatgccactgtcgctgttaacagaggaagttggggtttatttgttcactgyggttttcttttgttgtttgtttgtttgtttgttttagacagggtctcactctgccacccaggctagagtgcagtggtgtgatctcggctcactgcagcttcagcctcctgggctcaggggatcctcctacttcagcctcctgagtagctgggactataggggagtgccaccacacctggctgatttttgtattttttgtagaaatgtggtttcaccatgtttcccaggctggtcttgaactcctgggctcaagcgattccaaagtgctgggattacaggcatgagccaccatgctcaggatggtcattgtgttttccgtgggataaacgcattggcattaggggaaggcttagatcgacaacacacccgcacaaacacatcagctgtcatctctttaccctcagcatttctctggaatgtctaagttaagctttaagacgttggtcagatcttagagaactggcagaaaggaatttcaatgaaacattgggtcagattgcaaatgaaaaagcttgaaatgtggggatggccacgttttaataggtttttggtttttgtttttacatgaaaggattctcatcgctttggaaggcacctgaaagaagcaatgactgacatcatcactttgtttggtctcagttctaattccaaaaagtaattccactggagctgctgggaaggaaaacgagctcttctgatgcaaaccaaatgaaaaataggcattaatcctgaccttagctcgggatgaaacactgctcttaaaaaaactcagttttccttccagaaaatgtgggtgtttttttttcctagaacagtatctctcccctgtgaagcataaccccactacttccagacttgccctcccttgggggacatctgataaagtctcccctgatgtctccgcatcggcttggatttattaagggatgcaaatcttgttgagttaatgaaggaattagtagggttgtggcttcacacacagtggaatggaaatggtgtgctttctcagtggcaaccgaaggcctagtgcttaagggcatttagcatcatccaagcagggtaaacttttgttttgttaaaagaaaaatgtgttattcaagttggtgtccccagttgtagctaacacatctggaatgcactaaccaaaatgctgtgctttggagacctgcttttgtcaccgtgggtaaccgttcccgtctggtccagtagcctgtgtttgcctctccacatttgaagcaagcaggatgcaaggtcttcagttttactgaccttgtatgtcttcaagtcttcacaacccagtgccttaaaaatgaaaggccctaaatgtaagggagatggagagaaagatttattttgtagagtctttgggtggaattgtgggtatactgttcccttcacaattgactgagtatggataaccgtacataagcatttgctacaccccaccagccccctccccctcagaaacaccagttccttcccaagggcagctgtgccagactcccctcccgggactgccttcttgtcatcataagcaacaaaagaaataacaggcacatgtcataaaaggggagcaagggccgtgatggtcagataattcactcaagaataaaacatgacacgtgcctcaggaggatctctttcccaaagtgacagcaaggagggcagggcatcggccaccaagcggggactagcaagtgaggaaggggagggcagcccaccgtggtgaggagagagtggctccacgaccccaagggatggccttctcctcccacccggtgaggggaaagactcaccagagggtgatggagacagtatgccggctcaccttggtgaccagccaagatgtctcaagtgacagtgctaggtgttcacccagcctgtccttcagataggagtgccttcacgaaagcgtctcatggaccacaaagcaattatgcactgagtcatcttcagtatttaatgcaaaaatgaagcatcatggaatgaaattcccactgtctgtcatgacaagcttagctgtccattgttttaaattgtgtatttatttttttgaccacttggttctagttgggcctgactccttcagagtgctgcaccccgatagtacaacagcgatggctgaactgttggagtcgatggaaggtgcttgccggagaacacgtgccttttttttttttttttttttttgagatggagtttcactcttgttgcccaggctggagtgcagtggtgcaatctcggctcactgcagcatctgccttgcaggttcaagcgattctcctgtctcagcctcccaagtagctgggattacacgcccaacaccatgccctgctaatttttgtatttttagtagagacggggtttcatcatattggtcaggctggtctcgaactcctgacctcaggtgatccacctgcctcagcctcccaaagtgctgggattacaggcatgagccaccatgcgcggcccacatgcatgttttatgtatgtatacttcatgatgtaaaaatcccacctttatgggccaaagattttttttctcctgaaagcaagaaaaaatgaaaacaaaagacaaaaaaaaaaaaaaaagcgtccaggcgcggtggctcatgcgtgtaatcccagcactttgggaggccaaggcgggcggatcacgaggtcaggagatggagaccatcctggctaacacggtgaaaccccgtctctactaaaaattcaaaaaatgagccgggcgtggtggcgggcgcctgtagtcccagctactcaggaggctgaggcaggagaatggcgtgaacccgggaggcggagcttgcagtgagccgagatcgctccactgcactccagcctgggcgacagagcgagactccgtctaaaaaaaaaagcaaaaacaaaccaacaacaaaagcccctgactgtccgtcaagcaggcagcggggatgtagctctctctgccctgggcaagaatagcacttcccgttaaaagccagcagccggcgtcagtccctatcagagccagctagatcatgcactgttgaccactgagcaatctgtgttacactagagttcacagggcattttgagtgtagacgtgagtgcttaaacatatttgggtttctctctcaggttttaaatgtttcaaatgtaattgttgctcatcagtgcagttatcaatgcaattttatattccttgaggggagaaagaggggtcttattgtacatgtccaaggggggtgataagagtattatctgtttaatttaattggaacaaaccattgtcttaacgcagccatggtttgaatttgttatcttgggctgaccggtgcatgtaaatacagtatgctctttggatgtaaatcttagaaatgcagtgtgaatgtaggttatcattaataaaacattaaccccagtctactacaagatttgtttctgtctcttttgttatattaaggggattataagtcaaggaccaagttcagatacttgagacaaagtggaaagtctcagcatatggaaacaaggccttggaggagaccatggacatcaccaagttcatgtgctgggctggaaagaaaagcctgttgattttcacttgctgtgcatttattcatccattccattgcctcaatgctgagaacagtgcctgacacataaaagatgctcaataaatatgttaaaagtaatgcatgaattccatttttctgtttttcttgagcacctgtattaggccattctcacattgctgtaaagaaatagctgagactgggtaatttataagaggtttaattggctctcagttctgcaggctatacaggaagcatggaggcatctgcttctggggaggcctcaaacagctttttactcatggtggaaggcaaagggggagcaggcattctacatggtgaaaggagacagagagagaaagagaggaggtgctctcttacacatttgcaaacaaccagatctgagagagagagaggaggtgctctcttacacacttgcgaacaaccagatctcacaggaactcacgcactctatggtgaggacagtagcaagagggatggtgctgttcatgagaaatgcacgcccatgatccagtcacttcccatcaggccccacctccaacattagggattaccactgaacctgagatttgggtggggacacacatccaaaccatatcagcgcctgttctaggcactggggagacagcagtgaccccaccaggttctggctgtctcattagtccatttttacattgctgtaaagaacttcttgagactgggtaagtataaaggaaagacagtcaattgactcacagttcagcatggctggggaggcctcaggaaacttataatcatggcagaaggtgaaggggaagcaagaaacctgttacatggcagcagaggagagagagtgagggggaattgccgaacacttttaagccatcagatcttgtgagaactcacttcttattgcaagaacagcgtaggggaaccgcctccttgatccaatcacctcccaccaggcccctcccttgacacagagggattacaattcaagatgagatttgggtggggacacagagccaaaccatatcacagaggaaaaagagaacaagccaaccagttgaaggattttaagtgttctgaggcaactaagaggatcattgggagggggtggtagctggcagggaggktgacccacttagagtgggttgagctgagacctgagagactcgacggagccagcccggccagtgcagcagggcagcaagcatctaggagcagcaggtgcagagcctccaggcttgattgcaacccgtgggtgacccccacaggtggctgtgtatgcctggcatgatgctactcagtagacgtctgattctgattagtaaacgaatgaacggtgcaaccttgtgggttactctctcgcttgggccactcaagctatgcataattcttgggctcttcgatttattatttttattattttttctgcttctgtgagtgttttttgttgttgttgtttttgtttgtttgatttttgagatggagtttcaatctttttgcccaggctaaagtacaatggtgcaatctcagctcactgcaacctccgcctcccaggttcaagcaattctcctgcctcagcctcacaaatagctgggattgcaggtgtgcaccaccatgcctagctaattttgtatttttagtagagacagggtttcaccatgttagtcaggctggtcttgaactcctgacttcaagtgatctgaccaccttggcctcccagagtgctgggattacaggcatgagccaccacgcccagccccaggcaaaattttcttgatttttgaatgttaaatgtacaactaaatagtacacggtgttgctgtgccttgggtactaccctttaaaaatttagaaaagtatttaatttttaaaagtgagattagaaagctgatgttttacattctttatttttaccaaaacagtacctgagtagacagtacctgaggctgtctccccagcacccactcccaccagtccctctacaccctttgcagttttcgccatcacttgaattaaactttcacctcctcttgattaaacagtgatatctattgactccttaaagatgaaatagctcattccccacccaaaatttgagactttcattgtatttgtgagtttttttttttttttctgagagggagcctttctctgttggtcaggctggagtacagtgacacaatctcagctcactgcaacccccatctcccaggttcaagcctcagccttctatgtagctgggactacaggcgtgcgccactacgcccagctagtttttgtattttttagtagagacggagtttcactatatgttggccaggctggtctcgaactcctgacctcaggtgatccacccgcctcggcctcccaaagtgctgggattacagacgtgagccaccacgcccagccgtatttgttacttctatttcgggaccaactccatcagttgcacctgtaagctgcgtcaccaaggaccgggagtgggtgcaaggctgggaacgtgcggtgcaagcccctgccctctgtccacccgcagcgtcccaggccgggatctgtcttgagagctcgagtgtagaaaaatgttttattttattttatttatttttttgagacggagtctagctctgtggcacaggctggagtgcagtggcgggatctcggctcactgcaacctccacctcccgggctcaagcgattctcctgcctcagccttccaagtagctgggattacaggcgcgtgccaccacggccagctaatttttgtatttttagtagagacggggtttcaccatgttgcccaggctggttttgaactcctgacctcaagtaatccgcctgcctcggcctcccaaagtgctgggactacaggcgtgagcaaccacgcctggccagaaaaatataactgaagcccaaggtcagaagccaagctaggcagtcccacttagcgctgcccgagttgatggggacctcagtttccccacctgagcctggatcggctgaacctgggagtgcctcccctgacccgctctggcaacagcggcagtccaggccccgcccctcgcgactctgtctcctcccgccccagaccacgcccaccacacctccctggccccgcctttacctccccgccccgacctcgactccgccccacgcccaggccccgcccactgcccgggcgcctcttcccctccccccaggttcctgtccctcacccttcccccttctccaaccgccaacggccgcatgcgcatgaggcccggcccacgccccatcccgctcgatccacgatgcggcagccccggcggccccaggtgcgtcctccgaggaggaatgacggggnnnnnnnnnnnnnnnnnnnnnnnnnnnnnnnnnnnnnnnnnnnnnnnnnnnnnnnnnnnnnnnnnnnnnnnnnnnnnnnnnnnnnnnnnnnnnnnnnnnnnnnnnnnnnnnnnnnnnnnnnnnnnnnnnnnnnnnnnnnnnnnnnnnnnnnnnnnnnnnnnnnnnnnnnnnnnnnnnnnnnnnnnnnnnnnnnnnnnnnnnnnnnnnngctgcccctcccttggctgtcccctttctggccgcccctcccctcgtcctctcctctggctgcctctcacctggccgcgtgttgcaggtgcgcggcccccgccatcccgccccgccgccctgcgccatggaggagggccctctgccgggcgggctgcccagccccgaggatgcgatggtgacggagctcttaagccccgagggtccgttcgcttcggagaacatcggcctgaaggcccccgtgaagtacgaggaggacgagttccacgtcttcaaagaagcgtacctgggcccggcggaccccaaggaacccgtcctgcacgcgttcaaccccgcgctgggcgccgactgcaaggg

SEQ ID NO: 94826 - DNA, 63202 bp, Homo sapiens
  misc_feature (1)...(63202): n = A,T,C or G
atattggacatgaaagaagagtaagacagtccagccctggacagagaagactgtgacaagaaggatacctaagtgtgggagagaaatacaaagtgcaaggggaatacttgcctggggcaagagtgtcaaaaaagcacctccaggaggtgccatcagcaccttcaaggataggctatctcatcatttggatccttctggtcatccgctggatcctttgcaaaatgaggtgccttttatgcagtaacggtttgctgactgaactctctagggaggatggtgactccctcctgggcagcccccatctattgcctgttgccttccagaacttccaaaatggcaaaagccccagccagcccagccccagtgtcttgcccacactgacaacatcgtgggcatcttccccaactcccctatgttggctgcctcctattccccaagacctttccactgatacctccacgcacctccacagagaggatcttccccaaggcaaagaagaagggatgcatgttgatgtctgggtctttgcggaagcagttgggcttggcatggtgctggaagtgcatgtggttccaccaactggcgggggccccctacagaaaagcagggacacgagtatgaaaagcttcccccaaggcagcccttcattgcctggagttttagagagctcctccccatcccactgaccttcaggtggccaatcacaaaatgatgtagcagatggttccactttgaggtgctgaagaccgacaggtgcccaaagtcatgctgcagccagccagcctgggcctaggtgagaagagtcaacactgagagcagcccaccagccccagtgtcgccttcactgacctcgatgcctccttcagcctctcccacttccttcatctgccaaggcctgtgatgcacctcaggagtcaggaaacatgggtcctagttctgcctctgccactgactcacacgtgagttggggcaaatcaccatcccttctctgttcttctgtttcgccagctccgaagctcatgactttttttttttgagacagttttgttcttgttgcccaggctggagtgcaatggtgcggtttcagatcactgcaacctccgcctcctgggttcaagtaattctcctgcctcagcctcccaagtagctgggattacaggtgcccgccaccaagcctggctgatttttttgtatttttagtaagagtcgaggtttcaccatgttagccaggctggtctcgaactcctgacctcaggtgatctgcccaccttggcctcccaaactgctgggataacaggcgtgagccaccatacctggcctgttttgagagtgtcgctctgttgcccaggctggagtgcaatggtgccaactcggctcactgcaaccttcgcttcccaggttcaagcaattctcctgcctcagcctcccatgtagctgggattacaggcacccaccaccactcccagctaactgttgtattttaatagagacggggtttcaccatgttggccaggtggtcttgaactcctcacctcaaatgatctgcccatcttggcctcccaaggtactggtattacaggcgtgagccactgtgcctggcctttttgtatttttagtagaggtttcaccacgttggccaggctggtcttgaactgagatcaagtgatccggccaccttggcctcccaaagtgctaggattacagacatgagtcaccacacctggcctgaagctcatgacttatgatggactgacatctagaatacagaaaggactgaaacatgagcagaaggcttgccaaatgggtcctgacagtcaagaattagcgctcaatcattattaacatattgggcaatgtcagtggtggggagggagccaagctttgctaagaaaccagaaacttggctcctggcacaggtgggctgtggcagagaacaaaccgcataggaagaagagaacccttggagaagcagctaaaaaggcagtgagagaaatgaagatgtccatgtggctaaagagcagacaggtcaagacagcagaatgcatgttcctgcactcactcctgcataccttcagatctgccctgcttggagggcaggcactcttggccttcctcaaacacccaaggagctttccccagggatgctgagcattgctgtgcacttgacaagccaaaggctctcacctgaactgcactgagcagcaccgcacagaggaggaagggcaaaaaggacgtcccaaagacccaaagggtgagccaggctgcaccatccagcagcaagatgtgcagcaggtacagcaggaagaagacatggttggccttcatgagccccatccgctccactgtggcccgcagctcccggaactcatctgtcagctctttctgcagaagaggaagaggagctgttattcttctcatctgcaccccaatgctactggagacaagggccctctcaggctcaaggacctcccactgaggtagctgtgggaagtccacagtcctaggcaaagataccacgacaatgaggatgacaggaggaggtgccatgggatagtgcctaagagttcaggggactaagtccttgctctgccatttactaactgtgtgatccttggctgtgttgcttaacctccctgagcctgttatctcatctgtaaatgtgtaagagttatgagtttatgcttggtgcatagtaagtgctcatatgataacaatgatgataacaatgatggcagccatggtagtggcagccttgggggagccataggttgcaaagccatgctcccttgggcctgtgacctcatgactatgcaagagaagcagggacctcaagactccccagagctactactgactgtgattactatgactgtgatcccatctagactctccttccaccccctctctgtccccctcaacaaccaatagttgcgacatagcaaacacagggtcttacattcttggtgggctcaaagctgggctgctctggagacagttctccaatcaggagagagttcatatacttcttcacaaggcccttgttgatgtggaaggccacaaagggatcctgcaagtgccgggagaagatgaaaggtgagggagccagccccctggactccggcagtgttcgcaccaaaggccatcctcctgcccgccagaaggctgtacccaagttgaagtgagaggtgaagccagatggacttcctgggtcgagtgcagacttggagaacttttctgtagctagaggtttgtaaaatgcaccaatccgtgctctttagctagctagaggtaaaatggaccaatcagcaccctgtaaaatggaccaatcagtgctctataaaatggacaaatcagcaggacatgggcagggacaaataagggaataaaagctgctcccggccgggcgcggtggctcacgcctgtaatcccagcactttgggaggccaaggcgggtggatcacgaggtcaggagatcgagaccatcctggctaacacagtgaaaccccgtctctactaaaaatacaaaaaattagccgggcgaggtagcgggcgcctgtagtcccagctactcgggaggctgaggcaggagaatggcgtgaaccccgggggagggcggagcctgcagtgagccgagatcgcgccactgcactccagcctgggcgacagggagactccgtctcaaaaaaaaaaaaaaaaaaaaaggctgctccccctcacaccccccaacgtccagcagcggcaacctgctcgggtacccttccacgctgtggaagctttgttctttgctcttcacaataaatcttgctgctgctcactctttgggtccacgccacctgtaagagctgtaacactcaccgcgaaggttcatggcttcattcttgacgtcagcgagaccacgagcccacctgaaggaaccaactcctgacacagaagcacaggccatctccctaggcccagctgccttttgagggtgctcccaggtgtccacagtttaagatcaccgagtatctgctctagttagaaggatgcatcaaggaatgggaagcattggctgaggggaaccactaagaaacacctgcctgggctggcctttcccctgggtgtgtccacagacagcttttgcccaagaatttcagtataggtgagaaacaggagagatgggtggggctgtgtcgggcgttggttccttccggcgggtatggtctcactgacttcaagaatggagccgtggaccttcccgctgttatagctcttaaaggaataacactctttgcagacccaaagaatgagcagcagcaaggtttagtgtgacgagcaaaagaacaatgcttccacagcctgtaagggaactggagcgggttgcagcagctggctggggtggccagcttttattgtcttagttgtccctgcccacgtcctgctgattggctcattttacaaacctctagctagctacagagcgccaattggtgcgtttttacagagcactgattggtgcattttacaaacctctagatacagaaaagttctctaggtccccattcgacccatcaactccagctggcttcacctctcagggctatgagacttccgtcccttcttgcgggtctttcaataagtccctttcctctcttagctagggttctccaaaaaccacgaagaggaagacttccctacgtccgaactggggcacttctgcgtttcttccctttccctccaccgttgttctgggtagggctccacatttccctaagcactctggccaccccctgccccaaggcagctactttgggttgtgcaaggtaaggtccatggcgataagattcacgttggcaggtccggcagccccgggccctgtaagtgatgcggcgtgtggggcgggggccggggcggagccggcggccggtggcaccacacatacggaccaatcgccgtccccgccgcggcattcccggccccaaatcacactgcgggaagctccagcgttggtgcctgtttcgtctgcgcatgcgccgggacacgcctgcgcccttggccgcagtcagggctcccgagtggtcactctggttgacccgcgcaagctctggcctcgcccactaggctggtcgcgtcagagggtggggcgggtcttcgccccgcagcgtctaagctctgctgcgacgttatgggaacctggtgacccgcggcacactctgggacgccagggtagtggatagggacagtggagggcatcacgctgcagggcacgggatcagagggggatgcaaggggaggggacgccattctggccgccaagggggaaacgcggtgaagggaacgccccgactttcgagtccctaggactgagtccccaggactccaacccagcagagaggcgccggggccttagctctgagggctgtggtctagaaagggaagcagcaggcctggggctggggcgcgcgccgaccccgcagtgagaccaagggaagaagggacaggaccccgcgaagggcctaccgccccagagcgtaaacagcggtccgctccgcggaatagctgaagacctcgctggcctgcggctcagtggcctccccggcgattcgagaacagctctgggggtcctcgctaagtgtatgccattcccaatcccttatgtacgccagcggccgcttgccctccccggccagcgctgtcccttccgcgtcctccagtcttcacacgacgcaggggtccccaaggcagcggtctccccaagcttcccgtttcagccccatcctcgagaatgggctcctttcctgctccctctccgctcctgctggcgagtggagaccggcacctaggtccagacgcggctgcgctgcctctcctagccatcgagacaggatgtgactccctcccctggccactgaccccctccctccccaggcggcctgcatccttgctctcctccctcctagcctacccagctcggggttctgtccccgcccagagacctgaggctcggggctgcagatggaatgcacggcagggaggcgggaccctttgtttgtgtgtgcgtgttgttggcctccatccccactccccagactccacttctccaggcctctctcccgccttttcatcccgcatccgcaggacacccaatcaccgggcaacaggtatgatcaggcgcctccgggctttcctccgaattagtcggtgtttggctcggagtgcgtaactctgtctcccctgcactcagcctccggtcccgccctctcctgtgcccccgcctggctgcgctcaccgtggcatcctgcccggcgtagtggctgatgacccgggagccccctggatgccggcgggtgaactcgctgatgttgtacaccttacggtcgatcactagccaccgctcctcgcaccctgagcgctgggccacctcgtcccaggtgaagtagcgcggggtaggtccctgagccgcggtctcggcggccaccgggtcgggggccatagctggcctggcgacgccgcgcgccgggccagcaggggctgtcaggcgcgtgctcggggtccgcgggctccaggagtggatttgctggcgcgcgcccagagccagccgcctgcgcgccgggttttcagcaccgcagggcagaccggcgggcctcgcagcgcgcgttcccattggccgagcctcgtggcgcggggagcgagatcccgtcccccggtgggtcttgggcaactcacagctgggctgccaacacgcgccccctcgcgggctccctaaaggcgtcgccgccggattcgacttcctgacgtcaggcgggcatcgcggcgttggctcccagggggcgccgcggtaggaacagcggttctagtgcaggccctgggtgcggggccgcgctgcaggagtggatggactgaggggccagggctgcggggtggccgcaggaagggtgggcggggccggggttgaggtttttccgtgcacgaggctgcccgggcggtcgcggacatcatctttaggctgtggatgccttggccggggtctccagacgctgaccctccagggttggaaactactgcctgcttgccacgtcgtgccgccaattgtgctgcccgaagtagcagcctgagagcccttgaaagttgcagttatcttgtgaacagcatatttacggtctcttgggcttggtggtggttgggggagggctgttaatgctttaatttgttcaatgaaacatttaaaatgccccacaatttttataaccctgtttgcctctttttgtttttatttttattgtattttggaaaaattcactgggatccttgagtgatgatcctagcgtctcctgacccttaggtgtttcacctgaaaagcctgggtcttcaagctgaggcatttctgttctagcctggaggcgcctrggagccctgggagactttttaagcagagagatttggcatttagatctctgggttttagaggagtgggaacgcacctaaaagtggggttgccagttacaaagctgttgcagtcctgaagagacccagagtttaggtccaaaattttatttattcaacaaacactttataaagcacttactgtgtgccaggcactgttcttagcgttttgcaaaccttaactcatttaattctcctaacaaccctatgaggttggaacaattaacctaatttacagtgaagaaactgagcccgggggaggttattttgtcacacagcttgtaagtggagggctgagatttgaccctggcctgtgctctgaactctcaggctctgccatatttctcattacactggtatttgggcacttcaaagggaaaggaaacataactgtcccaagcactgagctagattctgagcacgtaggagtcaggagagggtgatacagaatagactaggtgaaatatggctagatttctggtagaaaaggattaattcattccatccaaattcttcattttatagataagaaaattgaggttcgaaatggggaaggggcttaccaagttcccatagggaagtttagatgtcctgacttccaggtaagatgccaggctattggaccctgctcaggaatgatggtccacacagctgcacctctgtacagccaatattccttttttaaaaaccttgcccaacaacttggcagtgtctaatgcgagctacaaaacattttctattctttgatcaagcagtttcactcttggtaaagtaggggagactgtgcaaagatgcagaaatagccaatttaatagcaaaaactggaaataaacccgagtcctgacaataagaaaatcgccaagcttattgggatctgttaacacaatgaagaattaaagaatgattttaaatggctagaatgtgaactatattgatagatatagaatccttccccgtgaaataagcagaacccaaagtagtatgggttcgctgattacaactatataagaaattcatgggtatyaaataacagaagagaggtcctttacataaaccatttttcctatgtgactgtgcagtgggataaaagctctcatactgctggtagaagtgtaagttgattaaactggaaaaaatagtttgacaacttatatagaaatttaagattttttttttttttgagatggagtctcgctctgtcgcccaggctggagtgcagtggcctgatctcagcttgctgcaagctccacctcccaggttcatggcattctcctgccttagcctcccaagtagctgggactacaggtgcccgccaccacgcccagctaattttgtttttgtatttttagtagagttggggtttcaccatgttagccaggatggctttgatctcctgacctcgtgatctgcccgcctcggcctcccaaagtgctgggattacaggcgtgagccaccgcacccggccagaatttaggaatgttttgaatactgaagagatgaaaaaaaatagaaaaataaaaatgttcccaataattccatgtttaggaatatagcctaaggaaatgttcttagaaaaatatttataggtcaggcggggtgcctcacgcctataatcctagcactttgggaggtcgaggcaggcggattgcctgagctcaggagttcaagaccagcctgaacaaaagaaatcggctgggcgtggcggcgtgcgcctgtagtcccagctactcgggaggctgaggcaggagaattgcttgaatccgggaggcagaggttgcagtgagccgagattgtgccactgcactccagcctgggcaacaaagcaagattctatatccacacacaaaaaaagaaaactatttataaacaaaaaatattcattaaagcagtatctatgatagcgggaaatggaaacactctaaatgcccatcagtgaaatattttgcagacattgaaaataatgtcatctttcctttaatacagaatcaaggaaaaatgttttatgtaaatcttttattttattatactttaagttttaaggtacatatgcacaacatggaggtttgttacatatgtatacatgtgccatgttggtgtgctgcacccattaactcgtcatttagcattaggtatatctcctaatgctatccctcccccctcccccgaatcaaggaaaattaaataatatgatgtaagtttggctacagagataactgttctataaaaagactaggttgggcgcggtggctcacacctgtaatcccagcactttgggaggcagaggcaggtggaccacctgaggccaggagctcgagacccacctggccaacatggtgaaactctgtctctactaaaatacaaaaattagtgcctgtaatcccagctacttgggaggctgagtcaggagaatcacctgggcaacatggtgagactgcacctcagaaaaaaccaaaaaacccataccacttgtaagataattccttgatcaaccccacctacctagaaccattcattaagtgttttatttaacatttgtggggtgtctcctctttgtattcccagcacctactttggtaaggtgctgggaatacaaagttcagtactatatgggtcatgcctagtcatgtctactggaggagagagacaagtgagtcacggattataggtcagtaggatagatgcaaattaaattcatcttactcaggatttaaacagcttatatgacatgactttgcattcatgtttctttgcttttcatgtgttcttaggtcagtgtcatgtattttgctacctccctaacgagcttataatccaggatagggctgtggattctgtttatactaccaatacatattcagagcaccttggtttggagttctaggtggaatcccacataaatttgctgaattggccgggcgtggcagctcatgcctgtaatccctgcactttgggagggtgaggagggcggatcacctgaggtcaggagctccagacccacttggccaacacggtgaaaccctgtctctactaaaatacaaaaattagccgggtgtggtggggggtgcctgtaatcccagctactttgtgggggtgaggcaggagaatcgcttgaacccaggaggcaraggttgcagtgagccgagattgcaccactgcactccagcctgggtgacagagccagactctgtctctaaataaataaataaataaaaaatttgctgaatcaactgatgatttcaacctgaaaaaatacaggtgagtaagcctataggccactaggcaaatgtcgtgttgccctctcatctccttacccacctacacaggtggtcacacagactgcaataaacccatatccaggtcaactaaaggaaacctttgccttgcaggccctgttgatcctaagggaacttgcctcatcctggatatgaatcacatacttaattttaggttgccacttgtgaatactaactgttctggccaaattaatcctcaaggaacagaacgaaatgagcttaagaccctaatgccaggccaggcacagtgactcgtgcctataatcccagtgctttgggaggctgaggtgggaggattacttgagctcaggagttggagaccagcctagacaacatagtgagaccccttcctaactgtcccaccattttctctctaaagaaaagaaaaaaaaagaccttaatgccgattgtaatgaagccataattgaataacctaactgccagtggctgttggaataacctgaattgtgagttcaaattttgatccattttaacaaaagatcctaaacataatagttggccaatagcctggatcctttacaaagtcaacacatataggagaagcaataccggttgtgctcagcctctgctgcagcctcccctcagtagcagcccttcaggccattaaagaccaaaaccatttttgaaaaatctggatttctgtgaaattggataacttatgggggtgcagtgactacaacacagtaggcactaataaagttgacagaatcagtctttgttttaagaaaagtcatctgtaataattctgcagattaatgttaagtaatattaaaaataatttatgacatatagtgcttaaactaaagggagaatcccaatcatacctctattagaggcagagcgagagctagaaacaggactctcattttgctgcattctaagagtgtgggagattgggatggggcagaggcaggctcatggaggaattcacgggatttccttaatgcagtcttttttttttttttgagacagagtctcgctctgtcrcccaggctggagtgcagtggtgctgtcttggctcactgcaacctccgcctccagggctcacgccattctcctgcctcagcctcctgagtagctgggactacaggcgtctgccaccacgcctggctaattttttgtattttcagtagagacaaagtttcaccatgttagccaggatggtctccatctcctgacttggtgatccacccgcctcagactcccaaagtgctgggattacaggcgtgagccaccgcgcccggcccagtcttcttatcattgtatagaatatagatgccttagggacagatatattaaacccactgttttatagacaaggtgacagatccaaagagctgaagccacacatgaaatttagtatatttggggctagaatttaccccagaacttatttataacttttagttcctctctacatgagttccttagcagtgagttcaataaatgttttggtataaggccaccctggttcaaagaggagaaggctgttgtccttgcttctctgcggtgccttcttcctcccaggccctcagacctgcctctattaagtgggagaagggaggcctgggtaggtaggtcccagatcttcagattgcccggggaatgggtctggagtcctctaggcgttgttgtaagcattttgctgggcctttaatgtaactttccagtacaaatgatctctctttaaaataaaacaaaaaagctaagcttaaaattttataatgagaatatttacttcactatagtaagtcatcatatatctataaacacacatatatatactcccaatatacttaactttttccctattgttggacatttgtgtagaagtttcgcttgtataaatgttgcgatggatatttttgtatatagatattggtttctatttctgaacattttcttaggataaattctacatgtgtaattagtggatcaggtaataacatttttagtctcttgtcatttgttgccaaattaccaatttactgctgaattatttcacaggtattcctcgagcacttagtatgcattccttagttttactgcacttcttatcaccagaacaggaaaggaatggtgtcctacagctccttgaccaagtacctctccaccaatactatgagcactaaagatgcagcaacgaagcactagactctgggatgtgaagatctcaaattctattctctgtgcacttcagagttggagaaggatccatcaagtttcagtagaatgtaccaaggaagggaggcaatgtggtagaatggaaagaataaggattgtagttgagacacctgcaacctggacctgctagtccacctactgctgtgtaatcttggacattatgtccacctctatgggtttcggatcccttatctgtaaagtgaagagattgtccagatgctttccagcactagcaatctgtgctttaaagttttacctaacataccataccttttatcaatgtccacctagagataataacccagcttattttatttgagttttgagacagggtcttgctctgtcttgcactccagctggagtgcagtggcacgatcatggatcactgaagtctccacctctgcggttcaagcattcctcccacctcagcctcccgagtagctgggactataggcatgcaccaccacatccaactaattttttatatttttgtacagacagggtctcactgtgttgcccaggctggtctcaaactcctgggctcaagtgatcctcccaccttggcctcccaaagtgttgggattacaggtgtgagccaccacgcctggcctaacccagtttcttagatagggtccccagcctgtcatttaaggcatctaaatttgatgcacttactaagttgatgccatttttgttgttgaaaattattcattttttaaaaatagttatgactttcaccacatattaataaatcattatctagtgagcttggttaaagtttgacctcaccaatattgctagttaagaaaatacatgtatggcactttcacataccttgtgtcctttgagcctcgttattaaaatagatgagataggttagaaatcactatctccgctgggtgcggtggcttatgcctgtaatcccagcactttgggaggccgaggtgggcagatcacstgaggtcgggagttcgagaccaacctcaccaacatggagaaaccctgtctctactaaaaatacaaaattagctgggtgtggtggcacatgccatgtaatcccagctactcgggaggctgaggcaggagaatcgcttgaacccgggaggcagaggttgcagtgagccaagattgcaccactgcactccagcctgggggatagagtgagactccatcttgggggaaaaaaaaagagagagagagagagagagagagagagagagagagagagagagagagagagagagaaagaaagaaagaaagaaagaaagaaagaaagaaagaaagaaagaaagaaaaatcactgtctcctttttatcatgaggaaactgaaggtcagagacagaggtctaacatcacatggtaggtatgggaaaggaatactgtagcggtctgtaattgcttttggtttgtgacttcccacaaaaaggaacagaccctgttccccaaagcccaggtctgctgcttggcttatgacctacacctaatagagtaactcagccgtctgataacagtggcccaatggttagcatctgatgcagagcccattaaactggaattaatccttgggagcagggaatgggggagaattatttctgctagcgtagcttagcaaatacagccatatttttttgtcacatggaggagacccttctgcrgtaagagagaatcaggtgttggccgggtgcagtggctcacgcctgtaatcccagcactttgggaggctgaggtgggcagatcacgaggtcagaagatcgagaccatcatggccaacatggtgaaaccccatctctactaaaaatacaaaaattatctgggcatggtgccacccaccacggcctcctaaagtgctgggattataggcataagccactgctcccagcctaggtgtttcaaacataacgttaaaatagaatttttaatttttcacccctgtactaactctgttccctcatcttggtaaatggtcccattatctattcatttgctcaactcaaatgctagaatcagacttatttctcttattccttcatctctaccatcacccctgcccctgtacctccaactaatgcggtcttgattctacctccaaaggatattctaggctgggcagggtggctcacgcctgtaatcccagcactctgggaggctgaggtgggcagatcacctgaggtcaggagtttgagaccagcctggccaacatggtgaaaccctgtctctactaaaaatataaaaattagccgggcatggtggcgggtgcttgtaatcccagctactcaggaggctgaggcagtagaaccrtttgaacccatgaggtggaggttgcagtgagctgagatcgcaccactgcactccagcctgggcgacagagtgagaccctgtctcaaaaaaaaaaaaaaaagaaagaaaaagccctttgggaggccgaggcaggtggatcacgaggtcaggagatcgagaccatcctggctaacacggtgaaaccccgtctctactaaaaatacaaaaaaattagccgggtgtggtggcaggcgcctgtagtcccagctactcgggaggctgaggcaggagaatggcgtgaacctgggaggtggagcttgcagtgagtagagatcgcaccactgcactctagcctgggcaacagagtgagactgcatctcaaaaaaaaattagagggcagggaggcacatggcagtgtccagtgtggggtcagccccctaaagttctctcttaattcaggcctcccctcccctctcctcgagcactgccctcatctttgaactcatcactgttccccagtttctcccgtacatcccagtccagccccagcctctggagttatctttctacaccatggatctgatcacagtacacctgctttacggatgtccaagcctcctccatggtaaagtcctcccttcctaccccttactgaggctgctggggcttttctcaatttgagccccatctaccgccggcctcattggagccattctttgaacttcattcattcatttgtgtcttcaacacatgtttttatgttttttcaggacctaccctggctggtactgtgctgggagccgctggggaccccaggccctggccggtccaygcttctcagccaccctacacaggccacccatacgtgctcccttttagggcctgaaccttcaaagcctctgtgagatactccctggttctgcctttcagctatcactccctgctccgagctccacaccctttacaaatgttcattaaagttatctatatggtatgttaatccatttctgagaaaataattttcttggttccatttccgtcaacgtttgacagtcctcaaggccaccatactctctggaggtcttgcttcatcctcttattttgtacagaaggcttttgtttgggatgtctgctcacactcaaagacagagaggccttactgtctttatgtctgcagtcygtggagtgaatgaaggatgctcagggctgacaccagcatgaaatgtgatgggagaggttggggactgtgtgaatgtgaggaaagggagcccatctgcccccccaagtacaaccccaccagttgggcagagtgatccccccaccacccctgcattgctgtgaaatttagattgggcagggcccgtttgaccatctctctcaatctcaggctctccattttcaagtgagatgtaataatatgcgtcctgtttacctctcagcctgtgatgagaatctaatgattagggtgtgctagcacacaggcacctgtaaatcccattgaaatctgagggccctataactcctctagtgattcccaagcctcgtgcaccccaccctctctgttcatccttacttcccacgtgtcccgttagccctccggatgcagtcaggcccatttcccccaggacgcccggcactaagccgccccatccagctggggtctgaggggcctgtctcttgccccacgcctaaaagacctaaccctcctcctatcccttcgatacggcagtctttatttgctggagtctgcacaacatcactgcccaatgatgtgtctgcttccacgattcccaaagagactgagcttactgagaccagggcaaggaccgcgccagttcctcatcgcccccttcctctgccttcccctcccttccccctcaccgcagccatggcgcccagaccaagaaagcagagcagaggttccgcaattcttttctaagattgtctgactagagggttcaaagccctctaatccaaggccggcttgtgtctctagggaggttgcagaaaggcgccagaatgtggatggcgcggacaatgtgggatactggagtctcgactgccgcgcgccaaggaagggcgtcacctagccaagccggccctggagttgagtgccccgcagcccgccggtccacccgcccggccgcttgctggcaccctggtggccgcgccggctttgtgtcggcatcaggtgcaaacccccagagcgccgggcgtgcgcgcacgcgccccggagcgcgcggagcccattcgttgcccccaccgggatctcctctaggatctcctccggcgcccggggccggagagtgggggagggaggaggtcggacacgtagcctgcctcgcagcagggctcgactccacgcgggagggcgggggagccggggacccgccgctccagcccgctggccttcgaaagatcctcctgggccaatggcaggcggggcgacgcgaccggattggtgcaggcgctctgctgatcgctgtggaaactcgggcggcggggaacgcgggaggatgtggaacccgaggcggggggagccggaggggcgggcagaggaggtgtcgaggccctgagctyccggggagtttttactggaggcaaaagtccatagcgggagggctgagggaggggcggaggaaggggaccgcttgggggcactgggaagccagggatcctccgccaggaaggcagggacactcccgagcgcaggcgagaaggctgggggagggggcgcggtgggaggagtaggagaagacaaaagccgaaagcgaagagggcccgggctgcacacaccggctgggaggcagccgtctgtgcagcgagcagccggcgcggggaggccgcagtgcacggggcgtcacagtcggcaggcagcatggggaagggagggaaccagggcgagggggccgccgagcgcgaggtgtcggtgcccaccttcagctgggaggagattcagaagcataacctgcgcaccgacaggtggctggtcattgaccgcaaggtttacaacatcaccaaatggtccatccagcacccggggggccagcgggtcatcgggcactacgctggagaagatgcaacggtaagggtctgggggcgccccagccacccttctctgctgcaggcggagtcaggatccctggctccccgtgggccaaacagacctccggcgctgaatggagcttgggacgtcctgtagggaaggaaagtgcatctattgcactcgtaccccctccccaatcctcctcctcctctgggccgactggggtggagaccggatctgggacccggggaggcggcgctgcggtgaaagtcccagcggtggagaacagggcaagcatctaccgcgcgcgccgggacccacgcgtcctccccttcctcggggtttgtctggaggcagggactccccaagaggggcgctcgggccagacggctttggcgcccccagcggggaagatggccgcccctgcgcgccgctgaaaggagcgggagcgcaggcagccaggtgtgggactccgcgcttgtcccgcactctccatccagactgggtggcgagaaggaaagctcgtccccggccggagatcgctcctgctgggactcttgtctaagaagttcctcaatggccacctgggaaaaaccgcccagyagctcgggttcccacgctccagggattatctagactcaccccaagctcgagccggccttcttggggaccggcgtccgggattggtggaaggagaacggcctggggtttgcaaagcccaggtcgagtgaggccttgagccggtggatttagcagcactagactggcttggcaacaggtccgtctgcactcgaggttactctcgggcgttcaactcaatggctctctctttttaaatcctgccaagaacacccttccctcatcttgcactcctaaaggttgtgggcctctctggagccattgctgcccaccttacccccaccaaatgcgtggctcagtgattaccccgcaccagctacccgcaccggggaccccagtctgaaatcctggcatttatttaaggatgcagctggtatcccatggattcgaatgggccagaaggaaaagaacagaggcaaggagggaagaaagggcggcttttggtggtggtagtgaattggatgcagagaaaaaaggtctgatgggatacagaaattggggaaagtgaataggagagaggcagaaaggagggatgaacttgaygtagatcattccacctggaggtctaggatgcccaactgttggtgggcttttgctctctaagctgtgtaggcccgacccttaacttccccacctcttgcatctcatggagacaggcctaggggaaggccagaccaggccaccataacccaagctggacaatggacaggtggtgtgggccagcagggccagggcttatctaagattgggaaggtcagcgatactgaaattccctacagctttcagtcccatcctgttttacttgcttgtggacattgcttaagcccagtgggtttgtgatgctatttagaacttaggtgggtatgtttcacataccttcagtgctatctcacctggacctttacgcggcccagtgaggaggttgggttaatgtaactcctaagtaaaggaccttctggatcctggctgggatctttccactatatgttgctggacttgggctggtctgtttctgatttcataggtaaattgtagaaggttcctgtcctgtccaggccctcaccaaaaagtttccagaaggaaaagtcaaatacgatgaatttggtctgattattccacattgttaaacatattttcttatgtgaacgcttagtctggcaattgccttgacctttctggtttaattaccatatcagattgatttatttcttccttgttctggatgttctcagtgcttacctgaccttaacactgagttccctccaaaaatcagtgctcacatctctcctaacagaggactagratgacctactcttccctgaccttttctctgtctcataaaaatgtaatagtctcgtcatttctggtcctgctccagcgctttctgtataactttcatggactataaatctggtatcttggatgttggttgctttgttactttcataagctagggtgggagccaaccggggctgcaaacagatctagaattgaagaaagatgtcattactgggctcatccactaagtgttgtcacttgactgagccccatctcctcatctataaggtacacctgtacctgtttcaatgagactgatttgtggcaaagcacccagcaaytgtaaccactagatgaatgcaatggggtgttatcaggcaaacgggaataagaacaagtattatgaaacagctagaatggaaagtatgcaaagaggaatttgaagaaaaaatttaaatctatgctagctttatttggtgtagcaacacgtaaaagcaatccctgtccccagagcttcctgtcttctaaaataagacttttggggcatgaaatacacgaactggggatacagatttgaatgatggtgatgatggagtgagcagctgggttctctttgttttgttttgtttttttaaactgtccaggaccaggttggaaaaaggccttgagcagcgtggggtgggtggggcatgtggaaaggggacctaaagagagaagcaggaacaggctactgaaatccagagacccttgcctaggctgttgagcaagtggctttgccccttggggtgatggtttgtcccccagagcatggggagtgacaatttatggaccaggcacagtctggggagggactgatcagaagacagtttggattccctgcaacattcccaggcaatgttctgagcccatcacagtgcagtcattcctaacacaaggctggaaacaggtcggaagtcaaggtagccattcttgggacaatcctcgaagtcagggaagccattctcgggacaatcaggggcctcaatagggcattttcttttttttgaagagcaaaagatccaggtagtcaagatccatctccctagaaggatggggcaactgttacgtggtccttccacagaagctaaaccctgaccttgcctataataatgcaagttgcttgatttttgcaacttacaaaacacattcatatgtatcacttcatttcatactcggatcagccccgtaggcatctctcactgctctgaggtatcaaacctggcttaagtggcagtgctcagacttaaactcagaatctgacctcaagtcctcccctcccagcttccttcccttcctgttgctacctctgatctcttccctttggtactgcggtgcttctctcgccttttccttgctgtgggcaaaaggaaccctcacccgcgccctaagagcgtgtctgctcttttcacagcagtcccaccactgcagaactgttcatcttcagcgacaattcatcaaacattaattgagtgtctccatggctctgagctgggcccagacacagagatgaattattcacagacagagacctgaagctgtgggatgtgctccccctgctctctctcaagctggggcttggatctggaccctctgcctctagacatcagccccctacccctagcccttgtctcagcaactgttcctgcccggtctgcattggtgacctcttagaatcaagggaaggtgagaagagaccagaggtttgttccacctttcaacctgctcctatgttattcttgtgaaaacgcaacagatcgaaagtggaactctggcctcctttgcacggggcaggagggttgtagtatttagaggcaggagacctgggttccagccccagctttatgaattcccaggcctggagggcagctccatctccccagctgagatmtgggtgggagctgtccaatttctgtggctgtagcctcagcatccccaggaagcagttctgagatgaaagtggagaatggcatcaatttcttcatgcccaggttgcctttgtaggggcctgtctcctgtgcagccctgcctttctgccctcagggtagtgcatggaccctgtgttatgggggaggctctcactgcggggctctttggccacagagcactgccccaccagcctccattgcttctttccttggaggggacatggcataggggcttcctgccctgcctgcctctctstgctgcagaaaggaagtcagcatccctgtcttgctcttcatttccactggagaatgcgaggatccctcctgtgcatctccacactcttagatcacttgttccataaagttctggtccgcagggctgccacctactgcactgtgtgccctgtgcttgcccrtgctgcacttcccamatcctaggcaaagtgcccagttgtgcagcattcgatcagagattagccttgctccccagaggacatgggcacggccataaacaaatcctggcaccaggtgctcagtggatggcgagcaactgtgagttgtacccagagtggggcaggggcagggaaaatgtccctgtggagaagttgactggcatcagacctgggtgatggcagaagcaggaactggcaaagagcgaagtgtgacaagcgcttcagaatcagggtgttctgacctccccacctcacacacctgccctgccgaggcgggtgcatctctgctttctccacctgtttaccaatcctttctcttccccatgtcccgggtcctcttcctggaaagtctctggcttctctcccgttacactaggatagagcctggttccaattcttggtccaaagacaaagtttgggttggccctcccttgccttgaatcctggtctgccttatacctgccagatatttctgtaacccggcaggtgctggaaaccttctgccagcgtttgagacacatttatggcaatgtgaagggagagacacaaaatataatcaactctcagggaggaggacactcatgttgagggaagcctttgtatgaacagcgggcaatgctcaaggtagccacatgtgactcaaactctactcagctcattcccgagtgtgatagtgggcaggtggctctgccaacctacgcctgatttcttatctctaaaaaaggacctgcctcacgaagtttggtaaagatgcctggctgatgtatgcaagccactcccatggccccgtggctcgcctgcgtcacctcagcaggtggcagctgtagcaaccaccagcgtggggatgccggagaaggcttttggtgttccagaggcagaagccaagttgtgtgaaacgcggaagaggacaagtgtctggtcatgactgcacagtgggaaagtatgagatcagagtgtgtgcagctgtggggtcctgggtccatttattccctcgtgagccatcttattaggcccygttacaggcactgtgtttattgcagcgaacaagacaggtgcaggccttcccaactggggtttatgctccagcgggggacgcaggccataaacaagtgggtacgtcacgcagtctgatgacgaaccttgatgactgctatgaagatctaacagggcaatgacccagggaaggcccagggctgggagagctcttttggatgtgatgttgggaaaagcctcttggaggtgatgttgaggctgagtcccgaatggaggcagccctggtgtggaaaggagcgtggtatgttcaagggcggtccgcaccaggcctgctcggaaagctgccacactgaccatgggcaaggagctgatccaacagactgctcggttttctaaaacggcaggaagcgtgtggcacgtgagaaaagagtccttagaggcagatggacctggatttgatccyggctctgccacctggagcccaggactttgcttcctgagctcctgcatcttcayctcagaagttggggcttgaggcctaagggagtaacrtgagcaacactcctggctccctgcctggcgcatgcccattacccctgggctcagggaggtgaggctgcccgagagccctctggaaatggctgagsagcaaccaaggtcaaggcagggctcgtcatctgtctgctcccttggagttggaacctcgactgcagggttcgggtgytggggaggcagcaggagtggagatgagtctatttgcaagccattgagtcttgcctttcaatgagacaagaggaatccattagttatcagccactgcagctgcttctcaggaaactgccttaccagggacttcctgttcatttctcaaaggccgtggtgtgatgtgaggaggaccaatgaaggggctttttcaggcccagccctgggccctgactttggcagctcctccgggcctctcccagggccttgctcattttgcataggcggctgaggctctggtggggactgatcaccccacccagagccagcaaagctggtcaccactgcaaccctgggctcctccctgcccgcaccctgggcctcctccctgcctgcccccccaccccagccctcctccctgcctgcccccagggcctcctccctgcctccccagggacttctccctgcctccccagggccctggaatagcacgtctcttttccctgaaaatactcttgacctgatcctctgctaccatcccttttcggctcggctagtgggtcacaggcattttttaaraaaccgtgggcccagttttctcctgcacgaagtgttgctttgtcagtctgttctagacacaaatagaacaaagaccaagcaaaggacttgatgccagcaatgcagtaaggagatgatgggagactggcagttacccttgggagatccttacgtgtggggctgaaaagatttccaggagtggttagcactttctccaccttcccccgaccctttttttttttttttgagatggagtctcgctctgtcgccaggctggaatgcagtggcacgatctcagctcactgcaaccttccacctccctggctaaagcaattccctgcctcaacctcccaagtagctgggattacgggcgtgtgccaccacacctggctaatttttttttttttttttgtatttttagtagagacggggtttcaccatgttggccagtctgatctcaaacttctggcctcaggcaatccgccgcctcggcctcccaaagtgctgggattaccgcacccggccccctcttctttttaattttgaaattttcccaacatccttaaatgttgaaggaacaagcaaacacctgtgtatcytcaaccaagattcactagtcttaacattttgccacatttgcgtttttcctctttatatgtgtgcagttgccttttgaaaataagctgcgtcattgtgtgatcacatccctaaggtcttcawcatttccggagaaaaaaggaagagatgctctaacatcatcacagtacctttgtcacatttaagaaaattaatagtaattccttgatatgatcaaatatctggtccatattcattttttctcattcaactcccgaaaaacctggtataacttmttttttccttcaagtgagagcctgtcacattaaagaattgcaggatgttgttttgtttgtttgtttgtttgttttttgagtcaaagtctcactctgtcgcccaggctggagtgcagtggtgcaatcttggctcactgcaacctccacctcctggtttcaaaggattctcatgcctcagcctcctgagcagctgggattacaggcgtgcgccgctacacctggctaatttttgtattttcagtagaggtgggatttcaccatgttgcccaggccgatctcaaactcctaacttcaggtgatcgccctgcctcggcttcccaaagtgctgggattacaggcatgagccactgtgcccggcctgtttgttttttgagacagggtctcactctcttgcccaggctggagtgcagtggcaccatcattgcttattgtatcttcctgcctcagcctcccgagtaactggagttattggtgcaggccaccatgcctggctaattttgtttattcttagtagagacaggggtcttgctatgttactcaggctggtcttgaactcctggcctcaagtgatcctcctgcctctgcctcccaaagtgctgggattacaggcatgagcccctgcgaccagtcaagagttgcagtttttatatcattttagtctcttttaatctagaccatgcttccgtacttttgttttttccacaaacttgtatgtttttccccagctatattgatttttctgattgtttctcatggtggagtttgactggtttgccaatcctaccaatgtctggaagcttgatttgatgcagattacacagtgttcaccactgggacattctattgcatcccctcaggggagcctggtgctggctcatctctaatagaaatactagattttttatgagataattcatgtaatatgcataatatgtatagaaaaaagctggaaggaaaaatgctaaaatattagcaataatgaccactttctgggtgatatttattttcctctttattctgctgtgccttttctaacttggccaaaactcagcacgtttttactttataattgggaaaaaaagattaaaatgtgtatcattatagcagtgttagagtttggaaagtaatgaaaataaagcaaggcataatccagctaccttaacatgtgcaataatagcctagatcctcctaggctttttttcaggaacgctttttacataattctgtgtttatttttttatttacttcatcacagcacatttccagtgccawggtagtattcggtcttgtccttttcattgacmaccctggacatgtaggtgaggaactagtaagagatggtgggtggtgtggtttgtgcaccatgcaaggcactcagctcacgagcagtcgaggctcaagtcctccctgagccccgtgtctgcctggtgcgccttcctggagggtcaccatttccygacctgcccaaaggcagcctatgcatctattcacaaacccctggggagtgtagcatgcctgcaccagcacagaagcccaggtggctgttgccmttggcgttgggcactgagggctctgtcctggaaaaatgctggagacggcatttggggccagatcacaggagaccccgtttggtgtctgggtgcacacatggagctgttgctggtgagcactgtcctccttggggcccaagagcagacagagttcrggtcttagcctcatcactgccctctgctctccaggatgccttccgcgccttccaccctgacctggaattcgtgggcaagttcttgaaacccctgctgattggtgaactggccccggaggagcccagccaggaccacggcaagaacgtaagtctggcttgcaacctgggtgggggtggagacgaggctgggggtggctgggagtctgagagaggctccccttgccccatgaccagtaactggggctgaggcaggggtgcttttgtcctggaggagccactgtggwtcacctgtgttcagggagggcctcagagcctccctgggagccggggtttgacaacaactagtggcgtctcctctctcctggccagtttcattttccttctcctccatccctttycaggaaggtgccagatgacaatctaggggaaagacaggacagaaacaccgaaaaatgtcatttgatgacaagagtggctttggggtgtgtggtccggggcacctctttgagaaagaatgaccattccctggtcatctgttcattgtctgcaggtcagacgcccccctgggtgctgggcttccaggacagccatgtgtgaaaatagcaacccctgaggtctcatgggctgttgttttgttcaacaatgaagtctccatgtaaatggcggagccgtttatagaagaaagttgggacaggaggcaggggcagggcaggacggggaggagagttgttacaaggagaggagtggtacccacaggctgtgaccagggtggtcatggaagtcccaccctggcctcagcaagctcttcctcctcttgttgccagcctgggccagacccctctgtttagcagagccagggcaggaccagggtctctcccggcctggactcttggccagtcccccaccacccccattgcctctggctttcctgatgagctgcgggccaccctgcaggtccttcaaaggccaatgcccctcctctcaccttgccctccatggcacatgagatcacctgccctgtacccatgccagcccatgcttgtcccctcctgcctccttcgcaagtgggtccatctcccactctcacctccagcacctcctggcctgcggcttccccagctctgctcgtcctgccctgtagctcccttgtccatggccttgctccttggctctctccactgctctccctttctgctgcagatcctgcaccatttagcatccaagctcccaccaggcaccaccagaaccacccttcatagcaccttggtcatgccctgtgggtacygctcctctccttgtatccactctcctccccgtccggccctgcccctgcctcttgtcccaagttccttcttcctcgcaatgccattgtgttcccagggccctccttgactccgctttgcctccctggctccatgtgcccgggrctcacagccccctcctgcctgcctcagctcgccctcctgcrctagtttgtgtcgcccccaactcaacccctcaagacccaacagtgtgcgcagagcaagtggtgctctgtttggtggtggaaaatgcaagttttatttttcttttcttttctttctttctttttttttttgagatggagttttgctcttgttacccaggctggagtgcagtgacaccatctcggctcactgcaacctccgcctccaggttcaagcagttctcctgcctcagcctcccatgtagctgggattacaggtgcccatcatcatgcctggctaatttttgtatttttagtagagatggagtttcactatgttggccaggctggtctcgaactcctgacctcaggtgatctgcctgcctcggccacccaaagtgctgggattaaagttttcttttttaaaaaagtgtggtcaaccattttggtcatttgacgtgtacagttcagtggcatcaaataagcacatttacattgttatgtaaccrtcaccaccatccagttctcatcttccccaaattgaaattccacatccattaagcactcactcctcattctcccacctctcagcccctggcaggcaccattctactttctgtctctgaatttggcctctccaaggacctcctgtatatggaatcatacaatatttgtcctttggtgactggcctgtttcccttagcatgatgtcttcaaagttcactcacattgtagcatgtgtcagaatttcctcccttttcaaggctgagtaatattccattgcatggatagaccacgtgttgctgatccattcatccatcacgagatctttgtgttgtttctacctttttcctgatgtgaatagagctatgaacacagggtgtataaaatgcaagcttttgagtcaaagcctttctctgtcactcttacctagctgtgacaaatatacaggccccagggctgtgtggggcatgtggtaacagcagctattgtagggactcctggagggtcgaggcttgtggcttggccccctcttgccacagcttctctgggttgtgcattggctgttgaaatggcagctcgagacatatgttccctcyagagtggctggtggctgactcctttccctgtgctcttggtcaacagtcaaagatcactgaggacttccgggccctgaggaagacggctgaggacatgaacctgttcaagaccaaccacgtgttcttcctcctcctcctggcccacatcatcgccctggagagcattgcatggttcactgtcttttactttggcaatggctggattcctaccctcatcacggcctttgtccttgctacctctcaggtgaggcgtgacaccctcacttcccctagctgacagaggcctggtgcctgtttgctgaggctgtgacagcacgtgtgaccctctctccccaggcccaagctggatggctgcaacatgattatggccacctgtctgtctacagaaaacccaagtggaaccaccttgtccacaaattcgtcattggccacttaaaggtaagtgtcagcagccctgggcatctgtcctgttggacagcagttgagacagagggaccaggattcctctctgctcagtgctctgaggctacagggtgacaaggcaggtgtgcctatgctgagggccmtggtgactctccattctgctgacttcctgagcccygtctctggatcaggtccgaaccacaaagccatggtgtactactcattatgaagacaggcacacacctttcttgtcttttggctcagcggattgtattttttgatgttccttagctaaggactcatctaacaaatctgtttttgtttggggacagtaaagtagcagtatttttttttttttttgagacagagtcctgctcttgtcacccaagctggaagcaatggtgtgatcttgggtcactgcaacctccacctccgggttcaagcaattctcctgcctcagcctcccgagtagctgggattacaggcactcgccaccatgcctgactaatttttgtatttttagtagagatggggttttgctatgttggtcaggccggtatcaaacttctgaccttgtgatctacctgccttggcctcccaaagtgctgggattacaggtgtgagccaccgcatccggcctgtagcatcttttttgatgagttggtatgcttcctttcactggggatgtgagctctttaatacgttgtgctgggtgtggtggcatgcacctgtaatcccagccacctgggaggctgaggcaggagaattgcttgagcccaggagttcgagaccagcctgggcaacatagtgagaccccccccmatctctcmaaaaaaaaaaagaaaaagaaacacattgtgctcctctcttcccctcagaagccaagaggtacaaagcagcatttgaaacagcaactatctttagtctgtgtttttggtgcccccattctctccttcctcatctggcatttatgcttttatctttattttagccttccgttatatatgagtcttttatctcaagccacttcaaatactctttggaaataagcggggtacaaaaagtaaaagtcatcctataaggcctcagataggggacaccaaactacggaatgatcagctggcccaaaggacaaaagtcattagaagtgcaggagttaaggaagttccactctcacctccccctagataaggaagcagaccacagagtctcagcatgtttgtagaaagacaagctggaattgccaactgccttgttctgatctgacaggcgttatctcctcagttttgaaaatgagtctttgccaacttgctctctgaaatagactatccccatcccagcctgacccaacagtacctgcttcctgagaaaagctgggtcctaaagaatccatccctccacaccctggcaagggacgagctacatgtggggtgtagcttatcccctcttccacccagaccgcaacggggcccttggcttgccggctgcagatctcactggtggccaaccacccctgagctggtcaccagtttcgcagcgagcagcttgcctggccctgagcctgaagyggcctgagaacctggtctctgtccagaatctcaggggcaaagggagagggtgcacatagtggagtgctttgtttcattttatactcttctctgttggatcaaaccctcctcagtatggcaaagtaacatttaactcctgacccatgttagcccccacacacttaacaaagatgggctgtgtcctgcttccagattctgggcaggggccgggcaggggggattgttcctgtccaattgccctcagtctttgaggggccccagagcacggctgttgcgtcaggcgggagacggggccaggacagaggactggtctccatgtagaacgtggatgacagcaaacagggtccttgggcttggggatgtgggctccactcatggcccaccagcccccactggctgtgtccttggtgctgtgtcacagagacaggccaaggacatggacatgtggctcactcaggggtgccccagagcacggaggtcaagcttgcctgaaattggctctagcactcggcaggtgcacagccatggggacaaatcttgtaggtctgtgtctcttcccatcactgggaaaaaggggactggctacagggaggtcctcaagggcctcgccaactcagatgtcttagcacaggctggaaagacctgtgagtaggttaccaggtgctgtgagaggctgggacccccttcttcctgttggctgcactgctaatgggatttaatgggagttcttcacatcctgacctgtttgccttcagcccgtgtcatgcccagtggacatttcttccaaagtgtgatcttttacaaagacgattctgaggttaaaactctttcgtagttcagcactgtacttaggatgaaatgcaaacttcagccaggcacagtggctcacgcctataacctcagcgctttgggaggtcaaggcaggaggattgcttgaagccaagagtttgagaccagcctgggccacatagcaagaccctgtctctactaaaaataaaaraattagccggggatggtggtgcatgcttgtagtcccagctactggggaggctgaggccggaggatggcttgagcctgggatttgaaggctgcggtgagctgtgatggtgccactacattccagcatgggtgacagagtgagacactgtctctaaataaataaatgcaagctgaaaggcccagtgccatctgggcgctgcatctggaaatggacatcaccagactttctgcagcctcatctcaggccaccagggctgggattagggtgaaacaagtaaggcactcgcttagggtataaaatctaaggggacaccagacaaawtctaaggggacaccagacaaattcagttatcaagataaatgatgttttaatgcaatgtggttttgttttgttttttgagatggagtttcactcttgtcgcccaggctggagtgcaatggcgtgatctcaactcactgaaacctccgtctcccgggttcaagcgattctcctgcctcagcctcccgagtagctgggattacaggtgtgcgccactatgcccagctaatttttttgtatttttagtagagatggggtttctccatgttgtccaggctggtcttgaactcctgacctaaggtgatccacctgccttggcctcccaaagtgctgagattacaggcatgagccaccacgcccggcctgcaatatgtttttaaaaaaatcaaaattaatgcaaaaaaatccacaatgaacaaaatatcaaaattttaaataaagatcaggatgaactgagggaaatggaaaaacatgcaaccctctaaacatgttcgtgtgtcattttttaatggttgattttttttccagaggattaaagtarwtaaaaaaatatttaacaatgaagaagttgatgtattaaaagtcataacattctaagtgtaaatgctttatttataccaaaacaraacttattatacttttgcttcagttgaatgtaattagaaattagttaagaccgggcgaggtggcttggccgggtgtggtggctcatgcctgtaatcccagcactttgggagggtgacgcaggtagatcacttaaggtcaggagttcaagaccagcctggccaacatggtgaaaccctgtctctactaaaaaaacaaaaattagccaggcgagggtgctcgggaggctaagacaggagaatcacttgaaccagggaggtggaggttgcagtgagccgagatcgtgccacagccctccagcctgggtgacagagtgaggctccatctcaaaaataaaaaataaacataaaaattatttaagctaatcgcttggttgacagaaaccatcaaactcagcaattctttccattgaaaatgaaatgaggccaggcgcggtggctcacgcctgtaatcccagcactttgggaggttgaggagggcagatcacaaggtcagaagatcgagaccatcctggctaacacggtgaaaccccatctccactaaaaatacaaaaaattagccgggcgtggtggcacacgcctgcagtcccagctgctcgggaggctgagacaggagaatcacttgaacccgggaggtagaggttgcagtgagccgagactgcatcactgccctccagcctgggcgacagaggaagactccgtctcaaaaaaaaaaaagaaaraagaaaaaagaaagaaaatgaaatgaggcaaaaagtaggctttgaaaatgttatcgatgagtttgtttccattaaagccagaagtgcacttttttttttttttttttttttttttttttgcctcaggctctgatatggcgccaccsagcactgctggtcacagttataccgaggagctttcctctggcttctggagcactctacactcccccttcctctcccagggcctcccgtaggctcttgcctctgtcaggaaagcacccctcactctgcctggccaacttctccagctgcgtggacacttagctttcctggccccagctcagtttgggtttggtgtgatgaggccagaccctccctcgcagctccgtgaggacaagggctttgtctcttggttcacctcccaggcagagcayggcagctggcttagggtaggcaacatctgcaccacattctgggaacacggagctggccattgttcctgggcaaggcgggcttcccggtgcccggaaggaggggctcttgaaggacaagcagggcttcacctggcaaagaagaatggaagagaggcccggtgcggtgggttatgcctgtaatcccagcactttgggaggcggaggtgggcggatcacctgggttcaggagtttgagaccagcctggccaacatggtgaaaccccatctctactgaaaatataaaaattagccgggcatggtggcgggcgcctataatctcagctactcggaaggctgaggtaggagaacctgggaggcggaggttgcagtgagctgagattgcaccactgcactccagcctgggcgacaagagcaaaactctgtctcaaaaaaaaaaaaaaaaaaaawggaagagaatcacagcagaggaagtagcatgaacaaaaaatgctttcattacatctcatcccgagtccagggagaaccgggactgcccacctcactgcctccttgttgtcagcccgtcttgctttcctccatctgtttgttcaawaaacatctctgggttggtatcctccaaacatcacgcttacttgtttcatgccttgctcctcagtttctttgtgccagagatttttccatttgattcttcccaggaattttgttccttttgacaacaaacgcaaatgtgtcatttgattcctcsagcctctaagctttctttctttcttttcttttttttttttttttttgagacagactcttgctctgttgctcaggctaaagtgaagttggtatgatctkggcctcctgggttcacaggattctcctgcctcagactcctgagtagttgggattacaggtgcccgccaccaygcccagataatttttgtagttttagtagagacggggtttctccgtgttggccaggctggccttgaacgcctgacctcaagtgatccacacgcttcagcctcccaaagtgaagcctctgagctttcactctctgactttttttttttttttytctctctctctctctctcatgggttttgaggcctgccagtttccagggccctgaggttactgcaaaggccacagctgtccgttgctgttcccacccatggctattagtgtccatagactgtgtgtgccaaaagcatctcccaagtaaaatgtttgtttagcaaataggcattttttgcaaacccttagccaaagcattgatccggcaacagttcaccaggatagtcgtgatgccaaagggtcaggaaagtgtgttttctttcatctgtcgctgggcaactgtcgagggccataactctgagctgaggagacggacacctgtggcctcaaaagaaatatccatgttatgtgtcttgtctcatgggatcctatttgagtgttagaaacaggaaagttcttcttgttcatgttagcagttgtttgttgagccctccctccagccttcctggtgtgacacgaatctcaggacccaccctcagcatagcagcacaactgcgctctccaaatcgtttattgagatacagttctcactttttttttttttaaacagagtcttgctctgtctcccaggctggagtgcagtggtgtgatctctgcctcccgggttcaagtgattttcctgcctcagcctcccgagtagctgggattacaggcgcccacaaccacgcccggctaatttttgtatttttagtagaggcggggtttcaccatgttgcccaggctggtctcaaactcctgacctcaagtgatccacccgcttctgtctcccaaagtgctggaattacaggtgtgagccaccacgcccagccagttttcccatttaaagtagacaaatcaatgacttttggtatattcacagatttatgcaaccatcatcatagtcgattttagagcatcttcatgatgctcaaaagaaaccccacgtttcttagccatcacatcccaaccccctcactccctcccctaccccaatcctagccctacacaactgctcagctttctgtctctatagatttccctattctgggcgtttcatgtcggtggaatcatgtgatatgtggtcttttgtggctccttccttcccttagcatgttctccaggctcatccgtgttgtagcaagggtcagtgattcgttctgttttacggcacagccaaatgatattccactgtgtggataatctgcatttcattcacccactcatctgttgatgaacatttgtgttgcttttgctcttctggttcttttgaagaatgctgctgtgaacactgctctatgagttggtgtgtggacatgttttcatttctcttggatatacgctcaggagggagatttctgggccacatagtagggaccacttctcactgtccctgaaacctcggctttaccttgcacagctctggttccacacctggtgacggagaggcagagactggctgccacacctgctggagcgctcaccgtgtggtccctcagcagcacgcctcatctgccaccatcgtcttatgatcagggaaactgaagcctagagagataaagtgacttcactccatctggggctggcgcatgctctgagctcagtcatggcagggctggattctggccttgtgggggcctgaagtgctatccccgagggttgaaggttcygggaactgctcctaagaagggcctgttacaagcgagctcggttccctggtggcttgcatggctcatccccacccctctctccccacagggtgcctctgccaactggtggaatcatcgccacttccagcaccacgccaagcctaacatcttccacaaggatcccgatgtgaacatgctgcacgtgtttgttctgggcgaatggcagcccatcgaggtacgactaagaggatggtgttgacctaggaagtgtttgtcctgggsgaatggcagaccatcgaggtacaactaaggagatggtgttgacctaggaagtgtttggcctgggcgaatggcagccatcgaggtacgactaaggggttgrtgttgacctaggaagtgtttggcctgagcagggagcagggaaggaagcctagagagctgacattcagccaggcaggtccacatctcctgctacacagatacctctcctrggtaccctgaattgttctggctggaatgtatgtggaatggcctcacctgtaaatacagacacagctcctcattagaatggtagatgtctccctcctacccttaggccaggaagggcattttctggcttgttttttcccagggtagagggaaatcttgttccagttcagcaggaaggcaagatttcaggggctcaagcttggtcgccaaccgactagctcatgttgagaaaaccttatttggagaatcatcatcctgtacactgggaggagcctcaacgtggcttggtccaatctgcttcaccagtggataagaaattgaaggtcagcgagaggatggaacacgttcagggtcacataatttatttagttttttttctgagacggagtcttgctctgttgcccagagctggagtgcagtggcacaatcttggctcactgcaacctccgcctcctgggttcaagcaattctcctgcctccgcctcccacgtagctgggattacaggcatgtgccaccatgccaactaatttttgtatttttagtagagacagggtttcaccatggccaggctggtctcaaactcctgacctcatgatctgcctgcctcggcttcccaaagtgctggtattacaggcatgagccaacgtgcccagccgagagagtcacgtaatttagtggccagtctagggtgaggccccagacctttggactgctaggccattgccttccatttactataccattttattttcatattagttcattttattactacaaatatagaacacacttggtataaacttctaaacagtacagaaatatccagaattaaaacacgagtctcagcctgggcaatatagcaagaccctgtctctaaaaaaatacatatttttttagttagccaggcatggtagcacgtgcctagtctcagttattggggaggctgaggtgggtggatcccttgasctgagcccaggaggttgaggctacagtgagctatgatcacaccactgcactccagcctgggtaacagagcaaagctatgtctcaaaaaagaaaaaaaaagtgagtctctcaaacctcccctttgccccaaattttatgcccttgagggtaaccactgttaacaagatgctatacagtcttctagatatttttatatgtgtataaacatgcatatatctgtttctttacaaacaaaaattttaggccagctgtggtggctcacacctgtaatcccagcgctttgggaggctgaagtgggagaagtgcttgagcccaggagttcaagaccagcctgggctacatagtgagaccccatctctgcgaaaaatacaaaagattagccaggtgtagtggtgtgcgtctgtggtcccaggtgcaggggaggctgaggtgggggaatcacttgagcctgggagcctcaaggctgcaatgagctatgattgcaccactgcactccagcggggacagaagagggagactctgtctcaaaaataaaaaaataaaaaacaaaaaaattctaccttgtatcctgcaacttgccacctctgcgaatgtggatgcccttcccccccagttcatgtagacaggtctcgtctccctctagccatatggtattctgttgtacttctgaaccataacaggacctacattattttatawggtagacaaattgagtgtcagtagttcataatttctttcttttcttttcttttcttttttttttgagacagagtcttactctcttgcccagtctagagtgcagtggcacgatcttggctcactgcaacctccacctcccaggttcaagtgattctcctgcctcagcctcccgagtagatgggattacaggtgcacaccaccacgcctggctaattttctcatttttagtagagacggggtttcaccatgttggccaggctggtcttgaactcctgacttcgtgatccgcccacctcgccctcccaaagtgctgggattacgggtgtaagccaccgygcctggcccataatttcttttgaataaaagccccaccaatgcgttccacaaaaaaatgttcttatttaatacattctttttttttatgtagagcctctatgtcgggacctaatttagaagaaaaaaataaatatatgcgctgctttttggaaatacattaatgattaaaatgaaagtttagaagatccttgttgcttttatgcagatcttaggagccacaaagccatgcatagagtagggttcaatcagcatctgccaagtgaggccaattttccctcactaaggagtggcaccgtgagtgaagtagtattcccgacagccttggcgcctaaggcttggaacaaggcgaggagacagcctggctccccagttctggtttgtacaccctcttcttatttcatttccacccgtgagactatctgagcaggaacgtggatttttctgtaacatggccaattcgcaggaaatcagccacagttctgtactttggaagcctctctaagctgccagggattccattttctgccaaagtacaggctattgttattcttctaggaaacagtttgccagctttaattagaggtgtctagaaaacrgaactgatgaacttgaggccctctgataagtggggacaaaggcttcattttctcggcgaggctttgtaatgtagagccgttggctgtcctgacagatgttctctgtgtctccaacaaagaaagtctagtcccaccagctgcactggcaagaaggcgtctttcttgtgcgtggtggccagagaagcctctcctttcccgacatcttctcacccccgacacttcyggaacgctggctttggggcaggagataggggtgggaggctgtgaggatctggttgttcagttaccagcggcgtttggaagtccccagccagtgccgcggtgttctgtggaaatccccgctctcacactcatggggaaaggattggtgcttcctgggttcctggtgttttgacctgtgctctggctctcgcaggacccggccgccctggaaggaaccctggtctcttgactgaagtgacagtgggtctgatgggacttgtcacatgccagtcccacacaccacagcagggccaggtggggcggccaggtcccagggcctcaagccaccatcccagtctccagagcaaggaygccggccagggcttctatctctggggacagataagcaaagcagccctgccaagcggctcccagcacgtggaactgtgaatagcgcgggctccgcagtaaagcccttttcctcrttttctgcattttggtcttattgatgctgtccaggaggattctttttgtcatatgtagcaaagtatattcactttacccagagattcatttcttgtgtgcttagaaagttcttcatacatattattttcagttctttaaggttttgtgtttcaatctttaacttctgccaaatgggatatgggtaggatgatgttcggccttcacttttctccagagtcggccagttttcccggcacccccatgaggtggcattgcttcttcatatgaggcagtgagtgctcctgagcccgggcttggcctgggctgggctgtctgtcctctcccaggccaccgtctggatgacttgggggccacactcacactcattcatccttggcacttaactcattggaagctcgtagtggggtgcctttccccttctctttctctctctttttgtttttgtttttgtttttgagacaaggtcatgctctgtcaccttggctagagcgtagtggcgcaatctcggttcactgcagcctcaacctcctgggmtcaagccatcgttctgcctcagcctcccgagtagctgggactacaggcacccgccaccatgccyggctaattcttgtatttttagtagagatggggtttcaccatgttggccaggctggtctcgaactcctgacctcaagtgatccgcctacctcagcttcccaaagtgctgggattacaggcatgagccactgtgcccggccaaggtctgtacttctttatatgtctcatggatgtttcttttaaaacgcaatccttatatgttttatattttgtcattatgattggaggttctccagtactcgggaaagcagtggatattggggtagttatcttaattttcttttttttctaaatttttgtttgcatggccttccaatgaatgggatagttatcttttgtcccgctagtgtccacttacgtctcttcgtaattctagttgtgtttcggttgattcttttgagtttcctgggtagatgatcatatcctagaaaataatgaaaacgtagtctctcggcccagcgtggtggctcacatctgtaatcccagcactttgggaggccgaggctggcggatcacgaggtcaggagatcgagaccatcttggctaacacaatgaaaccaccgtctctactaaaaatacaaaaaattagctgggcatggtggcacacgcctgtagtctcggctactctggaggctgaggcaagagaatcgcttgaacctgggaggcggaggttgcagtgagctgagatagcaccactgcactccagcctgggcgacagagtgagactccgtctcaaaacaacaacaacaacaacaacaacaaaacaaaacaaaacaaacagaaaaaaagtgtagtcactctttctttcttctctttctttctttctytctctctytctttcyctccctccctccctyccctccctccctcccttccttccttccttccttccttccttccttccttcctttccttctttctttctaatctggatgttgaagtagtctctttctttctaatagctccactctgttttctgctttgggttttattgcattgacgggaaatttcagagctgagtttaatagcggtgatattggcagcagccttgttttgttcttcttttgccatatccccgttttctgagggggctggtgagaccattatcccggtagcagtgtaaaggggcctcagaagccgtgcsgtgcctgagatcctcctcctcctcccatccgggaaaccacctctgctgctctgactgtctgaagctaacctcctgggcttcctgcttgaggcagaccttcatgaacaggcttaagccacccatcccgccttgggacacacatgccgccctctcrgggaccttggactgggaccttgccattctgctcctgctggggaggtcgtgccgcctgtttctctctgtgtgtgagtttgcaggttcccagaggcagagactgggctttgcgacagctcccctcccccaaccctcgatggacaaggagggcccttgtcattcctcagacattttgttccaaagctgaaaggtcccctccacatggcccggcatcccccaggccctcatccaagcctggccttgaggtgcatggagaggccgaggacaggagagtcagccccgccgccagggctggctgcactccctcccttgcccctggcctgcgtctctgcctgtcaaccgcagcctgggaaggcactgttsctgatcagggggaggtccatgtgtgccacccacacccttggccgcagcccagccaggtgaaagtcatgtgtcttccttgcctcttgggctttctctgtgtgtgtgacggggactcctctggaggaggagatgtgtggggtcctccactccccacacttggggctctgagcccccagttgggaagaagcctgactcttgttgagtgagtctgtggaccgggcactgtgatgggcagtgtgcgtgcacaacgtcacttaatccttgcttaacccgtgaggcgggagctgtcatcgacccatttcatggatggaacagctaaggccaagagacatgaagtgacttgttcaaggtaacagcaaggaaaaggcaacaccactgtccgaacccaaaccatctggctgcaaaccacagcttcggagtcctgggggcccttgtgaaatatgtttgttgggtagccccagctttctgatcaattaaacagccaggcactcacccccctagcttgctacattctaaaatacctctccctcccttccctggtcccatgacttaaacggcaaagctctggcaaagaactgagcgtgggaaagatgagagcagagagttagccacagggcagggcttcgtatcccaaacccacagttgtactttctggtttgggaggggagtaytggccatcccccagcagagccgctgcagctgaggccatcgagatgggcacagatgtgtagtggtatgtcaccatacgcatgtacatacacgtgcgtgactgtgatgagcattttgctcaccgtcccacagaggcccactctgaggcctgctgctgcctggcaagcaggaccccctggctcccgagggtcattctggggcattgaagggacgcacactaaagccagcagtgcttaccagcagaggcagcccctgtaacctgtgttgtccacccacaggccaccatcacccatgagaacagggtgcctactgtgcacatgcagctccaaacagactccccaggtgcctcccaggcccccacaacagcgtggccagccctcagtccctccataggatgccctggcccctgctgacctgcctgggttgccctctgtgctcacttccgagtacagccggcccagcccgagagggatgggatgctctgtgggacagagatgcggtggggaggagctcttgagcagagctggagacactgcatgccaaggctggggctatgagcctgctccctggcctctgggagaagcttagagcaggactcaggggcctgttctgtgggccactgcaggccccgagactggccacctcgagagcaacgtctgcagtgctggctcctccagcamctccgtccactggagactcatgaaaggctcctgtgaggcctccctggctcggacctctccatggccggcctcagccctggccttaataatagtcttcctgcaagtggccgtcctttctgggaatgagtgagatccttgccaaggctcaggaggccacacagaacaaagggactgtttctgggggttcttcagctggttgtgccgtgaccatggccattggcgccaagatgcaagycttggggacagggtggacctggttcccacccacagcctcttccctcaggaatccatgctctccctgtgatttggacaatcattttactcacctggatgagaggggcactggcctaggcatcatccaaggtcccttccctctgtaactcactttgacctcctgactgcaataagtatgactggacactataggaggaggcatctctggccttcggatccaggggtatagggagggtgacgggcagtgtcctggggtcagcacttggcattatgcccatgttctcattggctcctcttaccaaccactgattcaaatgccagacaaggctcagcaaggctaagcgactcacatagtctcagcactggtgagaggcagagtcggctcaagcgcatctgctggctgcaagcccagcctccccacactgcaagggagaggagcaggtgtcactcagtgagcggcatcttttggtctcagtcctggaagtgcagggtgggctggtccctaggggctggaccatggaattaagggctccagggatcccctggggccgtggttcctatgcctggcattggacaatgacgatgcccaggacccagcccagccctcctccattagagcctctgggcatcaggctgcccaaggtgcaggctctratggggaagaaaccggtgccgtcatggggacctcaggtagccagatgtggcctgaggagtctgtgctgtggcctcctctgtcctcaaggttaggctccagctggggaggagtgattcactcttgtaaattacagggaggctccagggaggcagatgctcccagcctgatgactggcagcaattctggggcccttacctaggttctccctgccactgcgggctccgggagctctccatggtgacctaggaactcccctgggtgcttatgctccgccgagagttgctctgttgcacattcattcaacaaacatttgtttagtgcctgtcacatgggctcagagtcagctttttgggttctgatcccagtcagggccacttcctgtggccytgggccatggcttaacgctgagcctcagcctcagaagtgccggccttgtagaggatcgatgccatcgggccagtgctcggctagggctgaggaagcgttggccgctgctggctgtagcatggggagcccagagggctggaggggccccaggcttggtgggcccagggtgcagattgacaggaaagggacagtggtgtgccctgagcagatagaagggatggtggctgcaggaygggttggggaacatgggaggctgggagctgaggctmctgggtgctcatgatctctcctctctcctcagtacggcaagaagaagctgaaatacctgccctacaatcaccagcacgaatacttcttcctgagtgagtgctcggcgccccgaaatcactctgggaccctcccctccccccagagtggcgtgtctctccctcctacctgacatctttttcagatccagaaagtgacactaaacttgttagaagcgggggccacagcagccttgctgtgcagacccctcagcctgygttacaggcctgatggggacacagaggctcagagagtcccaggggtgacacacgtcctcaagggctcccagccttctctgcaggccccggggtccctggctgcttctgcccacgtctgcagggctggcccctgcactcartgctgggcctgggttcccctgaccttccggcacaggcagsgtggaatggatgcctctaagcgcctgtctctctcctgcagttgggccgccgctgctcatccccatgtatttccagtaccagatcatcatgaccatgatcgtccataaraactgggtggtgagttggggacacagctggcttggcatggggaggagggtgactgggacagggggacccgggggtcctacgctgcctcctcgtgtgccccagtggagcctgtggggccccakgcatctcctccctggggtagctgcctctcaggaaaggactccctctggggccaccaggacctagtcctaaagatctctactctccctcagacatagggagtccactggggcagcccctgcttttgcagagcccccgagaaagttctcaaaggcagcaggatgagaggcaagtgtggccatctcccttccccgctccctgtgggccctgagtcccatgaactgggttgccccacaccctggtttgaagttggagcagctgggcgttggctgagatgacaggtgtggtcgtttgcgaagaccgtatgacaaagcaccacgaactgagtggcataagcagcagcgatgtgttttctcccggttctggagaccggaagtccaaaactgaggtgttagcagggtggattccttagggctctggaaggctctgttctgggcctctcatcggctggttgatggctttcgtcctccctctcggtacatcatctctctgcatatttgtatctgtatctgtgtccaaatatccctctttaaaaaaattattttgtttatttgtttatttattgagacagagtcacataggctggagtgcagtggtgtgatctcgactcactgcaacctctacctcctgggtgcaagcaattcttgtgactcagcctcccaagtacctgggattacaggcaccggccaccatgcccagctaatttttgtatttttagtagagatggggtttttccatgttggcgaggctggtctcraactccwggcctcaagtgatctgcccgcctcagcctcacaaagtgctgagattacaggcatgagccaccacgcctggcctattttttaattttctttttttcttcaccaaaagtggattcttgaaaatttttccttttttttaaaatagggacattggtcatattgcattagggcccattgtaattacgtcatcttttttttttgagatggtgtttcgctctgtcgcccaggctggagtgcagtggtgcgatctcggctcactgcaacctccgcctcctgggttcaagcrattctcctgcctcaacctcctgagtagctgggagtacaggcgccrgccaccatgcctggctaatttttgtatttttagtagtgatggggtttcaccatgttggccaggstggtctcgaactcttgactcgtgatccacccgccttggcctcccaaagtgctgggattacaggcgtgagccactgcacccggcagataaattgtttatctgaaaattatcaaagactaaattgtcactttctgaaatgcttgcttaaaatccagtctttctcagcagtctatttgtccctcatgctccaaccaatagccatggggaagtttttcctctcttaaccaaatgtggacttgtttattgattactgttttttgtttgtttgtttgtttttgaggtggagtttcgctcttgttgcccaggctggagtacaatggcgtgatctcggctcaccgaaacctctgcctcctgggttcgagtaattctcctgcctcagcctccgaagtagctgggattacaggcatgcgccaccatgcccagctaattttgtatttttagcagagacagggtttcaccatgttggtcaggctggtctcaaactcccaacctgaggtgatctgcccacctcagcctcccaaagtgctgggattacaggcgtgagccaccgcgcccggcctgttgattactgttttatcgcttgctaactgaagttgtccttttcaccctgactgtgaatttaagagcagccaagtcaaattttatctccaaktcttggacccatatatccaatctaactccatttggaggtgtcccagccattkcaaatccaacatattcaatgtaagtcctctcctcttctcccacaacctaatcctgatggtctccatgttaatgaatggctccatcatccacccagtggctcaagttagagactagcaccattatgttttttccctccttatacatgttacaccctctccttgcctctagcatccaatcccgttctaactcataagtggcctattgccgggcgcagtcactcatgcttgttatcccagcactttgagaggccgaggcgggcagatcatgaggtcaggagttcgagaccagcctggccagcatggtgaaaccccgtctctactaaaaatacaaaaaattagcctggcatsgtggtgtgcacctgtagtcccagctactcaggaggctgaggcaggagaattgcttgaacccgggaggcggagcttgcagtgagcaacttctttttttttgtttgtttttgactgtgcttgttccctaaggaacaaagtattaaacaggaaaagaaatcaccctrtgttcctaaaaggggatggcagagtggggacaatgtgatgagcccatggggctttcagagccaggagcgcacctatgacctggggcactggttctcaggggagctgttctgccctttggcagtatccggagacacttttaattgtcacaacttcaggagaggagggtgctactggcatctggtgggcgtctagccaggatggtgcttagcaccctgccatgccctggagaaccgcccatgacaacaagcagcctgtcccaggtgccaatagtgtggaggttgggggaccctggcttagaggaaagaggtgacaaaccctaagatctytgaaggaggcttcccggggagrtttacatgctctggcaaggttccctgttcccggggccacgtcctggaycctgagatgctcccacgcttcaccctcctggaattttgctgtatctgacaccactggccactccctcttgcagttcttcctgttggcttccaggtccccacctctgctggcttcttcccaaccccctcgctccgcctctttggctgcttctgatctcttgggctctctgcccctgaaaccagcgatctctgtgtatgtgttgctctctacactcaaaagaagtccaggccaggcatggtggctcacgcctgtgatctcagcactttgggaggctgaggtgggagggatcacctgaagccaggagttttgagaccagcctgagcaacatgggcgaaaccctgtctctacaaaaagctgggcgtggtgatgcgcgcctgtaatctasctactttggaggctgaggtaggaggatggcttgagcccaggagtttgaggctgcagtgagctgtgatcacaccactgcactcaagcctgggcaacagagtgagaccctgtctcttaaaaataaaagttgggccagggcaatggttcacacctgtaatcctagtactttgggaggccaaggctggaggatcacttgagcacaggcattcgagaccagcctgggcaartaagtgagacccccccatctctataaaaacttaaaaaaaattatccaggtaaggccagacacagtggctcatgcctgtaataccagcactttgggagcctgaggcaggcggatcacaaggtcaggagatcgagaccatcctggcgaacacggtgaaaccccatctccactaaaaatacaaaaaattatccgggcgtggtggcgggcacctgtagacccagctacttgggaggctgaggcaggagaatggtatgaacccaggaggtggagcttgcagtgagccaagatcacaccactgcactctagcctgggcgacagagcgagactccctctcaaaaaaaaaaaaaaaaaaaaaaaaaaaaaaaaaaaaaaaaaaacagaaattagctactcgggaggctgaggtagaagtatggcttgagcctgggacagagtcatgatcacaccattgcactccagcctgggcaataaagcaagatcccatctccaaaaaaaaataatccgtaaccccatcctcatttkgtttccatatatgtgtagatacactgcacactattgcaccacacacacagaatagaaggaatgtgatggaaagtgggagcagaactggctacatctgcctccctcctcaccttgaaggccaccttattggaacrtgaggtcctgccctcggccaatgttggccccaaggccatctccrgcctctcctgagcgctcccttcctcctttcctgttcagctgctggcacccgacccctgatcacctaggaccagcctagattccccacagccaagcaggcacaaatgcagccaccgttgcctctgacagttctggaatctgtcacctccttgtcagygccgtgggttctggtttaggcctctgtcatttcatgtctgagccgctggaataacttcctagtctccccctctccagtgggtggggatctattttaagacacaaatgtgaccttgttcttcagtcgtttgaagtgagacagggcagtcccttggcctcaccttccacctcggacacctgtgctgagcctgtggcatgtcaccatacctaaactcatggcaggatgagcgccctggcagtgggaacaggccatgyagaggccccggggagggagtaagctaggtcagggggctgagtaaagacaggttcttaaccccatgaggctccgtgggtgactgggtgggrtgggggctttagcaggggagagttgggacctgcttggagcgaaggccactctggttgccatggccacgaggacaagcaggrgactgtgggaagctgatgctgtggtccagttgagacaagacttgggtggcagagagacagtggacagggtggagccgtgaagtcaccctcccagtacatgagagaagacgtccaagcccagtccctgacaccagtccagccagaggcagggaggagagcagagtggagggacacaggatgacagtggggcgtggggaggccagcctctgctgtgagagctctgagatagggacgatggtacctctgaccttccctacccctccaagccctctgtcctgctggaaggagatgccaggaggagacccaggtgctgaggaggagggacaggactgggggacggttggggacctggccccrggttgggggcgcaccttcagaatcgcccytgccccacgagagggctgctgacccccacccctaccccatggctgcccctcagcaggagggtccgtttctctcccgaaaaacagggcacagtcacttcctgatgctaaaacactcagcatttccctagaaacaaaggcagccatgcaaaccccgagcaagcaggtggcgtgtagttgcccattgcatttcagtgggctgcggtccagcttctagaggcctgagtgtgaggtgtgtgcacatctggggcacrcacttggtgccagggcagaggagagggcaggttgcacctaacttcatctttccccgcaggacctggcctgggccgtcagctactacatccggttcttcatcacctacatccctttctacggcatcctgggagccctccttttcctcaacttcatcaggtgcctgggctttgctgattcatccctgggccctccactggcactgatgatggctttggcatgagaagaggctcggacggctccactttgccyggggacctcccatcctggccccttggcaggggctgtcctgggctggttgggagagtggatctgttcccactgtggctgggcccccggaggcccctgcgctgagctgtgttctcttgcaggttcctggagagccactggtttgtgtgggtcacacagatgaatcacatcgtcatggagattgaccaggaggcctaccgtgactggttcagtagccaggtagggaagtcagggccggtcaccagagcctggtcccaatgtccatgtcctggccccagatgatctgcacctgctaacacagggctgtgctgggcctcccggggctgcctgtgtccttttgctgggagcttcagggctgagcaagaaagggcagcaggaatcccccagagggacaggtggggcatctgggtgggctgaggccatcaggcaggacggtawgatgtggacgggtggcctggagaccctgggtaaggctgggccccctgggaatgaggccgggcccttgggccttcctttgttccctgacactcatcccctccactgacagctgacagccacctgcaacgtggagcagtccttcttcaacgactggttcagtggacaccttaacttccagattgagcaccagtgagcgcggggctgcggggaggnggggagacccacagcgggagggaagtggccgctatcccactgggcagantgcagaatgtgggggccacctctttgtctctctgacaaggtctctrcccaatataragcaaggctcccagccagccccgctgaggtcaggagaggggctcccctattccatytccctgagggkcatcctgtgcccctcatgctgtgccacttggtcatagtggttaccacctccctccwtgtgggcctgggactttgtagttatggagcctgcacacgcacctcatgaccctgtgaggctagcagggcagggctacgtagcttgcctggaacatcggccgagrgactgccctgctgccccttgtccttgcttcacctcttgtcactgtttttttttttttttattaaaaaataaaaaatgtagagacagagtctcaccctgtttcctgggctggagtgcagtggtgctttcttggctcactgcagcctcgaacgcctgagctaaagtcatcctcccacctcagcctcctgagtagctgggactgcaggtgcgtgccaccatgcccaactaattttttctttttttttttacttttatttatttatttattttgagacagaatctcactctgttgcccagactggagggcagtggcrcaatctcggctcactgcatcctccacctaccaggttcaagcaattctcaggcctcagcctcccacgtagctgggattacaggcgtgtgccaccacgcccagctaatttttgtattttttagtggagacggggtttcaccatgttggccaggctggtctcaaactcctagcctcaagtgatccacctgcgttggcctcccaaagtgctgggattacaggtgtgagccactgcacctggcctaattttttatttttattttttgtagagaagaggtcttgccgtgtcgcccaggctgatctcaaacttctggcctcaagtgatctgcctgcctcggcctcccaaaatgctgggattacaggcgtgagccaccgtgcctcacctcactgcctcttttcctagcattccccagctatttcatttcttttttgaaaaacatgacactttgtctctggccacccaatatcttcccagctccatagagcacaaacgccctcctgctcacggagggctgcaccctcccctccacacacgtggcaccccactgggcacacacgaggagccacactttgagactggtcctggctgtggacagggtctctgagggccccagccagcctctgcccaggtggtgggaggaagcgggagcagcatggccctctgagtcctcacgctctgcccaccctacacactcctcagcctcttccccaccatgccccggcacaacttacacaagatcgccccgctggtgaagtctctatgtgccaagcatggcattgaataccaggagaagccgctactgagggccctgctggacatcatcaggtgaggggtggaggtccacaggcgctgggccctgggatcacccgtggtgcagacagtgggatcacaagaggggctgggccctcctggcacagtcacccaccagggcacctgccttactcccgagcctgtgttaggagctgttgggcttttctccctgggctgcgagaagaccatccctttctgtgtggggttcctggtgggctctgagctgacagccccacaggcccagtggcagtggtaagccctggttagggccaaggggacatacatgccaccttaatgatggcctcctcagcccttgcactccctggggccactcccgtcctggtccctgaccctggtccatccccaactttgcaggtccctraagaagtctgggaagctgtggctggacgcctaccttcacaaatgaagccacagcccccgggacacygtggggaaggggtgcaggtggggtgatggccagaggaatgatgggcttttgttctgaggggtgtccgagaggctggtgtatgcactgctcacggaccccatgttggatctttctccctttctcctctcctttttctcttcacatctcccccatagcaccctgccctcatgggacctgccctccctcagccgtcagccatcagccatggccctcccagtgcctcctagccccttcttccaaggagcagagaggtggccaccgggggtggctctgtcctacctccactctctgcccctaaagatgggaggagaccagcggtccatgggtctggcctgtgagtctccccttgcagcctggtcactaggcatcacccccgctttggttcttcagatgctcttggggttcataggggcaggtcctagtcgggcagggcccctgaccctcccggcctggcttcactctccctgacggctgccattggtccaccctttcatagagaggcctgctttgttacaaagctcgggtctccctcctgcagctcggttaagtacccgaggcctctcttaagatgtccagggccccaggcccgcgggcacagccagcccaaaccttgggccctggaagagtcctccaccccatcactagagtgctctgaccctgggctttcacgggccccattccaccgcctccccaacttgagcctgtgaccttgggaccaaagggggagtccctcgtctcttgtgactcagcagaggcagtggccacgttcagggaggggccggctggcctggaggctcagcccaccctccagcttttcctcagggtgtcctgaggtccaagattctggagcaatctgacccttctccaaaggctctgttatcagctgggcagtgccagccaatccctggccatttggccccaggggacgtgggccctgcaggctgcaggagggcactggagctgggaggtctcgtcccagccctccccatctcggggctgctgtgtggacggcgctgcctcaggcactctcctgtctgaacctgcccttactgtgtttaacctgttgctccaggatgcattctgataggagggggcggcagggctgggccttgtgacaatctgcctttcaccacatggccttgcctcggtggccctgactgtcagggagggccagggaggcagagcgggagggagtctcaggaggaggctgccctgaggggctggggagggggtacctcatgaggaccagggtggagctgagaagaggaggaggtgggggctggaggtgctggtagctgaggggacgggcaagtgagaggggagggagggaagtcctgggaggatcctgagctgctgttgcagtctaacccactaatcagttcttagattcaggggaagggcaggcaccaacaactcagaatgggggctttcggggagggcgcctagtccccccagctytaagcagccaggagggacctgcatytaagcatytgggttgccatggcaatggcatgccccccagctactgtatgcccccgacccccgcagaggcagaatgaacccatagggagctgatcgtaatgtttatcatgttacttccccmcccctacattttttgaaataaaataaggaattttattctcacttcctgtgtttcctgcacgccaatgccaggccatggtattgggtgatagatgaggcccttctagctgggcctgggcaccaggaggggtccccatgcttgcatctctctgtatcccctccctcccctgtggccatcccacccgcctctccctgctgcctctgaaattcattctggggcccggaacttggtggaaatgacccaaaaacattggcccatcttcctcctctcagcagccgaccccagcccaattctaaaacagggctgagagccacctctcagcagctgacccctacccaaggagggtggcatggaggggcttgcagagactcttcctaacatcctccccccccagctgtctccccaagtgcaatctgccctcccatccctgggccagccagcttccacagagcgccaggccaaacagaattcctggcctccttggaaggggctggagaaggccgggagcagtggctcatgcctgtaatcccagcactttgggaggctgaggcgggcagatcacaaagtcaagagattgagaccatcctggccaacatggtgaaaccccgtctctactaaaaatacaaaaattaggccgggtgcggtggctcacgcctgtaatcccagcactttgggaggccgaggcgggcagatcacgaggtcaggagatcaagaccatcctggctaacacggtgaaaccccgtctctactaaaaatacaaaaaattagctgggcgaggtggcgggtgcctgtagtcccagctacgtgggaggctgaggcaagagaatggcgtgaaccccggcggggcagagcctgcagagagctgagatcacaccactgtactccagcctgggcgacagcgagactccgtctcaaaaaaaaaaaaaaaaaaaattagctgggcatggtggtgcgtgcctgcagtcccagctactcaggaggctgagacgggagaatcgcttgaacctgggaggcagaggttgcagtgagccaagatcgctcactccagcctagcgacagagtgagactccatctcaaataaataaataaattaattaattaaattaaattaaaagggggctgaagaaggctctggaggctgatgattctttttgtggctcccgtgcccatatatgcaatggctcattcagaacccacaggctgtcgggggggctgatatcatcctagcccagggtcaccagttcataggcacagagattggatcctaggtctgtctgaccccagaggctgggaagagtctaaagcaacatgccaggggcacttgtacagtccgtctcccatggacccccatgctgctccgtcatcgtctctgggctggctttcctggcagggctgatcctgggaaagtgccaaggaagggccaagaggcactggctagttaacaccttggggcctccccttggctttgtagctgctcccagcagggctggggagggctcctgagtagacctcagcccccgcctgcttcccctgacccccgctttgcctggccgaaatccagccaggtagggacagccagcagactggctggggtacgtatggctccccagtggccacagggtgtcctgagtagggcctggcattacagaagccctgagcgaggtggccgactcaccccagattcaccaagtggctctggggagtcctttgccctccctggccctgtgggccatagtccacaggggcaggctagaggggccccaaggatgccattatctcaacacccgcttaccctaggccttgccctcctggtggacccgctggcagtggccttcaaggttacaagaccctggcaggcacggctcccaccctctgccctgtgcctgtgacccgcctccaggatggcgaccagcccaggcctcccaaccctaccagttggaaatccatgggtccatcacccataacaaccagggggcttggaattggggatactggaggccagatggacgctggggctatgagggcaccagataaatcttggcctagcctcaccgggcacttggagcttctctgacttccccagccccacccagccccgccttgcccttgaatacttccctgggtcaagaagctgaggacattcatatctgctctctgcttaaccgccccctcctgtccctgtactcagctgacccccttgccaacacacccagaattgtgagtttctaatccctatcccctgccaaagtcatggtgccccaatattcaaggccctgagcaatcaaaccccaacaccaccatcatgggcgaagaggctgagcccagagagaggacaggactgcgcaggccacacagcagcaggaccctgctcctaacccgcaggctcctggccacctctcctgcacagaaagggctggttcccagaccttgcccccatcacgtcaaatgtcagacagctcccaggaggcccagcggctggctggaggagtgggggcagtggagggcagttagtctctgaggaggagataagggcagtgtagctacgcagataaaagggtatcagctttgtgggtagcggggacatctgcagcgccccaagtctaagctgtgtgtgtgtggggcgggggagggtgctgtggcaccacaggcggatcctcggggtgtctggctggacactccgaagccctcgtgcctactcggaggggagaggaagcctttaccaagctggaccagggcagagctggcagccactggggctgggcttgggctgccatcaggagtggctggccattgcttatgtgacacagtgccttgggcccatcgggactcctcagcgagccaggctgcaccctcccccgagaggtgtgcccctctggccaaagaagctgcctctcaaagagtccctgttccaacatctgagagggaaatggggcgccgtggggatggcttgccccaggctgaaacgccactgccctcgggactggttttccttttctcagcagactggcttcatgtggccagtgcatacacggaacaagcagccccccagcgtgctgagatttcaggatcacgtccccatcgtcctccaccatcacaaacactttgctttggattttaaaggcattcaggtctttcttctaaatcgtcccattcaagagcaagtgtccaagagaaagagtgacagcagccaagagcttggaataggccaagctcccagtagttgtggtggctcattgcctgaggacatagtgtggtggggggaggaaccttgagaaacccatggcctgtcccgtcacaaaagagtttgttgaccccctgctcccctccagctactcccaacacaccaggcaggggctggctcttgggcatcatcatttccaacatctgcctgggctgggagacccgtagcaaatgttgatgatcaaaggaacaaaccaacactgcggttatggtttccctcgggagctgtttttcctccgggcccacgcctcttgtacagacaataaaaaaggaacacggtttctcagaggttcagaggttccaccaaagcctctttccttttacaaacctggcccctgtgccctaagcctttgttctgagactaggagacctacagatggagaagggggagctcagctcaggactgagggtgacctgttcccaggggatctagcatgggggacagtgggacaagagcaaagattcccctgccagtgatgggtcccaggtggtctggagaaatctaggagtggctgctgaaggcggggcctcccaggggtccgcaaagcaagttaccagggacagtagggagcacggcccgccccacactggcgcagatgctccgggcgcccctgggtggcgctgcaggctcagctgtcgtggatcctcggtgttagcatctccctggcgagcgcctcggagccagcgcacagcgatctctaccagggtgtggacggagggaatgccattcggagcctgcgctggctcagggcgcccgcgtggcactaggagccaacaggatttaaacaggcggtgacaggaagggggagtccctgcagagggaccagcctgtgcagagaccctgaatgcaaggcacgccctggccatgagaagcgtgtgtctgaggcaggaagtacctttcaaggagcatccaatcttaccctcggctgaaaactgaggctcagggaaggcaaaaaagaacttgccctaggtgacagagcaaatggtcatcctggggaattgggttgtgtgcacaaaatttgtgaataaactgagcctgctgctgtgccctttgctaagagcctttcttccatcaccctaggtactgctgctcggggtcaaggaactcccccaaggtcacacagcctgcgtcctggcagaaacaggacttgcccccaccccaccccacccccaagtctgtctgacttgagtggatctggtggggctgggtggcacccggaggagggcaggcatctcactcacaaccaagctgaaggggctgccaccctctgcttccctggccctaccaggaggcctctgctggcactgccctgggccgggaggccacagggagctttgggctgtctgctcctgggtctgggagattatgtgagccgaacaggacctcccccagtgctctcctgccccagaaatcagggtgagggaagcaggacccaaacaccctgtctgtcatcctctcagaaaacacaccccagggtctcccgggccaggctctgggctgccaccagcctccagcagcaaatgatgtcagtattccaggtgctgtcacagagaccctagtcacaggctgggcagggaaggggaggagccctgcgggtcagagagaactttctagaaggggagcccctgggaagagccgcaagagtccatgggaatgtgcagacggcccctcctcacagagaggaagcaggtgtgagactacggtgatcagctttagcactgaggagctttctggctgtctcggaagagaagttcatgggcagcaacactcagcgccaccttgtatgtgtgtggagtagggggcgggttgatggggcagtggggcttcccctccagctccgtcccacggaggatgggccttggaggggctgaacaaaaattggcagaatttgcgccttttccacctcccaaagagaacccagtccaggccaatggaagcccaaaaagtagggggcaacccctgcagctggtagggcgaccccagctcccactccagaaaggcctcatagaaatcctcactcagctttctttttcaaactgccgacacttcagatgaaaccctcagctcagcttggagctgtcaggctgtgtggatgctggggactgattggtccagccagatcttcttcccaattctgggtgccccaagaggcaactcaaagccctccccagaactgtccgaaacccacaggcacagtccagcccactgccagacaaagagcctaagacctgactccagggactcagggacaggaatggccatgcctcgggggtccagcctattcactgcagtaactacagacaagcacctggtcccaggtgggcttgagggagatcgacgttgcctccttgggccaccaggcacaggctgcaccaccaccactggtgtgatgccagatgtggcgctaagatcagcaggtggcccgctgcgcggggccctttcaggccccccatcatggagggctgtgggaggccagtgcaggtcaagaggcacaaccgtctttcccagtccatgtccagaagcgtccgcagacatggcccccagccctgggtcctcatctgctgggcccgctcatcccaccatgcagaagcgtcaagtgacttgaagcccagcatgaataggaagtgaataggccctcgggcaggtccgagtccaggcatccctgggctcccaggcccagggcatctagagctaaagggagctccttagcgctccccctcaaccccgccgccggccccaacacacacattgatggccgagggcctgaatgctgttggggagtctgggcagaccccagcttcaaaactcatgcaaattcaccactccactccataatacatctgaatgtattttaatataaaaataacagctttcccccaattctcgctctaggaaaatgtgctatgctcaccttccctctacccctgtcccatcaggcccagagccaaggccatagggctgctgaa

SEQ ID NO: 94827 - DNA, 55404 bp, Homo sapiens
aaactattgggagatttctttttggtagcttgagatctagagacagaagtgagtctgtgcctttatgatccataggattttatgtaattattttgctgtgataagtaagataactaggtactatagttactgatctttttaaagagcacagtatcctgtcttttactactgcccccaccagttgatcttttgcatttgggacatgatttgctcccttgaagattatattatttagcaaaatttcacaagcatttggctactgtctaaattacagtttagcttcattgctatgaaaacatctactggttcaagataccagacgctttttcaacaggagtttaaaaccacatttaaagtctaatttaaggctgggcgcattggctcatgtctgtaatcctagtgctttgggaggctgaggcaggagtatcgtttgaggctaagagtttcagatcagcctgggcaacactgcaatacattgtctctgaaaacaaaacaaaacaaaacaaaattagctgggcatggtggaatgttcctgtagtcctagctactcaggagtctgagacaggaggatcacttgaatctaggaggctacagtgagctaagattgtgtcactacactttggcctaggtgacagagcgagaacttgtcacaaaaacaaacaaatgaaaagcaaagtctagttgaaaaccaaaataaaatttaatatattgagcaaggtgtttcttgggcctgtaaatttccttaataataaaaactcaaatgactaagtcatatgctttctagcatgtttgcctttttctgaaaaatgttttatttgctttttcttaataaacaaaatgtatatgtcctgaagatcttattgactgtacctgttttctttattttgtcctgttagtctccagtgccagatagtccacagctgtcctctcttggaaaatcagattcatctttctctgaaatttccggactattttataaagatgaagccttggagaaagatttaaatggtgatgtataaaatgtttatatttctaaacatcagtcttataatgcagaaggtttgttatattttataacttaaatgatttttcttgaacagatgtgagcaaggaaattaatctaatgttgtctacctatgcaaagcttttaaggcaagtacttatagtatattctctggggtctttatgttagttttcttctggaaactctgtattgggaagtttaattctgtggctgccaaacctctccagtaattaaaactttggaattttttattctacctcagtcccttataatagattagttggttattttcagggaatagcgtcaacttttccactaaaaatcctttcttttttactcttgccaagctaatactagactgtatatatcttggtctgtaattagatgacattacattttaaattttatgtaaatacctctttgagaaaaatgtttgatgaaattaatgataacagactgatattaaagataaatatttatgtcatagagagtcagcctttcatatccatgaattctgaatctgtggattcaatcaaccacacattgaaaatatttggaaaaaaagggtggttgtgtctgtactgaacatgtacagacatttttttcttgtcattatttttcaaacaatacagtataacaactgtttacatagcatttacatggtattggtcttataagtaatcaagagataatttaaattatatggcagaatgttcttaggttatatgcaaatactatggcattttatataagggacttgaatatctatgagggatgttcctttggtatctgtgggggattctggaaccaataccccatggatactgagggatgactgtatttatattttacctatatctattttaagaccaaatttaaatactttattagcctaatatgttttatgaagtgttttttttacactgccggacagtcattatacttggatagtggtttgtgtggctgtaaaaataatgtatgtaattgaatattagtgttataatgtataagatacacttcctgttgtgtcaggagacctttttgagtagtcaaaaatatttgtgggactaatttttttttctgaagagtattagtaaattaatgaagttctgtggcacataaagccatttaaatgaaatagttaacaaatattgtgtaatgaagaacaacataatgatgttgtttatatctacttagtttaatatacaactttttttcctattagtgagagagcagcagtagatgcatcttacattgatgagatagatgaactcttcaaagaagccaatgctattgaaaactttctaatacaaaaaagagagttcctgcgacagaggtttacagtgattgcaaacacattacacagataaaatatatacttgaaataagctgagaatttaaacctattattgttataatgaaagaatgacatttatgctttgaaagctctcgagttgttaaagaaaatgtatatctcgaatagagaaggggaaactccttgaatttctaggtttaaaaaggaacttttaaattccttaatgttaatattaatgttcatgttaatgtcctaagctggccattaacatgaactacgtcacttttcttttgagggtcaaatatttagtgcattttatagaagtgtaaattatttaaatcttatgtggattcttttattttttccttaaacttcttagtgtttctgaaacttctaaaaaaggattcagttaatttataatgtttaataatattatacttttagaatattttgtttaaatatcagatagttttggagataattttgaaattttttttatggtcaggattataaaagaagattaaaaccttagaggtgatttttccagtttcttagaatataatgacataactgtgtgctatttccatttgattattttcactattagttattatgtatgactaataaaagctctcggcttaaaattattttcttgtggtaaaagtagtaaaataaaaaccagaaattactcaccagaaccttgtatgagttggcttttttacacatcaaccacatcaacatgtgcagttaatgaattatatttagaaacattagcagcagtgtggtatgggataaagattagtgatccagaagtaaatagattggcttaaacaacaagatgactttgggaggtcacttcaatcgtattataattgagaaattgaatttggactggaggatctatactactcatctagctaaaaaaattatccctttaatgtgaagtactgctatgattttactgaaaactttctatgttatatattactatatgggatagctatattaaccagatttttaaacaaaatagcacccatttttcaatcatataggcagttcagtttattacatgtatatttttccaatataagcagtcagaaaattgcaaatagtactacagggaattgttattcctaagggagactgcacatttgccttgctgccttctaaactctaaaataaaatctcattttatcacattactattttaaggcataaacaccacatgatgtaaatactcatataagaaaagatgacaaaagtgaaataaaataatacttgctaaagaaaattggttaagtggaaaaaattattgggttgatagaggtggtggcacagaataggttggaggtcaacaaagtaattattagaaatgaatttttttcttttttgccacttgcagtggctcccatttctaatcctagctacttgagagactgaagtgggaggatggcttgagcccaggaatccgaagctgccgtgagctatgattgcatcactgcactctagcctgggtgacagagtgacactctctctaaaaaaagaaggaaaggaaattttttcaattttttctttctttcctttgctttttttttttgagacagaatcttgctctgttacctaggctgaagtgcagtggtgcgatcttggctcactacaacctttgcctcttgggttcaagtgattctcctgcctcggcctcctgagtagctgggattacaggcgcctgccaccacacccggctaatttttgtatttttagtagagacggggttttgccatgttggccaggctggtctcgaactcctgacctcmggtgacccacccacctcagcctcccaaaatgctgagattacaggcatgagccactcgcccggccaaaaggaaattttttaaaactaaatacaacaagaagatttgtgagttaatacgacatgtcatctggatttcgacctaccatcattaagaaatgttctttttctaagcatttattactaatatgaaaaataaggccaacagattgtttgagactagatttcataatatacttgttatatcctgatggtatcaccattgtttaacatctagttcttccctttgcaggttcagaaaattgatttgatcatttcatttgatatgattaagactggagaactgattttaagtcacaatgtgtttactgttcagcactgttcagaattgttataccttgtagtataaaggtgcctgaaagcctaatcatgaaggcttatttatttatttttttattgatcattcttgggtgtcgaaggcttattttttaaatcaaatttggatggctttggtaccatccacgtagacaagagtaattatcttggccaggcatggtggctcacacctgtaatcccagcagtttgaaaggctgaggcaggcagatcacttgaggtcaagagttcgagaccagcctggccaacgtggcaaaaccctgtctctaataaaaattaaaaaaagtagctgggtatggtggcgtacacctgtagtcccagctactcaggaggctgagataggagaatcacttgaacccgggacacagaggttgcagtgaaccgagattgtgccactctactccagcctgggtgacagagtgagactctgtctcagaaaataataataattattattatctcacaactggagaaatgctattgcaggaatactattgccctttaatttacacttctaatgttactctttactatttcaataaaatatcacaaatttataagttatttttcattgattactaatcaaaatatataccgaactatcttcgtactctgctatatgtattaagacactcccttctgacaattttaaccacttctttcttgaaatacaattttgctaggaaaacatgatatgttaatgttaaaagcaactctgtggcagtgctgtgggagttactagaagaccttttggtaagggagtcagagaggtagattttaaattggatttttgaaaaggaaaggggatatttcaggcaggggaaaagtttcttcagtggcacagaagaacaaacgtatcatggtatgttagtcactttgctgggatgataattcatgaaggggaatagtgtatggtctaaactggagagcagggacaatcttgtttcttggtattcttactttgtagcacagtatttgctacattggtgctaaaaatgttaataaagtcatatacattttaagggcatactttcactcatgctagattgtcagaaaatgttctgtaaaattaatgaatagaaaagaaaaggaaggatgaagtgatttaaaggcagagaaaaaggatgaaaggtaaattgttgccagattgtagcgtcctctagtggcagtctaaattcggactttattctgtgtcggaatcttccagaagaggagtggcataaaaaaattgatgctgtgcatcaggataaacggacttaactgtagtgtgagaacaggtttgaaaaagaaaagtttagggcgggggagaccactattggtggtctaattttaatatttcaaacagctgcgtattatagctagggtgtttggacggttgtcatggaaataagccccgccccttaagctgcgtcctctctttgacctgtcagtgagggagggacagtccaggcagttctgtgcgtgttcactgtttagtagtactcaaaactgccagtgtgagaggatttggaaatcactggatctgctcaatacaaaaatgttttttcgagtctttctccattttatcaggagtcattctgccactgcagtggatttccttcctgtgatggtgcaccggctcccaggtagagggtttgcccctttctcttcctcatcctcctcttcttgccagtctgcgcttagaattctgtgcctctttcctgaaggttgctgggagcttctgaagctttgtgtcctgtgtggctcagatgagatagcaattccgcagagtcctggaagttaaagaaggctgagttaggattgtttcctcatggtcagggaaacagccttcacatttgtatattttatgcaatatttaaggcaggattcagggacttggtattctttgggatttgcaataagaagaatattcaatatttaggcttttctaaattgaaaaatcactgccacacgttctaatgtaattgtttggtttctctatttgcattttgcggggactgccttaaaactcatttatgttttatagccttctattatagttaccattgttacatgattttatgtatagaaattggctgatctagagctttcagaaatcatactaatatgcactataaattttaaaattacttaatgtagtaatttaatgtttgcagtatgcaagggaatgtattacgtactggaaggagagaggagacaaacaccagaccctgtactcaaggagtactggtagtatcatttatcatacaagacagataagataaggtccatatgagagctataaacagatgctgtgagttcagactaaggagaatcagttcttgctgtaggtaaggggaatgctgtgtttataaagcaaatgacatggcaactggatcttgaaggatgagttaggtgagtaaatttcatctgaaggagttgggaaatatcctagatgaagaaaattgattggcgggggggggggggaattaaacattctattttgacatgttgaaagtcacctgcaagaagtaattgatgaaattaagagactagatgagattgccaagggagagtgctgagattaaagatccaaggtaggaccttaggaacattcatgaagtggtaagggggataaggagcccataaagggaattaacatttggaaagcatccactatctttatatttgwttatgacaacagacataaacaggaagtattaacctccttttatttccattttatcatggaaaaacctgaggctcagagacattaagtaacttgcccaaggttgtcagctaataagtaataaaactagcagaatgcagagagtagttatagggcagcaggaaagttagaataggacaatgtctcagaagctacgaatagaaaggagtttaagaaagtgttaatgtcaaattctatggaaactttgaagagcatgtagcagattaccagtagcatgcaatagagtatacaacatatagacatgtaaatattttctacaatgtaaaatgctttaaatttgtgtatctctacttagacaaatgcccaatcaggccattcaatttacttaaaaaagtaagatgagtaaaattacatacctgaccttagggaatttattttaatctgagaataagataaatggtgcataatgttaataaaagtagagtaacataaatacctgagagtttccttctctatcttttcaaagcatcctctttgtacttctgatactgtagttcccagattttagtatgcttaagaatacctgcttgtccttccycagagattctgatttattaggaccagaatggagtccaggaaactgcattttagcagtaacaccaggtatttctgttgcaagtagtcctcataccagactctgagaaacaatgctgaaataaaacacagtgtcagtgatctgtttactaggcagtcagttcttttatttcaggattctaatgctttttattctcagcagtaccaagtacttcgtcaactgaataaaataaaggagatattacaccttattggactgatcattaaaagctatgtaaatataataatagcattttttgagtattctgttctaaaagctttacataaactaactcatttattacttatagccttagaagtaatatgaattatcatcatcaccatcttagaaaagaggaaacagaccacagagaggtgataagtgcctttctcaagccttcttatttaggagagggcatatttgaaaccaaccagtctggagccaggtagagccccagctcacacccttaaatattacactgtgctgcctcttaagggaagtactgtaacactggagatagaccttgaccaattaatggaatttgctttttttttttttttttgagacgaagtttcgctcttgttgcccaggctggagtgcagtgctgcgatctcggctcactgcaacctttgtctcctgggttcaagcgattctcctgcctcagctcctgagtagctgggattacaggggtcggccaacacacccggctattttttttttttgtatttttagtaaagatgggctttcattatgttggccagacaggtctcgaactcctgacctcaggtgatccacctgccttggcctcccaaagtgctgggattacagacttgaaccaccgtgccccgctggaattttcttagaactagagaaaaggacattgggaaagacattcagggtgaaagagaattttatttgaaaaatcagtaaagaattaggtttgactcatttgttacatgtcatataggggagtagaatgtctcgtgtgcttcaagctgaatttttgaaagatttgaaagaaatgggatagtaacaacttgctaaaagaatgcmaatctcacttcttcagagtaatagtgtccctatatgttagctcatttttcyagcctagatttctgaatcactcttaaacttttatgagataaagaattctattttatagcacttaattatttatttgaccacccctctatgttaggcagtactgccttgtgaacactcagtaatgttaaaataatagggagaagtttcagttccttattatacaactatgatttttacttcttgtgccttttgcactttaggtaatttcagactggatatcactgcataatttaatttttgacacccttctactggaaaatgccttgtattttcatgtatatgccattaaaataaaaggaattaaatttaagatcttattaaattcacaggaatcgctatgaagtctttggaatcacattctggtatatctaaattactggggtcaatataattggataatattgaatggtggtcatttttataacaacgaggttgctcttagcacatctggggttggcatgtagatttattcttgtaaaaagacaggtattgttcaactatgagaaatgataaaaatagtaattgaagtcctaagttagttcttaggcagattagtagtcctaagttagttcttaggcagattagtactacaaaaaatagaagaattgttgtgggttgaaaatggagaaccaaagcgttgatagtctgggaatgaggaaggagagagaagaaatttggagcctgtatttggtgttaggtttatgtttccctcaagctgccagttgataagattattgtctgtgggaaacaggcaagtttatagaagatttggtaaaatattttttgtgcttttggtttcctctgcacagttttcaaaaggtacatgggaaatactcctcagaaaaaagccgtctttgggcagtgtsggggtctgccatgtgttgcaccgctgctgaccacagtggaagaggctccacggggcatctctgctcgagtctggggacattttcctaagtggctcaatggctctctacttcgaattggacctgggaaattcgagtttgggaaggataagtaagccttgattttggagaacaacttggatttcttggcatgggctggttctgtggaatatgcattaatatctgcttcctctgtgaggttaatatttccattccatccctttgattacagwtaaagaaactgtagcctagaggagaagaaaggagactttttaaacaaaatgtcctgctttttctgctctgtagactattgtaaatttgaagccctctgtggtttgtaccaaaagaagagaggtgtcagaagctgtcagtgtggtgactgagctgtttccccacaagttcctgaaggaagggcaatgtctcctcataccactctctccctcacccagcacttgccagacacatggtctttttcagttcctcaaactgggcacagttgtatcttctcagcatcttagcattagttctctcacctatgttccctaatcttcccaagactggtcttttcattcagatgtcaactcaaatctcatgtcctttgagcctttcctgatctcccaacataaaaatgccagcacagtcatccctcagcattcacagggcattggttagaggaccccctaaacaccagaatccaagtatgctgaagtcccttatataaaatgcttttatttgcttttaacctacatatatcctcccattatcttttaaatcatctctaaattactctataatacttaatacaatgcttacacatacttcattcccatggatttgtcttagtactcagcaaattcaagttttgctttgcagaactttgtggcatttttttcccacaatatttttgactcaagagattggttgaatccacagatgtggaatatatggatatggagggctgactgtattaattataattacctattttaattctctacacagtgttatcagtgtctggtattttttatttgttatttgagtgttaagctctgttcccccactagaatgtaatttgwtgagggtagagactttttctagttcatcctgtatccccactacctgtaacagtggtctgcacctgaatagcattcaataaatcgatgccaataaatgaaaaacccaggcaggctgaggagcctagaagcagggtgggaaggaggactggctgagccctgggtgtgggacagagtgcatgtgtgtggtgtgtccccaagggcagaaaggtggcgaagggaggcgaatccaagtgggtggagggggggaagggcgggaggagaaaaaggtgggaggaggaccaggtgggagggtggtggcccactcaggacccagtgggggcagcgtgatgaggcggatgaccctgttcctgaacggcagccccaagaacggaaaggtagttgttgtatatggaactttatctgatttgctttctgtggccagcagtaaactcggcataaaagccaccagtgtgtataatgggaaaggtggactgattgatgatattgctttgaacagggatgatgatgttttgtttgtttgtgaaggagagccatttattgatcctcagacagattctaagcctcctgaaggattgttaggattccacacagagtggctgacattaaatgttggagggcggtactttacaactacacggagcactttagtgaataaagaacctgacagtatgctggcccacatgtttaaggacaaaggtgtctggggaagtaagcaagatgatagaggagctttctttttttttttttttttttgagacggagtctcgctctgtcgcccaggctggagtgcagtggcgggatctcggctcactgcaagctccgcctcccgggttcacgccattctcctgcctcagcctcccaagtagctgggactacaggcgcccgccactacgcccggctaattttttgtatttttagtagagacggggtttcaccgttttagctgggatggtctcgatctcctgacctcgtgatccgcccgcctcggcctcccaaagtgctgggattacaggcgtgagccaccgcgcccggccgagctttcttaattgaccgaagtcctgagtactttgaacccattttgaactacttgcatcgtggacagctcattgtaaatgatagcattaatttattaggtgtgttagaagaagcaagattttttggtattgactcattgaacacctaaaagtggcaataaagaattctcaaccactggaggatcattcaccaatatcccaaaaggaatttgtccgatttttactagcaactccaaccaagtcagaactgtgatgccagggtttgaacttcagtggtgccgatctttcttgtttggaccttcgatacattcacttcaaaatggccagtttaagctgctgtaatcttgcacatgcaaatctttgctgttcaaatcttgaacgagctcatctctctggatcagtgcttgactgtgcaaatatccagggagtcaagatgctctgttaatgggagaaaatttttgcaatctacccatctgacaaagggctaatatccagaatctacaaagaacttaaacaaatttacaagaaaaaaatcaaacaaccccatcaaaaagtgggcaaaggatacgaacagatacttctcaaaagaagacatttatgtagccagacacatgaaaaaatgctcatcatcactggccatcagagaaatgcaaatcaaaaccacaatgagataccatctcacaccagttagaatggcgatcattaaaaagtcaggaaacaacaggtgctggagaggatgtggagaaataggaacacttttacactgttggtgggactgtaaactagttcaaccattgtggaagacagtgtggcgattcctcaaggatctagaactagaaataccatttgacccagccatcccattactgggcatatacccaaaggactataaatcatgctgctataaagacacatgcacacctatgtttattgtggcactattcacaatagcaaagtcttggaaccaacccaaatgtccatcaatgatagactggactaagaaaatgtggcacatatacaccatggaatactatgcagccataaaaaaggatgagttcatgtcctttgcagggacatggatgaagctggaaactatcattctcagcaaactattgcaaggacagaaaaccaaataccgcatgttctcactcataggtgggaattgaacaatgagaacacttggacacaggatggggaacatcacacactggggggcctgtcatggggtggggggagcacggagggatagaattaggagatatacctaatgtaaatgatgagttaatgggtgcagcacaccaacatggcacatgtgtacatatgtaacaaaccggcacgtggtgcacatgtaccctagaacttatatatatataaaaagatgctctgttctaatgtggaaggagcatccctgaaactgtgtaattttgaggatccttctggtcttaaagccaatttagaaggtgttaatctgaaaggtgtagatatggaaggaagtcagatgacaggaattaacctgagggtggctacattaaaaaatgcaaagttgaagaactgtaacctcagaggagcgactctggcaggaactgatttagataactgtgatctgtgtgggtgtgatcttcaagaagccaacctgagagggtccaacatgaagggagctatatttgaagagatgctaacaccactatacatgtcacaaagtgtcagatgagaaattttagggactggaggaagatctacaagatgaaaatattttccttatcacttttctttctccatccactcagttgtctagaagaaataacactataaggaaattttaaaaaaacatttagaggattatgcttgttctcagcggtgcataatggaaaaaactgacttttttccatcttctgatttttaacagaaaagcactcatttaatagatgtagggaaactagatattgctgctttttgaacggggtaggagggtttacctagttttatgaccaggaatagtatctattatatttgcttttaaataggcatgatgtggaaataccatcttggtttgagatgcatttgaggattttaatttatggaaagcacaacatatgcaattatatttattgaatacctagatgcagtatggatatttaaattgttaaaactttatgaaaacttggtaaaggttgtttaggtttataaattgctttagtgattcctcccctctttaaatacctgtcacactgtatgaatatggtgagatcagactccttaagactcttttcaggttcgtttttacaatgtttactttttaggaaaaaacagtagctaaattaaagtaatatccagttcttactgattgaaacagagtggaaagaaagacattgttgtacatcactgtcattccaaaggtacagtagaactctggatggaggaagaacttacctatcactacaacacttacaaatgagaatttctcagaatttcattctaggcaagttccactgaacaccagaccaagcaattctgtctgtttacactattagcctagttttctcatacaatcatcacaagcataggaagatacttcaaaaccaaaaaaccaaggtgcatcattaatattcatttaattcaaataccaaatagtttacatagggccagcttagaaatagatactaaatccagagctactgcaatcaaagcttatattaatgaatatggttgagttgtctgctaaaaggcaatgtaatataattgcagctagaaccctacagtggggaatgaggaatttttttttttttttttgagacagagtctcgctgtgtcgcccaggctggagtgcagtggtgcaacctcggctcactgcaagctccgcctcccaggttcacatcattctcctgcctcagcctcccragtagctgggactacaggtgcccgccaccacgcctggctaatttttttgtatttttagtagagacggggtttcaccgtgttagccaggatggtctcgatctcctgacctcgtgatcagcctgtcttggcctcccaaagtgctgagattacaggcatgagccactgtgcctggcctgggaatgaggaattttaaacacacatttgattacggccaccaaaaaatatatataaagtaaaaataaaggcatttggctcgtccaagatgtaataccaatcagtcagcacctgtgattcttttacttatattttttgttttttttttaaacaaattttagcccaattttcttgagtcattatctttctgcagcagcagaggaagggcctgtacctccctaccaatgacctggtgtccttatttctaccccaagtgcagggatattagctgtgtccaaatgggttctgaattctacagactcatcaacatgaggcaaggaatcattgaaagccacctgtgtctcctttgggggaatgacatatctttagtatttatgtagcttattcttccatatgtacatatgcaaagctttccttaacagtaaagggtacatatgcatagtgggaggagatcagacctttacaagtaaaggaaagcaacttcagaaatgaattattttctttgctttattatttttaccaagacagagaagtattgtattgagaaataatctattttcataatcaatatgtgcctaaattatatttaaatcatttcactctgtactatattttcaggaattatagaaggtattattcattcacttaaaggtacctctgtagaaataacctaaaactgcagaacaatctgaaagatctaaacrtggtgtgcttagaaactgcagattttagatctaatgtatactgcattaataaacgatataaagtgttgaaaaaaatgaaaaaccaataactcttcagtataaatttctctcagtgtctactagggacgtgaagctatgtgacaaaacctctatggccaggaaggaatctgctttgttttaaacatttttaaatattagaaacaatttattatgaaagttttacccatataaactttttaaaatatagaaaagggaggctaggggaagcatgtaccacctgacacatcctttattagcactttgatgtatttcctgccagttttcctcgctatttctacggatttgttttaaacaattacagttatatgtagtattttttgctccactttaataaaacttcacactatcataagcctttttwtccatgttgctaccaagtctgaacgatcattatttttaatggctagatgaattccaggaattattgttttttaaaaaaatattgtggtaaaatatagataacatacaatttaccatcttaaccacttttatatatagaatttaatggcattaagtagattcatacgattgtgctaccatccatccacagaattcattttaccttgcaaaactgaaaccttgtatccactgaacactaatttcccattcttcccttcctctaacccctggcaatcaccattctagcttctgtctggtaaatcatcatgccctttcctctgggcctggttggaatttgatcatggtccttctgtgcctctcatggtctgttgttggaaacagaccaagaattagggatgtttaaaaaaagattatgaggcaaagagaagtagaagagaaggagggcaaaggggaggaggaggagaaacttctaatccagctcccagagaataaacagcctcttacagagggtatatggtatttcacctgctgcagaaggagaggctgtaatgtattgttcaaaccaagtagcagaaccactcagggcccaggcttgccccacaggcctctttgaagataagcatctttgtgggagaagtggatggcatggctggccctcacaagtgtctactttgtcctcaaatcagtttcttcagagccagtggtgggcatttatagcaggaacaaggtcttgccttccccttggacagatatctttaggtcaaaaggagatagacactcagtttagtggttgactccccagataggacctacagggagaggcagtgacctagggaagggcagtgtaacccttcacctatggataagaatagccctgctcacttgtgaatctcttatcactctgttrgatgccatttaacagatccatgtcagcatgcagacacagtgatgacatgccaaaggtctatcttcaattaaatttttttcatcaatgatttaattgaagacatactagtttttaaagttatgtgaaggctgggtgtggttgatcacacctataatcacagtgctttgggaggccaaggcaggaggatggcttgaggccaggagttcaaggctagcctgggcaacatagcaagactccatctctacaaaaaacaaaaattaaacaaaagtaaaaagaataaagttacatgaatctgggcagaatactaaatagcrtcagcacctttagtctctaccattctctagacaggatttcaggatccatagtctaggctcccagttcctggactatcgccactgtaatgattgtccccctccatgccacttcgacaaggccacatactaaggccacacttggaacttactatacagaatttctccacccctgaaatcttgaactctgaaactttactctgctcaaaaccccagttttcacggtcctacattcccattaaacttatttttttcattccatcaagttctcctttccttcctgtccactaccttcttaaggcttatctactgtctcttaatttcttctccctggcccagactttaccgtcagtcacttcaagcactttcaacaccacgctcacttcctttgccctggtggtcactgcctctcctctgatgattttcagtcctagattagcccatccttggtttcccctgctcatggcccagtcctgctgagcaggtctagagcaaatcatacaaccttgctgattgattcaattacaaaatgatgatttccagtcctagctgagtgcttggtgctgccaggaatctttagcagtcagtgttctttccatcttctcacagggtctgccgcaagtctctgaccctttcctgaagcctccttcattctccccgtccctttcaccctcagcagataaactggcctacttcataggaaggaatgacttgagggacagctgcatttgaactccttcagcttccctcttcccacctccgcacttccccacacttctgatcagaggacgcagctcttttcctcttctctgaaactttgatgcatcacgatccctcccatttcctcatctgccaaataactcttagagctcaccttaccttttgggatgctgtagagcccaggatttagcgtcatcactgaattcaaacccttgttctgtcactgagcagccctgcaactgtgggcatattcctctgaaccttggtttccacatctgtaaaatgggaaaaatatttcctcgcagggtcaatgtgaagggaaaatatatgtataagggatgtagcaaagtgcttagcacaatacctggcatgtagtaagtgcttggtagatggcacttatctcactggcaaacttatctagatactctcaaacatggatctcccaccccgcccccagctcttgggctctagacctgtgttttgccaactggctgtggaacatctatactctggtgttctacaaatagttcagactctctcaaaaccgagccattgacttttcccagtgcttgttcttcatgtcttctccatccsagttaaagcatcaccagccagccagtcattcaggtccaacattttggaccctctctttgtcgctgtctacatcctatcagtcatctctgacttgtttctggagtttgtcctttgctcactggtgctgcttcagtttaggtgcttatcttctcttgcttgaattattgcctgsgctcctcgttggcttcttcaatctgtatgctgttctttgtattccaggatgccggtcacacagtttcactctcctgtttcacaacttcacactttcctgttgaaggtcattaagccttagtctaagtgctggtggtcgtgggcagacctgtttctccaacattatcacctgctccgcccacatgctaccccctcaactggctgttcctctaagatactatatgtcttctgacccttcctccttccatcatctctgcccttgtcctctctgcaattggcagacatccgtaaagaaccagccaaatgtctccttccctcttgacctttccctgattcccccagctttccatcctattgctccttctctgcataaatagctttttttttttttaaagtttctcccttgtagcagcaatcactttgtatccattatttatgtgcctgtaagtgctgaccttggcacaatgcctggcagatagtagggactcaagaagatgttgacttgaataaatgaatgcatggaatgacaggatctcttgagacacaatctaacaaggtgaaatatattaagtagcaaaaattcttgaaattattgtaagtttttttgaaaaatactaccaaagtagacaaaccattagttaacatggtcaagaagaaaaaaggaaaaggcacaaacatacaaagtatgaaatgacaatggagaagaaataattgaagcagaaaaaaattaattacaagagactttgaaggcctttatgcaaatacatttgaaagccttgataaaatggataattctatagggaaagcagattaccaaaattgatggaggccaggtgtggtggctcatgcctgtaatcccagcactttgggagctcaaggcaggataacctcagcactttgggagggtgaggcaggaggattgcttgaggaaaggagttcgagaccagtctgggcagcctagccagaccttgtctctacaaaaataaaaataaaaagaattaaacaaaattgatagaaagggaagtttttttttttttttttttgagacagagtctcactctgtcgcccaggttggagtgcagtggcacgatctcggctcactgcaagctccacctcccgggttcatgccattctcctgtgtcagcctcccaagtagctgggactacaggcacctgccaccacgcctggttaaatttttttgtatttttagtaggggtttcaccgtgttaaccaggatggtcttgatctcctgaccttgtgatccgcctgcctcggcctcccaaagtgctgggattacaggcgtaagccacagcacctggcctcagagagggaagttttaagtagaccagtttctttagaagaaataggaaccttattaaggaaatgtttctcaaaaaaattaccaggcccagattatttcacagatgaattctaccaaaccttcaaatgtgagatagtcccaatactttataaattatttcagagcatcaaaaatgaaggaaacttccctattgtttttataaaggaagcatcatattaatatctaaatatgacaaagatcatggaaaaaagtaaactgcagactaatattatttacgaatatccacgataaagtacaaaataggccaaatatcgtggctgacacctgtaatcccagcactttgggatgctgaggcaggaggatttcttgaggccaggagcttgagattagcctgggcaacatagtgagactccatctttacaaaaaaattaaaaagtagccaagtgtgggggcgtgtccctgtagtcccagctacttgggaggctgaggcaggaggatcacttcagcccagaattgaggatgcagtgagctatgacagtgccactgcactccatcctggaccacagaacaagaccctgtctcttaaaaaagaagtacaaaatatataatactaatataacactaataaatattttgttaagaaacagaattcaataccacattaaaaaataaaattaactttgatcaggtgggattaatttcaagaatacaagttaggcttattattagtaaattcattaatacaatacaaatacgccatattagtaagttccaggaaaaataatcacagaattatctccatagatgttgaaaaagcttttgtgaaaatttaacatccattcttcctaaaaattgcttaagaaaatagggtttggctgggcgcagtggctcacgcctgtaatcccagtactttgggaggccgaggtgggtggatcacaaggtcaggagatcgagaccatcctggctaacatggtgaaaccccgtatctactaaaaatacaaaaaattagctgggtgwggtggcacgtgcctgtgatcccagctactcaggaggctgaggcaggagaattgcttgaacccgggaggcagaggttgcagtgagctgagatcgtgccactgcactccagcctggggcgacagagtgagactctgtctcaaaaaaaaaaaaaaaaaaagaaaagaaaataggatttgtaggatttgttggatagttgctaaatatgattttatatgcatgtatttcttaatatatatctcttggtatatgtatataatatatattataaatatcttatgtatctctatctattatatcttggtgctacaagcagtaatactacattggaaaatataccagtattttcttcaagtccagaaacaggaagggatggtcagtatcttcactactgttcaacattgtaccagatgtaagcaatgcaattagatgaaagacattgaccagagacacaaggactagtaaagtaaaattatctctttatgcaaatgatataatattactattatatcatattactataatgtattaatcctggaaaaccatagaggatcaatgataaaactaaatttaacaataaaaggtaaggtcataggatgtaaaattaacacactgaaataatatccttcatatatgcaaacaataatcagagaacataatggtagggaaacttcatttacaattgcaacaaagaagattaaatacttagcaatgaatttagaaatatgcaaactttaaaacacccttggaagacaaattcaaacaaatgtaaagaccatcccctgttcttgaatagagtgattcaacatcatagagatgtcccagttctcctgaatcaatttataaatctaatacaatcttaataaaaattccaacaagctgtttaagaaagttggaccaattgatactaaagttcatatagcacaataaatatgtaagaattgacaagaaaacaataaattttttttcagagggagcaactagccctaccagatattaaaatacaccataacacctttacaattaaaacattgtgatattggtgcaagaatagaccaatagatgaatgacatagaatagaaagaccagaagtaaacccaggaacttagggaaatttaggtatctgataatagtggcatctcaaatcattgggttaaagaaggactttttcttttttctttcctgcaatttaaaaaattctggtaaaatacatataacataaaatttaccatcctaaccatttttaagacaacagttaagtagtgttaagtatattcatctcgtcatgaaacagatctttagaactttttcattttgtgaaattgaatctctatactcattaagcaacaactctttatttctccttcctgcttcctcctgttaaccaccattctactttctgtttttatgaacttgactactttaaataccttatataagtggattaacaagtggaatcatacagcatttgtctttttacgactggcatatttcatatcgcataatgtcctcaatggttcattcatgttgtaacatgtgacaggatttcctttgttttaaaggataagtaatattccagtatatgtttggggaggcaaaatttcccctcttacctcttagggtcttcagctgaacccaataattaaactgattaacatgtgttaatcagttaatcaatgtgttaagcatatgaaagaagagaccatataataaaccatttaaaaagcgaagccacaaacttttccttacagttttcaatgtttaactatttaagtagatcatttctagtgtaatcatatggacaaaaatgattatytaggaaggacagttatcttatttgtctactttagcataatcttgataaagctgaaaaattgtaaagtaaatggaaactttaatacatataagatatgaagataactatttctaaaagcttaggaacttgttctttttctttctttctttttttttttttttttaatgagacggggttttgccatgttgcccaggctggtctcaagcaatccacctgcctcagcctcctaaattgctgggattacaggtgtgagccactgtgcccggcctggagctcattctgatttgttaaacatcagccatcccatatcctctcatgctattmtcttagctgtggagtaaagattagaattttcttaggattcaccacaataggggttttctaaaatgtgaggttttttttttttttttttttgacaggggtaagggtcaggagaatgtaaattattctttttttttttttttttgagatagagtctccctctgtcgcccaggctgaagtgcagtggcgcgatctcggctcactgcaatctccgcctcccaggttcacgccattctcctgccttagcctcccaagtagctgggactacaggcgcatgccaccatgcccagttarttttttgtattttttagtagagatgggatttcaccacgttagccaggacggtcttgatctcctgacctcgtgatccacccacctcggcctcccaaagtgctgggattacaggcgtgagccaccgcgcccagcctattctttccttttatacctaggatatacccaaaatgctctcctcccacaatttcaagttctctgactaatcaggttgtgctgggaacctgtcccatttccttatctttatatttgaaatgaagatctatcactctgtycctcatttttatctcatgttttcttactgatatttatttattttctcctgtttgaaggtacaatcattggtttgatgggatggcgctgcttcaccagttcagaatggcaaagggcacagtgacatacaggagcaagtttctacagagtgatacatataaggccaacagtgctaaaaaccgaattgtgatctcagaatttggcacactggctctcccggatccatgcaagaatgtttttgaacgtttcatgtccaggtttgagctgcctggtaaagctgcaggtgatagtgaygattatttaaactattacgatatataaccatctatacaaacataaatcttgaaaatagatttttttgtgtatgtgagaggatgttgaaactgctttctccctttgagtgtgtgcttagcgtcgtctacagtaagctgtggtacttaaataactctagggtttggtttcagccatgactgayaatactaatgtcaactatgtgcggtacaagggtgattactacctctgcactgagaccaactttatgaataaagtggacattgaaactctggaaaaaacagaaaaggtaaagtacaggtaaaaaaaaatgaataaaatagatcctaacatttctttccatttgaaatactttttagagtagtatatatcaagaagaaattgaagccttaactacacaaaaagaaagttattcatgatgcaggtcacctttactctctggcctgatggcctctgggttggttttccttaaatataattctaaactccttccttagtcctaatatctgaaggctagggtaaaggagaaatagaagagtactgatctactttggctagttggggtgttcttcctagctatggttagtattggactggaggttgtctatacctgtatttccttcacataacatgttaattaaaaagaaaattttagactagatttttaattttaattcttatgcttcttttgaattttcctgtgatattaggcaaatttattcagggtggttttgttgttagtagtggtgatgtgtttttgtttgttgttttaatcttgatttcttttttttagtgggaaaaataatttttatttctcagaggcaagaaattagggcttacattgcagttttcttatcatatttttaaaaacattagatatttctactatttatgcatgtgaatagagatctgcccattaaaaatctccagtggtctcaaatttgcaggtagattggagcaaatttattgctgtgaatggagcaactgcacatcctcattatgaccyggatggaacagcatacaatatggggaactcctttgggccatatggtaamgttgcaataaaggtctttttagaaataattgagaccaggcacggtgtgtatataaagatgaatactacaggtttgttttttactggcacaagtagagagagggtgctctggacacctctacacccagctctctctcctctttattacttgatctcagataaggaggattcttcaatgctgttataggaaacagcaaacatccttctaagtaaaatatttcagcaaaatggatccatgaacccagcagtttttggthctatctatcttgatcattaaaaaaatcaattttataataaattaactctgttaaccaagtagataactttgtaactcattcataatatgacaaatactatttcaccattctaaactacatttttttttttttttgagatggagtcttgctctgttgccaggcaggagtgcagtggcgcartctcggctcactgcaacctctgcctcccaggttcaagcgattctcctgcctcagccactggagtagctgggactgcaggtgtcctctgccatgcctggctaatttttgtgtttttagtagagacgaggtttcaccatgttggccgggatggtcttggtctcctgacctcgtgatctgcccgcctgggcctcccaaagtgctgggattacaggcgtgagtcactgtgcctggccaattacacttttttttattttttatttttttttacaaaggctcgctcttgcccaggctggaatgccgtggcacgatctcagctcactgcaacctccacctcccagattcaagtgattctcctgcctcagtctcctgagtagctgggattacaggtgcttgccaccatgcccggctaatttttgtatttttagtagagacgggttttcagccacgttggtcaggctggtcttgaactcctgacctcaagtgatccgtctgcctcggtctcccaaagtgctgggatttcaggcgcgagccactgcgcctggtctgaattacatattctaaaattaaagtaactagatctgtgattttcaacctttaattgcctaacaataatctggaatgtagatagaatcatctggatttcattcatcttcagggattccggtttagtagaactgaaaaggggccaagaatttgcattttaacatggtctctgggtgatcttggtgcaagtggtccctggatctcaccgattaacccagccacccatcatgagagcctgtgcttgttactttgcctcagtttgctccttatacaaactcctggagagtcttgcaaagttcagctgacagtattgggcaggtccaatctttctggacattcctctgctgggtgtttcctgggtgtctgtttgtcttacctaatgtcttcaagacttgcagttagaacagctcattaactaatgtgtttaaattccgtgaattgagtaatccagttgctgagacaggaaattcatctctttatcttctcctaatcccaacgaacactgaatctacttttttttttttcttcacttgattatttggttcagtgagaagtttatgaactggaacttaatgtgcaggcaactgcagggagcttgactacttgatagacatttgggggaaacttagtgattctcattgtaatacagtaaaatgcttgctagtaattgctacctttaggaagtaaaaagctttggttttagcttttctagatatttttaaaaggctttttaaaatttgtaaaaatcctgtaaacattaatcaatccagttggtttttaatacttatttaaaatatgttcttcagactaatattagagacaataatagagtactcttggactatagagcttgtctaatatttctttcatcactgtacaaagcatgatgttttgtatgtagtgggttctcaaaacatatctatatccccaacctagacctcccaagtattttatatccaattgcttactcagcattcttcctaggatgtctaataggcattacaaaattaacttgtcaaaaaccagactcctgatattttcctctaaactaccaccaccacctcctcctttcctcctcctcctcctccttctctctcttccttgttctccttcctttcctcctcctcctccttctctctcttccttgttctccttcctttccttcctttycttccttcccttcccttcccttcccttcccttcccttcccttcccttcccttctttccctccctccctcattgctctttcttcttccttcttcttcttttgctttcttcgattagagatggggtcttgctatgtcgctcaggctggacttgaactcctgggctcaagacatcctcccaggcagctggactataggcatgcaccattgtgcctggcttatttctttctctccttaagatgagtcttccccatctcaggagatactaactccatctttccagttgctaaggacaataactgtggaatcatcctttacatttatctcttacatcagttgatcaaaaagtaatttcagggtcaggtgcagtggcttatgcttataattccagcactttgggaggccaaggcgggtgtattgcttgagctcacgagttgagaccagcctggacaatatagcaagacctcwtctctacaaaaaatacaaaaattagccagacatagtggcatgtgcctgtggtcccagctactcaggaggatgaggtgggaggatcacttgagaccagaaggttgaggctgcagtgagtygtgactgcaccactgcactccagcctgagtgacagagtaagaccctgtctcaaaaaaaaaaaaargaagtaatttcagcaatgccttcaaaatatatcaaaaatccaaccacttcacaccacctccatggccaccactctactttgagtcactatcccttctcacttgaatgactgcaatagcccctcaactagttgccctgattctgcccttgccccacttcagtttcttttcagcactgtaacaccagagttaccagagttatccttttaacccacacccacttctctgagcttacctcctagactctccttctcgcttgtcatgatagggccacactggcctcctagctgatacttaaacactccaatcgtgctcctggctgagaacttttgcatttgctcttccctccacctggaatgcatttctcccagatatcctcaaggctttcttcctcacctcctttaggtctttactcagacatgacccacttagtgaagcttttccagaccagcatatttaaagttgcaaacagtagcccctactcctcatatgatcactcctgatccttattccttggcttattttccattatagttctcattgtcatctgatacattgtatttttacttattatatgatttaaaagaaaaacaacaaggcaaaataagagattttgtctgagcacagtggctcacacctgtaatcacagcactttgggaagatgaggtgggaggattgcttgagaccagragttcgaggctgcaatgagctatgatcacaccactgtactccagactgggtgatagtgcaaggccctgtctctaaaaaaaatgaagaagaagccagtggaggaaggggggagatttttgtctattttgcatatttctgtatacaagtgcctagaatatagtactaagaacactcagaatggtgtctggaatatagtaggtgctcaaaaagtagtagttgcagaataaataaataaagaactgtactggaaagcagataaacaagcagaaaattgtatacaatgagatatgtgctatgactatgaggatgtaatgaggacatacaataggggcaccaagtgcctttggggtggggaggagtcagggaagactacttgaggagtggatatctgcgttgattcttgaagagccagtaagcaatagccagatgaatgattgcatgaaagaatgttgatgagaaaggatgaaatggaacccagagtgaccctagctaggggtccagagggctggagggaaggagttggacatgagtgcaaatggagactgtagttgttggaataggggaagggagtaaaggaacagaatttgaggatattcctggctgctatcttttttttttttttgagtttaagaacttcaactctatgacctgtctattcaccatacatatgagacaggtccattataatccttacctcattatataatagctcttttttattattatacttaaagttctggggtacatgtgcagaacgtgcaggtttgttacataggtatacacatgccatggtggtttgctgcatccatcaacctgtcatctacattaggtatttctcttaatgctatccctcccctagctccccaccccctgaaaggccctggtgtgtgacgttctcctcccagtgtccatgtgttctcattgttcaactcccacttatgagtgagaacatgcggtgtttggttttctgtccttgtgttagtttgctgagaatgatggtttccagcgtcatccatgtccctgcaaaggacatgaactcatccttttttatggctgcatagtattccatagtgtatatgtggcagattttctttgtccagtctatcattgatgggcatttgagttggttgcaagtctttgctattgtgaacagtgcttggctgctatcttaatgtttcctacgaattagagatgaagttarcattatagtacaatgaatcattggttgatcactttggatgtgctgtttcaaaacgttagctaattattttcatagagctaacatttttaagatccagatctttgtttgaaataacccttcaggaaataagagtgtcacacatattgcataaatctcttaattgcttttggcaagtccacaagtgcaagggttgtcttttaatctagaatatatgtaaaacaggtaagataggacttttcatttttcaggtttctcctataaggttattcgggttcctccagagaaggtggaccttggggagacaatccatggagtccaggtgatatgttctattgcttctacagagaaagggaaaccttcttactaccatagctttggtgagtccagagataaggcaaatttcagtgggctctgccttgatgttgctgtagcagaaggactagtctggcaaatgttatgttaatagtttatcacgctatggtgataatgagaccaaggttgcattttgatgccaggtraggttattctgtttagtcacawactcctgaccctagccagctgactgcttgaaaagatayactgtagttgctttagtataagcaattactaaaaaattaattgatataatttaaaattttaggcaaccttaaagcccacaaatagtaatcatacatgaaaatgttgtcttgactatattttttggggaaattcatattctatataggttgattcagcttttactcagaatatttattttctgtactttaaatcattatagccaaactgcttctagattcttacccccagtataagcaggaaaaggattaaaggatacatgtaaagatcataaaggacactttaatactatacttttttactttgttcctaaaccaaataatttaaaaagaaaagaaaaggaaaaaaagataaaaagcaagctgagaacatgcaacccaagctattctaagcagttcccttttttataaaggaacaggaaataygtatagtaaagctgggagacagtaaacatgtatttctggctggcatttgtttagggcatcagtaacgtgtccaggcattcagacaagtccccataactggcacatttcagacaactctartttgccaaataacatttttattgtttgctggaaccttttaggaatgacaaggaactatataattttcattgaacaacctctaaagatgaacctgtggaaaattgccacttctaaaattcggggaaaggccttttcagatgggataagctgggaaccccagtgtaatacgcggtttcatgtggtggaaaaacgcactggacaggtggagtattttgagtatatttatcatgaaaattgttggaaacaaaggcaaatttccatatagttgatttttttwaaatcttccctggttaaaagtgcataagacacttttaatcaaggatattaccttcttctataggttgagctagctacttattaattagtacgatggattttgcatattagagaattataggaaatgattttatctttttaatgatctgattcaattaaaatggcatccaggaaactctcttagcatggactttttccatatcataatagttgctaaagagggtgttgttcgtgcagaaatcttctgtaatttttgcagtaatactttaattagttgattctctggcttctttttcctttttttttgagattttttttttagatggagtcttgctctatcactaggctggagtgcagtggggagatctcagctcactgcaacctccacctcccgggttcaagtgagtctcctgcctcagcctcccgagtagctgggactacaggtgtgtgccaccacacccagctaatttttttctatttttagtagagacagggtttcaccatattggccaggatggtctcgatctcttgacctcgtgatccacctgcctcagcctcccaaagtgctgggattacaggcgtgagccactgcgtctggcccaattctctggcttcttaatatgtgactatgacaatcctactaaagtctaagcatgttgattgaatatctttttatactcctgattcataatgctattatatttgcctactttttacctctctaaagagayagtatcttaaatttactctatctggatctcattacaaaaaaaaatttagtaatgactgcaccttaaaaaaaattagtctttgaatttatcatcagtatactgagtagcaatattttctatttaaccatgcagttagagtccaagatttacatatcactcaaaacattgggctatatttcatgagggattttaagttcgttataacaattgattggtctatatcaaatagccccagttcattgcttaagcaagcaatgtttaaatcaaagcatatttgcttctacattctgtattctacttttatatatactggacctgccacttcagaggggaaaatctttcyaattttcttattttgaactttttggacctgtttcctaaaggaaagggaaaaagaagaaaactaaaaaaaatttttttcattgtttgtgttttcccctgcagctccttccagggagatactacagcaaaccttttgttacatttcatcaaatcaatgcctttgaggaccagggctgtgttataattgatttgtgctgtcaagataatggaagaaccctagaagtttaccagttacagaatctcaggaaggctggggaagggcttgatcaggtaaacattagaatttrtcaagagtcatcaaaataattttgaactccaagatctggctttggctttggaattacatgtttctctctctctctctctctcttttttcttttgagactgagtcttgctgtgtcacccaggctggagtgcaatggtgcgatctcggctcactgcaacctctacctcccaggttcaagagattcttgtgcctcagcctcccgggtagctgggattataggcacgcaccaccatgccctgctaatttttaatttttttgtagagatgggtttcaccatgttggccagacttgtctcgaactcctgacctcgagtaatctgactgcttcagcctcccaaagtcttgggattacaggcatgagacaccatgcctgacctaggaattacgtgtttctcttgtctccttgtggcaaataatgagagagagtagttttaaagcattgaagacacagcttcatcatttatttaatattaaaaataatttgaaatagcttatttaatacctaataagtaagaaacatggcaaagagagccaagatatgtgtttaaaagcmtatgtggctgggcacggtggctcacgcttgtaatcccagcagtttgggaggctgaggcaggcagatcacttgagctcaggaatttgagaccagcctggacaaccaaaatggtgaaacctcgtctctagtaaaaatgcaaaaattagccagatgtggtggtgggtgcctgtaatcccagctacttgggagcctcaggcaggagtatcacttgaacccaggaggtggaggttgcagtgaaccaagatcgcaccactgcaccccagcctgtgcaacacagtaagactccatctccaaaaaaaaaaaaaaaaagcatatgtgatagttccttatttccttattacacttaagcaccaaagtttgctagaaggaatagcaaagtagaccgtcaatcagtccacctagttgaagggattcactttttcctgatgctgaatccaaggtaaagtttttccttgaattatgtaatatacattgtttctagctgtagctttattttttagctataattgtctttttaaatgtttgtaaaatagtacttattaagtttacttatgccttactaagcttacttatagctttatggtgggtcttgacatctgtggttgtttatctcttttctgttttaagattgcctgggtttttcatggccttttgcatgtctataaattttagaatccatttatcaggttttgtttttgttcttgttttaaaaataaaattcattgtatatatttgaggtttacaacatgatgttatgggatacatgtaaatattaaaatggttagtatagtgaggcagattaacatatctatcatctcacatgttacttttttgtgtgacaagagcagttaaaatctacttgtttaacaaaaatctctgatagaatacaatcttattaactttatttcttacgtttgtacgttagacctctagacttgttcatactacatatctactgtttggtatcctttgagctacatcttgtctttgccttcccctcccctctggtggtaaccactgtttcattgtctttctctgtgtatttgagattttctttaaaaaattccacataaaaatgagatcatgcaatttttttttcttttcttttttttttgagacggagtctcactctgccactcaggctggagtgcagtggcgcgatctcggcttactgcaacctctgctcccgggttcaagtgattctcctacctcagcctcccgagtagctgggactacaggcacacaccaacatgtctggctaatttttgtatttttagtagagaccaggtttcaccatgttggccaggctggtctctaactcttgacttcaggtgatctgcctgcgttggcctcccaaagtgctgggattacaggcgtgagccacagcgccctgcctcatagaatatttttctttctgtgtctggatgtttcacttaacataatgtcttccaggtccatccatgttgtagcagacgtcaggatctccttttctaagattgagtaatactccattgtgtgtatatatcacattttctttatccattcatctgtcaatgggtatttaggttgtttctgtttcttgactgttatgaataatgctacaatgaacgtaagaatgcagctattttcatgaggtggtgatttcatctcatttgagtatatacccaggagagggattgctgggtcatatgttgtacagttgaccctgaacaacatggattcgaactgcatgggtccttatatgcaaattttcttctacctctccacccctgagatagcaagaccaacccctcttcttcctccccctcagactactcaatgtgaagacaatgagaatgaagacctttatgatgatctactaccacttaatgaatagtaaatatatttgctcttccttatgacttttagtagcattttattttattttttttgagacagagttttgctcttgttgcccagactggagtgcaatggcgtgatctcgtctcactgcaacctccgcctcctcggttcaagcaattctccagcctcagcctcccgagtagctgggattacaggcatctgccaccatgcccgttgtatttttagtagagatggggttttgtcatattggccaggctgctctcgaactcctgacctcagatgatctgcccaccttggcctcccaaagttctgggattacaggcttgagccaccacacccagcctttaataacattttcttattttcttttatctggtttgctttattgtaataatacagtatataatacatatgaaatacaaaatatgtgttaattaactgtatgttattggtaaggcttccagtcaacaatagtttattagtagttaaatttttgagtagtcaaaagttatgtgtggattttcgactatgtagggggttggcacctctaccccactccgtgttgttcaagggtcatctgtattttttatttctttaggaactcctatactgtttttcataatggctgtaccaatttatattcccaccaacaatgtactagagttccctttcttctacacccttgccaacatttgttatctcttgtctttttgataatagccatccttatgagtgtgaggttttatatagtggttttaatttgtatttcccttatggttagtgatgttgagcacctttttatatgcctattggactttcaaattttattttattttttattttattcttttagggacaggatctcactctgttgcccaggctgggtgcagtggcatgatcatagctcactgaagcctcaaactcctgggaacacgtgatcctcctgcctcagcctcccaagtagctgggtctacaggtgcgtggcaccacactcagctaatattttaaaaacttttttgtagagacagggtcttattatgttgccaaggctgctgtcaaactcctgggcatgcatgatcctcctgcctcagcctcacaagtagctgggattacaggtgcatggcaccacactcagctaatatttttaaaacttttttgtagagacaggggccttgttatgttgccaaggcttttctcaaacttctgggctcaagtgatcctcctgcctcagcctcccaaagtsctgggattacaagtgtgagctaccacacctggcctctatttttggagaaatgactgttcaggtccattgcccattttttatttatttttaattaattaattaattwatttatttttaacttttaattaaaaagtaaactttaatattgaaaatgcaaacttggggaagacagaaaagatcacacacaaggctgtcacttcacacttggaaggttgcgcagcggccaggcagaggcgctcctcacatcctagacgggcggcagctgggcagaggtcctcctcacttcccagacagggcgggggccgggcagaggcgctcctcacatcccagacaatgtgggggccaggcagaggcgctcctcacttcccagacagggcagcggccgggcagaggcgctcctcacttgccagagggtgggcggctgggcagaggcactcctggggcggcaggggcggcagctgggcagaggtgttcctcagttcccagacggtgggcggccgggcagaggcgctcctcacttcccagacggggcggcggccggcttttcccattttttaattgggttatttgtttttctggtattgagttgtaagagttctttataaattttgaggccaggtgtggtggctcacgcctgtaatcccagcactttgggaggccaaggtgggaggattgcttgagcccagcagttcaagatcagcctgggcaagatggcaagacctcatctctacaaaaaaatttaaaaatatacaaattttgagtataattccttattggatatgtggttgcawtttttttccccagcccataggtcgccttttcgttttgttgattgtttcctttgctgtgcagaaacttttaaatttgatgtcaacttgtcagtttttgcaaggaaaaaacctgatacaatattgcaactgtagatcaatttggagacaattgacatctttacaatattgagtcttccaatccatgaacatggaatatccctccatttatttgggtcttttaaaatttctctcagtaaagttatagttttcagtataaagatactacatttctttttgtgtgttttgaaattattgtaaatggtatcttttaagctttcattttctgtttgttgctctttatagaaatgcaattgattttgtatattatcttcatatccagagatcttgctaaattcacttattagttcaaatagttgatccacagattattttggattttctatgtgcacagtcatgttacctgaaaataatgacagctttctttctaatacttagggctttatttctttttctcgccttactgtaccagctaggacttcgagttgaatagaagtgcaagatagtgaatagaagttgaataggtagtgttgaaaaatgtttaataattcattattaaatataaaattgctataggtatttttctagctatctttatcagattatcctaatagtgccttttaatgaataaacattcttaacttaatatggcccagtatacagtctcttcctttatgacttataygttgtacatcttgttttagacatcttctcatggcaaggtaatgaaaatattatcctatgttatcttctagagaagtcaagtatctgtatatgcattattctgtttctggactgtatattctgttccattgtttctacttatggttacttgtgcactgcattaaaaaagtcttaaggtttagtgtcaagttatcctaatatttttcttttgaaaagagtgtcatggccatccctggcccttcacgtttttgtagaaattttagaatcagctgtcagttccccacacaaaaatatggtcacattttaattctatttgcactgaaccaatgtatcaatttgagagaggactaacctctttacacaatgttgagtcttccagtacgtgaacacaatatatctttccatttatttgagacttctttaatttctttcaatgtttatagttttctggttacatattttctgcatcttttgttagatttattcctaggttttttttttacattattttaaatgttgtttattttttgctttcattttatgttagtgttgctatatagcaatttttttttttttgagacagtgtgacggtctcactctgtcaccaaggctggagtgcagtggtgtgatctcagctcactgcaacctctgcctcctgagttcgagcaatmctcccacctcagcttcctgagtagctgggactacaggcatgtgccaccattcctggctaattttcatatttttttggtagagatggggtttcaccatgttggccaggctggtcttgaactcctgacctcaagtgatccacccaccttggcctcccaaagtgctgggattacaggaatgagtcacygcacctggccggcaattgatttttgtttgttgattttatattcactaatatagtaattacacttacaaattctaataattatagattcttttagatttttacatctataatatcatatgcaagtaatgatagttccttttctaactctacatgtaagctgtatattggctttttttttttttgtcttatttcactggatcttcagtacagtgttgaatataagtgatgataatggcatccttaacttgttcccaatctgagaggcaaagcttgcagcattttaccatgaagcatgctgtggctgtagattaaaaaaatataatagaaactgtcccttctcgggggtcatgatgggcagcaagatgcatctgctagcagtgtcgttcaggtagtcaagccacatgctccattaataagcttccctgctggaagagacaatcctaaacccaatgtaccagaagctctgagatcagcagggcaaccatctcacgattctgcaatttcccagcattctaagggaagtaaattactggatttgtggatgtaccagacactgcagaagtaatgaaaacattacctcagaaatatagaagtaaacttgtgtctcaagaagaaattgaatttgtccattgtggagatccagaataatcactgtggctgctgtttgtcatcagacaaaagaattacctttacaataaaggacttccaaaaaaaaatagactgttttttagagcaattttacttttaaagaaaaatcaagcagaaagtatggagagtttccatatttccctctcctgctaatggtacatttgttacaactgatgaatcaatgtaggagtgttacattattactaactaaagtccatactttacatgatggttaggtctgtgttgtacagttctaccggttttgaaaaatgcataatgtcatgtatctaccaatatcatacagaatagttcactgccctgaaaatctccctgtgctcccccattcgtcccttcccctttcctcctctcagcccctggaaaccactgatcttttcactatttctgtagttttgacttttccagaatgtcacatagttggaatcatacagtatgtagacttttcagactgacttttttcacttagcaatatgcatttaaggttcctctgtgwcttttgtggcttgagaactcatttctttttatcgctgaaatgtgtattcattcatttattgaaggacatcttggttggttccaattcttggcaattatgaataaagctgttataaatatttgttagcacgttttgtgtggacaactttttaaaaagatacattttattagattaggagagttcccttttactcctagtttactgagattttttgtcatgaatggatgttggactttatcaactgtttttttyctgcactattgagataatcatataacgtttatcctttattctgtgaacatggtgaagtacattgactgattctttaaaaaatgttcataacagccattgattgatttttgaatgttaagctacccttccattcctgaagtaaatcccaattggtcgcattttatttgcttttaaatatattgcaggatttgctttgttactattttgtttagaattctttgtatctatgttcatgaataaaattgccctttaatttttttcttttctataatgttcttactaggttttggttttgtggtttttctagtctcatacaatgagttgggaattgttctctgttttccttctttctggatgatattgtataggattgatattatttcttaaatatttggaataattcaacagtaaagccttccagacttgaaaatttccttataggcagatctacagttctagaatattgatttggttctcttttccaatttatagttctctaccacaattctcagtttaaaataatttccttaaacatatttagaatagttaaagtctgataactagtatctggatcttctgtgattctgtttctgttatctgttgtttattttggtttttaatcatgttgccttgtcttttcatgtgctggttatttcctttcatttgcagaatattgtgttttaaaaattgtggaaatattttgagacacaagatgatgttattttcctctagagaagaatttcacttgcttatataatttgaagcaggattcagtccatgcaagagctggactatttcttgtttattcttattcatagggtacmgacctatgaggtcccaacccaaaggactagaggtttactaggccttcctcttcttggaaaatcgtaaattcaaacttttgtcactctagccctcaaaactattgaaaagcccttctctttaaggttaaggggtaagtgagttgctatggctatacccttatcaaaaagtagcgtgaaggatccttgtggtgatggatctgttctgtatcttgagtggcgtggtgggtacatgaatttacacatgataaaatagcatagaactaaatacacgcacacacacacacacacacacacgaatgcatgttaaactagaataaggttggtggattgtatcaatgtaaatttcccagttgtgatattatattataattatgcaagacattcctactggcaaaaaaggatgacgaatatatgggaaatctctgtattatttctttttttatggtgtagaaagtatatatatataacattaaatttaccattttaaccattttaggtgttcaattcagtggcattaagtaaattcacaatgttgtgcaacatcaccactatccatttccagaacattttcatcatctcaaacagaaactctgtacccattaaacaataattccctgttccccccacctccagtccctggtaacctctattctactttctgtttctatgaatttgcctattttaggtacttcatgtaagtgggrtcatacaatacttgtccttttgtgtctggcttatttcacttagcataatgttttcaaagttcatctatgttgtagcatgtatcagaattgcattcccttttaaggttaaataatattcgattgtatacacacacacacacacacacacacacacacacwtatatttgtttattcatctgttgatggatacttgggttgtttccatctttggagtattatgaataatgctgctatgaacattggcatacaaatatccaaattcctttttttagttcttttaggtatatatctagaagtggaattgctagatcatgtaattctgtgtttaactttttgaggaacaaccaaactatttttctacggtggccacagcatttttctaccatcagcaatgcacaagagttccagttcttcacgtttttaccaacatttgttattttctgggttttaaaaaaataataaccatcctaatgggtgtgaagtgatatctcattgtggttttgatttgcattttcctaatgactaatgatgttgagcatatgtttaagtagttagggaaaaacttgccccagtatccrgttggtttctgtgggtttccttttcatcccaaacctggcccctttgttcttcactgtctttttagctcaccagtgccttcaggcagctgttttaaacattttgtccataatttctagttgttttcaatggggtagttgatccatatratgtaatctaccattatttgaagcgtcttttgggttagctatggttttgcaagagaaaacaattgtaaatataattaaaagtcatttttaaaaagttggtaacttctgaagccatggtgaccttttataaaaaaraaagctaataactctttatgaatcttaagaatagcactaaatctttactcactaaaaatatttctgcatgctacagagatcatatagactaggtatatgggaggaaatggtgcagtttgttctccatcctacagtatttcagagaggaaaatgggcttaaagcacttactgtcaggaaaaacacacttactttatttgggtctcctgcttaaacatcatctctatggagaagctgtgttgggagttcccaggatcacccctaggtttgataattcattaggaggattcataagactcaaaataggtcaggcgaggtagctcaygcctgtaattccagcactttgggagcccaaggcaggaggactgcttgagcccaggagttcgagacaagcctgggcaacatagtgagataccatctttattaaaaatttttaaaaagactctatatagtcatactcatgactcatgattacagtaaaaggatacaaagcaaaataagcaaaaggaaaaggcacatgagatgaagtctagaggaaaccaggtacatgcttccaagagtcctttcccagtagagtcacaatggacatgcttaattcctccaggaactagtgacaacatgtgtaaaatgttgtctgccaaagaaacccacccaagcctgcttgtccagggtttttattggggatgaatcatataagcataaaacccctacatgatgaccctcagttactgatgttccagatcctcaagggaatggaggtgttcattataaatcacattgttagcataaactatctggacaaactactgcagagtcacttaaggactggcacatgcaagaacactcttatcagacagaacatcccaagagctcagttcccagcaaccagcccaaggtcagtcatgaaaacaagtctttcttgaaatagtgcagggtttgagcaacccaggcttactaagttgatccttttccacacagaggtctacctgatcaaatctgaagaaggaaagcaccctttgttactctctagtttcttactctttgttatataatcatttgtttatttgatgctaattaaataactttttttttttttttttttttttttttttgtgacggagtttcactcttgttgcccaggctggagtgcaatggcatgatctcggctcaccgcaacttccaccttccaggttcaagtgattctcctgccccagcctcccgagtagctgggattagaggcatgagccaccatgcccggctaattttgtatttttagtaaagacagggtttctccatgttggtcaggctggtcttgaactctagacctcaggtgatccgcctgccttggcctcccaaagtgctgggattacaggaatgagccaccgcacctggccacaaatattttataatttttaaatttctttattatcattcctccactagaatataaattatatgaggccaaagactttgctttattcatgactgtatctccagtgtctaaaactgcttgggctatagtaggtactcaacaaatattaagtagatgaatgaatggaaattatcatttatttaaatatttaggaatgccaatgatgttgactggatctaaattattgggacatactgttaccatatgaatgacaattttcatctctttcttcttcccaaacaggtccataattcagcagccaaatctttccctcgaaggtttgttttgcctttaaatgtcagtttgaatgcccctgagggagacaacctgagtccattgtcctatacttcagccagtgctgtgaaacaggctgatggaacggtatgctatgaacagacattagactaagactttgaactttaatggtgttactttattctttagctgttttccaaaatgtctggtacccaataacttttataacattcatccgagcaggttaaggttatgtaacatcgcttgcacaagaattgcagaaacagtgggaatgaacacagtgtttatctatccttcctgtgctttgaaacagagatatggaactgtctaatggttgtggaatgtctatccatttgagcttggcattagcaatccccaccttttattttttatttatttttattttttgagatggagtcttgctctggcgcccagactggagtgcagtggtgctatctcggctcactgcagcctctgcctcctgggttcaagcaattctcctgcctcagcctctcgagtagctgggactacaggcacctrtcaccacgcccggctaatgtatttgtatttttagttgagatggggttttgccatgttggccaggctagtctcgaactcctgacctcaggtaatccgcccgcctcagcctcccaaagtgctgggattacaggcttgagccaccgcgtccagctgcaatccccaccttttagataatatgtgcttagcacagacctatcattgtgtagctgtcaatgccttagctttagaagaataaaacgcatatctccacctcctatgtcatttgacagcttattaataaaacttgataatcattaygcatccacacatatgatggaaagaggaacaatattaaaacatgacrtagaacctcagttcccaagccctgtcacaaacctttatagggtatgaggctcctcactgacctacataagaggaaaataagaattaagcaaccactacaaatccttttgaaatctcttttagatctggtgctctcatgaaaatctacatcaggaggacctagaaaaggaaggaggcattgaatttcctcagatctactatgatcgattcagtggcaaaaagtatcatttcttttatggctgtggctttcggcatttagtgggggattctctgatcaaggttgatgtggtgaataagacactgaaggtgatgaaaaactctttcctttttgaacttttcagagacctgttcttccctttgaattagtttgttttatttaaagtagctcttaagattcttcagtatttaagcagctgagccattttcttttatttgagaactatgaaatcatctaagttaggggtatgttccttctagggaatccaaattgaccccaggcccagcaaaataattctatgtttgattttgatgttattttgggagcaattgtggggttagggttgttaggacacctatatttaaagttgatggcaaattatagttacacaaattgtgtttgatggtgatggaatctgggactgcaaagactccctctctttctcccatattcaactcagtaggcctgattcttttacttttggaatattctattgacagcctgtgttagtctgttctgtgttgttataaagaaatccccgaggctggataatttataaagaaaagaggtttaggctgggtgtggtggctcacgcctgtcatctcagcactttgggaggccgagggggatggatcacaaggtcaggaaatcaagaccatcctggccaacacggtgaaaccctgtctctactaaaaatacaaaaattagctgggcgtggtggcacatgcctgtaatcccagctaattgggaggctgagccaggagaatcacttgaacccaggaggtagaggttgcagtgagctgaaattgcgccactgcactccagcctggcgacagtgcgagattccgtctcaaaaatcaaaacaaaacaaaacaaaaaaacaaaaaaaaacaaaaaaaaaaggaaaaagaaaagaggcttatttggctcatagttctgtgggatgtaccagcatggtaccagcatctgctcagcttctgatgaggcctcagaaagcttagaatcatggcagaaggcaaagagggagcctcatgccacatggtgagagagtaggagcaagacagagaggaggaggtgccatgctcctttaaaacaactacctctcagacgaactaatagagcgagagctcacttgtcaccaaggggatggtgctaagctattcatgagggactggcccccatcacccagcacttcccactaggccccaccttcagcactgggctcagcactccagcatgagctttggaggggacacacatccaaactacatcacagccaaattcatgcttggagtgacaaaagccatagaaagctccctacttactacttgccttttatcaaatgctttttttgggacttgcaggtttggagagaagatggcttttatccctcagaacctgtttttgttccagcaccaggaaccaatgaagaagatggtggggttattctttctgtggtgatcactcccaaccaggtaaatatatttccctatcaccagtcagaaagaaaagtagcactgagwcatctgataaatcaaggatgcacactcatctgtcgatagtttactttgattccttttcccttctcttcccctccttactatttacatacccttttatctcaatccatattttattgttttaaagttctgtttggaaggccataataacaatttgtatttgcaaaggaatttgttatttacgaactacttacacatatttagttatcaaaacaactttgtgggataccattttatacatgtggaatttgtaaagtaaacaagttgaagtagacttgcatcagatctcctggtggtaaagccagtatttaaatccaagtcttttgacttccagtctaatgtttatatcatcatgtgtgctgccaatttcaatgaactgacctccaagtccaatgtcatcagtcctggtccagtgtcccaataacactatgcactatctgacttcttgtctagggcaatcttatggcaaataggttcactttgagtatcaactttgattaattattagtggctgcctggggtgcagggctctgaggccttttaagggttcagtaagaaaggctgtgatcaattagcgatatctgccatgggctttaggaggactttgtcctcatgccatgcacttgccattcctggaattagatttggcagatctcaatctgccttgcaatgctggcctttaaacagctccaaagtaacacaaaatggaggcatttctaacttggaagaaagagtttctgtcttttagaagattggaaaggcacaagcaaaaatattaaactcaaagaaattctgtgaaggtgattgatagaaacaacttaatttctttgctgtaggtatgaacttctttagccatgatatcctttccagtccagttcagcaactgaggaaacaatttgtgagtgtataggtgaggcactgtgctaggttctggggagaggtatgaagatgtgtaagacatggtcttgctctttctttctctctctctcttttcttttctttttaaagacagggtctcgctctgtcacccaggttggagtgcagtggcacagtctcagcccactgcaacctctgcctcccaggctcaagcgatcctcctgcctcagcctctgagtagctggtactacaggtgtgcaccaccacgcctggttaatttttgtattttttatagagatggggttttgccatgttgccgaggctggtcttcaaccatgatctcaagcaatccacccacctcggcctcccaaagtgctaggattacaggtgtgagccactgtgcctgaccaacatggtctctccattaggaattttacagcttagtggaggagacaggcaaatttttgatgaaaaaaagataattttcaatattgtcttttcttttctagaatgaaagcaattttmtcctagttttggatgccaagaactttgaagagctgggccgagcagaggtacctgtgcagatgccttatgggttccatggtaccttcatacccatctgatgggacaaccacaaggtctggaaactaggtttaaaataagtgtgcacttggacataaagactggagaaataaacactgaggactccaaaaggggggcaaggaggaagaggggcaggggttaaaaagctacctattgaatactatgttccctatttgggtgatgggttcrttagaagtccaaacctcagcagcacacaatatactcatgtaacaagcctgcacatgtaccccagaatctaaaataaaaataaaaagaaaaacaaagaatgtactctatacaaaagacagagcataaagggcaccgtacctcccaaaccaatgtcccaaatagacatttagtttaaaaatttctgttaaaaacagaattcactatttccttgccactgccaagtcacgccatggcagaggctcgagtgcatacaagcttcggttttacccttaatacaccatcatgaccaatggaggcattgctgctggaggtgtcatggccattaacactactttataagaggtgcggaagactgccctcactcatcatggcctagcatgtgcaatttgtgaagctgccaaagcgttagacaagcaccaagcccacttttgtctgcctgcacccaactgcartgagcctatgtatgtcaagttggtggagtcccatggtgctgaacaccaactcaccctaattaaggttgatgacaacaagaaaccagaggaatgggtaggcctctgtaaaactgagagggaaaccccygaaaagtggttggctgcagttgtgcagtagttaaggactaggtcaaagaatcttaagtcaaggatgtcatcgaagagtatttcaaatgtaagaaatgaacaaataaaactttggcactcatgtttcttaagaaaaaacaccacaaagcagaattcataatataactatggttatagatatttattttttagggctcttacttgaaataattaagaaagtattgatacaaccttttgaagagggttttaaatttcatttattggatatatcttcctctaggtaataataagaatacacgaaataaaaattcatgtattttggtcattactgcaagaattaaagaaagaggaaagaaacatgaaaggtggcttgccagttaagacaggtttattttagaaaaaacaaacccgagaggagccttttggctgagttagattagaggcacacttttttacagactaagagtttttaaggattcagggtgggagagtttattagaggcttggactgcttctgtgtttctttgttgtgtttatttgggagggagagttgtgtgtttgttcccatacatatttttttgcagctgcaggcataccccccaaagtctgcttttagcttccctatcttagtgcacctgaagggagaggaatgtccttattaaggcccactgtttcactggggcccattatatgagggtgaaatttggcagttacccaagagactttccccctacttccctctgtgcccgtgctgttttatttgtgttttactgtctgctttttctgtttgcttgtagttagaagagaagtgatttccttgaaatgcatgaggctagaaagggagctggaacttaaagtggcggtttgtccaaaataaagatgctcctgctctgtcaattaccatcatcggataggtggatgacagaggtcctaggagaagaaatacaaatgatcatagatagtagactttgaatacaaatctgaaaagcaccttgttctttccatcacagtctgcctgttaccattggtcctaaggtactcagaagacaggaagctggctatatcctgcatggaggcttcttctaaactgtttttttctctgctgtccacagcagatgctactgcaattgcacaaccctcctatggaccacccactacccccaccccaccctcagctcggctttgggagcttattttgaggaacatcactaaaatcaggcatttattctaatctctacgtgtatagttctcagggatggatgacaagccagtagtgcttcatttaattggacagcaggtggcactagagaccatataatcttcacatttctaaaccctgcctgatcttaccaacagccgtaggcaggcaaggtctgtcacttaaacgacactcttgccaacacccccaaaatcccttgttcccttttccttcagttacactcccttccctctgctgaacaccattccaggaccagttaaactgtttatgctccttccacatggtgaatgctctggagaagacccccagacatacaatatgtggcacctgtgaactcatggttaggctctctgcaccgtcctggactaacatagtttcctgtctaattttccttaagagtcacttcaaacttcacagaccccatcttctttagtgatgtgttccatacatgcaaatgccatgcgtggagctttgcactgtggcaataaagtaaaagggctgagttccatgtctgggtttgtgagatgcagaacacagcagcaggtttagaatggcaagaagatgcctaaacagaactaatgcagcagatgcaggagcaaagagcctcaggtaaccatgagagtgtaagtcccccagtgtttcctttcacagaagtccctgaaaaggcattcattgtacttcctcagacaaaacatggagatttgattgatcttcctagatctgaagggtgaaggatactctggatgacctctggcaagtccatagatctgtcacatctttcctctgtttataaatctctatcttaatacacagggaatgaagttcagacacatgaaggatagcagtataatcataagattttgacctaaggatacctgaattctgccttggctctgctctgctctctgtttcttgaaggagaacacaaaaaaggatcagtggcatgtcataatctaggcatatatgcctggtaatccaagggagaaagttctggtaaaattgagtgagcatatgaccaaggcccaaagcataggctgggcctcttcctctgcctaagcccaactcttaccactagccagtgtctgaggattcaaggaaagggagtaagtggtgcacaattgaggggaaaaggaagaggcaaatgggcaggttgggtcctccacaggaggcaagcagtaggaaaacgtatgaaccagccagctaggcctccttggggcagggtgggagtaggggagagctttggcttgatttttttttttttcctctgagcatagctctggagagtaagcaacaccatgtgtggtacttctaacacattgtaggcctgcctgtgagtcaacaaggcccaaccagtgcctggaaatgtgatttaagcagatgaaaattccctttttgtggggagctacaagggagataagggggtgaaacctcctttcgtttatacttaaatgacattcaaggcctttcaataatttggtccccaatcaatgtttccagtcttacctctcacctatctccccattgtagccaagaactcttcaatatgcagtaaacaagctgtacttttccacatttcctttgcttacattctcttcctggaattcccttatctacctggtgaatcttaaaatccagctcaaaagtcatctcttctttgaagccttcttttacttcctgagggagaattagtgttttttttcttttttagtttgtcatgatttatttctgtgtttagctccctcactagcttgaactgtatgaggacaggaaacgtgtttattattcatactgcgcccctggcacttagcagtgcacttggcattcattagatgttaaataaacactttttttttaacttaataagtgaatgaggaccagaaggtgatagatatggggcctaccttgccaatatatgtccattggagtaccttatgggatcttttttttggtgggggggcttgggggtatttattaagtgatgctttagtctcagtctctgccagcaactggggtgtgggttgactccactcgccccaggatttcccagacttgctgttttagtggagagaggcaggaagccaactatcctctaagccccagcttgggaagctaggctagtactggggtgggggcagcagagctgagaccctccacccccacccccagcccccagcctcccagcctgagggggaggagctgaggcaattttggccgcagcctcccacacacagccctgcccttggtgcgccattcactgccctgagttattcatgatctctgctcccacatattcaccttgacactccaaaagccagccccacacccagccccttcaggtctttagtcctggggagagcaaaaggagggacaggggccctttgactgagcagcttcaaggggcctctcctttctgttacccactgaatgccagccccttgtcttcagccctcccttagataggaaggagggtggtggcctcagactgcaccccctttcttcttcttctcttcctggcatcccattctgtcccagcacagcagccaagagcacaaagcacagcacctgtgaggctggtgggcacaggagcccgtgctggcacaggccaaactgcctgcagccctaggtggggcctgctcctgccctagaagctagacagagggagacagaaagcagaagtggggcaatgggatgtgcggcccctgtggcaggaggaggagcacacgaaccctgaccctgcttcttggtgcaggccactccaggccttgcttctgtaagagactctgtggctggctccagagctgcccrgcccccataaagggggctgaaaggaggatgggtggtccttgaggaggggaagggtctgcagagaatcgctcagacaccaggtattacccagctattcccccaagacctggagggtccaaactcctggccccaaccacctgcatcttgggtgaggaagaagggcctcttctgctgttccttcccctcagagatccaagaacccactccagtgaaatgcaggtacccatgcctgccacctgcccctggagacagcaggggagttgaggcaggaaggctggccaggggcccttatgggatcttttagtagaagctagccttctgagacaacgcagccaagcacaagccagtaaatgttgcaagagtgaagggagaactatacctaaatggctgttgatctcaaggcactgaaagctaagttaagaggaatgttatttgcttattggttagtgtgttagtctgctagggctgccataacaaagtaccacagaggtcttaacagaaatgaattgtctcacaattctggaagctagaagtctgaaatcaaagttggttttttccttctgagggctttgaagaaagatctgttccagttctctctcctgggcttggagatggtgttgtctgtgtcttcacatgatcttccctctgtatgtgtcagtttttgagtccaagtttcccctttctacaagaacattagtcatgttggattaggtcccatcctaaacacctcatctcaatacgtgtgcaacaatcctatttccaaacaggttaaacttcaactctgcaaatgcagtgaaatattttactaaaacaaacaagtattattaataaaaataattttgcagaaatttctcttactctttcactttattttgattctttaagctggttttggaatgagcaactatttgtgtaaccactgactgttagagagtatttatcactgaggcagtccatacctgggaaataatgtttctgttctgagtgatctcgcaatagtaattcacttatctgtggctgtattttcttatctgtaaagtgaaagtattgaactaaacagtctctatctcgaaaatctctaaatgttatttgaagttttttctttacagtacaatgggrtagatgagacaaacatctgaaaatgtatggagagtgtttgctaaataacctgttagtagtttaatgcagaacaaacagaatatatagctgtaaataggagatatttgagggaaatcaccatttgagcttatttctatcgcccccatgattttatctttctttttacaggaaacttttccaagcctgttattaatcagtgacttgtcctgcttttcatcatatacagtgatgatttttctcatatagagtggagctgtcctctccagtacctggaacaatgccagccacatagtagatgcccaataaatatttagtgaaagagtgaatggaagcaagaggtgacatgattctgggaactgtgtgtagtttggttactcttgtgagtagatgtgaggaaacaagatcctttcactctcaatgtgtctacactggcagaagaattgctaatatgtgtttaggggtgtctgtattcacactatgccaacccagagtaataaatgggtccatacatgcttgtggataagaatggctttagaatttcccttagtaagaatcattacacaacagtccaaaggactgttgtcacgtggtcctatttgtgctctcaaattcttgctctttaaaaattttgttttaaagaaacggtattaatcctaagcaaaaagaacaaagctggaggcatcacgctacctgacttcgaactatactacaagcctacagtaacaaaaacagcatggtatgggtaccaaaacagatatatacaccaatggaacacaacagaggcctcagaaataacaccacacatctacaaccatctgatcttagacaaacctgataaaaacaagaaatggggaaaggattccctattaaataaatggtgctgggaaaactggctagccatatgtagaaagctgaaactggatcccttccttacaccttacacaaaaattaactcaagatggattaaagacttaaatatcagaccgaaaaccataaaaaccctagaagaaagcctaggcaatgccattcaggacataggcatgggcaaggacttcatgactacaacaccaaaagcaatggcaacaaaagccaaaatagacaaaagggatctaattaaactaaagagcttctgtacggcaaaagaatctaccatcagagtga

SEQ ID NO: 94828 - DNA, 18791 bp, Homo sapiens
cagagtgagactgcctcaaaaagaaaaaaaattattttgtttgttttttagattttgtagagatggtgtttccctaagttgctcaggctggtctcgaactcctggcctcaagtgatcctctcgcccgggcctcccaaagtcctgggattacgggtgtaagccaacatgcctggcccctttacttcttcttttctgttttggtcacaaaacatttctctgttgatcactgtagtgtgtgtgtggagggaagtgggggaggtacactcttaagaaatgaaatagttaacatcttggccctaagatttgttgtagagatggagtcttctcattctgttccccaggctggtcttgaactcctggcctcaagcaatcctctttcctcggcttcccaaagtgctgagattgattacaagtgtgaggtactgcgccctgctacaatcctttaataggatgtttttggggggggtggcagggggcaggatctagctcactgtaacctatactgttccagtgtaacctgcaccaagccatcctcccacctcagtctcttgagtagctaggaacacaagcacacatcaccacacctggctctaacacgattttgctttttgcttttgtcattttggctgctgttctttttatctttcattcattcaaggtctgaagatggagataataggaatcttctcatctcaatgtgctctttggcccctcctcttaaactgatgcccctctcaggccctgagggatttggcctcaggttgccctggaaggggtgtgagtgatcagacaggtgactgagagctgggacgcctgaggcctgcctaggctgagtcacctagtaatgttgttgtcattgttcctgttgaagtcccagctcagtgtcacagacctttgtggaagcaacaacagctcccatccttccaacctttctggagaagccgtggcctgatggtgagccgaatgggctggggggggagaagaaggcggctggggcggtggggagatctggggcccggatcggtgcccctcctccccatgccactgccacctcctcctcctccttcatgccggggacctgggggagggaggatctccatcttctctctgtcccctgcccctcatacaagaagctccccctcctcattttcccctcccaccgcagggcccccttgctcagtgctacaggggacaggggcttctcagtcttgccacagtgctctccctatcccagccacccccccaacacaggctcaacctgcaatgacacctgcctctgcatctccctcctggggatcccactccaccccacccctggccccggcaacccccactccctcacagcagtgcccccaggactctcctgggctgcgggtaggccctttgatccctgaacaggattatgagcggctggaggactgtgaccctgaggggtcccaagactcacccatccacggggaggagcagcaacccctgcttcatgtccctgaagggctccgaggtatgtgtgtgggtgtgggtgggagagggttagtggtgcctgggagctccagtacttaccccaggctgggcctctggcagcgggttgagaacgtggagaattgatcacatgccaggggctgacactctcccctctgtgcccaggctcctggcatcacatccagaacctggacagtttcttcaccaagatatcctttgcgctaggcctgcagaggtggcatgggaaggtcctcttggagctggcactgttcttggcagggagactccgtgagggcgtcatgggtgggagacttgttggggctgaggggaggtgtcctcaggagaggccccccgtgcctcaggcttgttccttgacacgcagccacatctacagctaccaccagcggaatggctttgcctgcatcttgctggaggatgtcttccagctggggtgagacgcttagcccgggcccggaactcggtcccctgggcccatggcttccttctgtcattttgcttccttaattgtgccagctgcttccatcccatgctttcccgagcagcccaagggctcagcaggggcagggtcagggaggataaccatgggctgctctgggggctggggcaggagcccacctggctgtccctgatcactgcagcatcccggcacccccccttcctcccggcagacaatttattttcattgtcaccttcacaaccttcctccttcgatgcgtggattacaatgttctctttgccaaccaaccaagtaaccataccagacctgggccgttccacagcaaagtgaccctgtcagatgccatcctaccctcagcccagtgtgctgagaggttagtgacaacctggtggggccctgggggtgaagcatgggcagtgggtagaggagtagacgggagccccactttgtcccgtcatctagatcagcagttctcaaagcttttggtcttaggaccaaaaatacacttaatatactttaagttgtacttaagtgtattaagttgtacttaaagtgtattaagtatatcttttttttttttaagacagagtttcactcttgttgctcaggctggagtgcaatggtgaggtcttggctcactgcaacctccacctcccaggttcaagcaattctcctgcctcagcctccccagtagctgggattataggcgtgcaccaccacgtgtatttttagtagagacagggtttcaccatgttggccaggctggtctggaactcctggcctcaggtgatccacccactttggcctcccaaagtgctgggattacaggtgtgagccactgtgcccggccttttaagtgtatcttaattacagtgcattaagtgtatcttaatacacttaaaattggttgagaatcctgaaaagcttttgtttatgggagtcgtatctatccacattttaccttataaaaaattaaaattaggccgggcatagtggttcacacctgtaatcccagcactttgggaggctgaggcaggaggattgcttgaagccagaagtttgagatcagcctgagcaacaaagtgagaccacatctctataaaaaataaaaattagctgggcttggtggtgcgtacctgcagtcctagctaagcctagtcaggaggctaagacagtgactgtctctgatcactgcagcatccctacaccctcctccctcccagcagacgattcattttcattgttgccttcacaaccttcctccctgaagcatggattgcaatgttctctttgccaaccaaccaaataactgttccagacctgggccgttatttggcagggagataggagctatgtttctactgctgcactacagcctgggtaacagagagagaccttgtttcaataaaaaggaaaaaaaaaaaagaaggaaattgtagctgagaacaactttaaaatgtaagagtgcggctgggcgtggtggctcacacctgtaatctcagcactttgggaggccgaggcgggcggatcacaaggtcaggagatcaaaaccattctggccaacatggtgaaaccctgtctctactaaaatatacaaaaattagccaggtgtggtggcgggcgcctgtagtcccagctaccctggaggctgagacaggagaatcatttgaacccgggaggtggaggttgcagtgagccaagattgcgccactgcactccagcctgggcgacacagcaagactccatctcaaaaaaaaaaaaaaagagtgtacaagcacacatttcatcagctgtcagtgtgatgtgacatgttcacgtgtcttgtagcctctggaaaactccactgtactctcagagtacaagaatgaaaacatcagaaagcattagtattatttggaaaaagtttgactttgcacatttgtgaaggccacttcagcacccaccccctgccccgggctctaccttgagagctgctggtctagctagatccccctcctcatgatggtttttcctcactcccgaagtctggtctgcctctttctcaggcgcccacctttctcccccactgcccgcccaaccccatacaggatccgctccagcccgctgctggtcctcctcctggtcctggctgccggcttctggctggtccaactgcttcgctcagtctgcaacctcttcagctactgggacatccaggtgttttacagggaggccctgcacatccccccggtgagctgggtggctgtgtctgtgcagagggtgccgtgagagggtgggcagaggagaggggaagaagtgggactgtacaggtggaagggccaactggaaagagggcagaaagagcgaggtcttattgacacctgccctaggcccagaataatgtcaggagggggctaccaccacctagagagcatggcccttaccctaagggagtttagtttatttagatggctcatataagatgacatatagttacatgtttgtgctaaaaacattgattagagaaaagagaaagggcagttatctggcttttcagagctggaggaatttgggttgggcttcggaagggcaggacaggaggggaggggagcacattctaagccccagtgcaggaaggtggggaaaagccatgagcttttggaagctgcagtgaggagatggacccatcagcctaaaacagagccttcaaagccatcccccgcattgcaggaagccactgcattggcctgtcactgtccactgcttatgctctgccctttgtttcctcaccatcttgagtctgctcctccctcctctgtatctaagttctttctttgaggcacagcttgaaagtagccttctgcagcttgcttcccttgctcccctgggaggtccggagccctctgcacagcctttatgtgcagcaaggggagaggtcttagaaggcccctgagcagaggagagggaggaggccggggaagcagaggtggtgagagcggaagctggacctcggattggctctggcgggagactgctcacccgtctcgttctcctcctcccttctttcccctcctcccctgttccttccaggggaagggaagggaagacactgggatgtactggagaggccagcctgggggacttgactaacctggactgggaaagctgagtgaaactgggctgaagtgaggtttgcagccttcaaatgagatctgacagtgccccactgccagatgtggacatagcccaggtcctgggaaggcttctggtgacagagccgaagatggcctggagtcgggtggggctgggagtgtaaagcatgcccaggcagaaggtggggaggattctgttccagagttggtgggtgcactggaaatgggaaggagagattctcccacgaactgccagacattctggttttttgtttttttgtttgttttgtttcttttgagacagggtctgggtctttcacccaggctggagtgcagtgctgtgatattggctcactgcagcctctgctccccagtagctgcaaccacaggtgcacaccaccacgccctgctattttttgtatttttagtagagacagtgtctcaccatgttgcccaggctggtctcgagctcctaagctcagacgatctgcctgcctcagcctcccaaagtgctgggattacaggtgtgagccaccgcccctggccagccagtctgttttgtgtgtacaactgagggggcctcaggcccttaaggagctgagaagccaggtccagcacctggaggcgtccccaggaagtgcatgactactggccacatgaatggcagggatgatgaacagggcagtttagaagaggatgaaggaagtagggcgcgcccttgttagtgacagggttaagggagggcagaaagagaaaggtgggagagggggacgatgtagcttggtcatggcgagtttgtgatcgcaaactcagtttgcgggttttcaggccgcacacttaggggtgtggagcttgagcatcactgtggagaggaatggggggtcgctggctctcatcagtgcccctttcaggaggagctgagctcggttccctgggcagaggtgcagtcccgcctcttggcactgcagcggagcgggggcctgtgcgtgcagccgcggcccctgacggagctggacatccaccaccgcatcctgcgctacaccaactaccaggtggcgctggccaacaaaggcctgctgccggcccgctgcccgctgccctggggaggcagtgcggctttcctcagccgcggcctggcgctcaatgtcgacctgctgctcttccgcggtcccttctcgctcttccgcgggggctgggagctgccgcacgcctacaagcgcagcgaccagcggggcgccctagcagcgcgctgggggcgcacagtgctgctgctggccgccctgaacctggcgctgagcccgctggtgctggcctggcaggttctgcacgtcttctatagccacgtggagctgctgcggcgcgagcctggcgcgctgggggcgcgcggctggtcccgcctggcgcgcttgcagctgcgccacttcaacgagctgccgcacgagctgcgcgcgcgcctggcccgcgcctaccgccccgccgccgccttcctgcgcaccgctgcgccccccgcgcccctgcgcacgctgctggcccgccagctcgttttcttcgcgggygcactcttcgccgcgctgcttgtgctcaccgtctacgacgaggacgtgctagccgtggagcacgtgctcaccgccatgaccgcgctcggggtcaccgccaccgtcgccaggtgcgacggcagatgcccggggtggtggtgtgtgttggtttctctgatctggggccatgtgaggttccccccgaatccttacctctcccaccactggggccctctagccctacatcccaccgcgcgtcctcctaatcgcaggccccttccccccacggatcccgcctttcaggtctttcattccggaagagcagtgccagggtcgtgcgccgcagctcctgctgcagacagccctggcccacatgcactacctcccggaggagcccggccccggcggcagggaccgcgcctaccggcagatggcgcagctgctgcagtaccgagcggtgagggtgggcgcgacggcgggctgaggaggaagttgtggggtctgtctgcgcggagggtctgtctgcgcggagggtctgtctgggagagggcatgagacaaacggactataccaggagtctagggagtgactgggtggggaggcttcttgccctggcgagggtcgctggggactgcttggtcctgataacgcgcgtgggcccctcagcgacccctgctcagcctcaccgctgcttccccaggtctccctcctggaggagctcctgtccccgctcctcaccccgctgtttctgcttttctggttccgccctcgtgccctggagattatcgacttttttcatcacttcactgtggatgtggctggggttggggacatctgttcctttgcccttatggatgtgaagcgccacggacaccctcaggtcagagccgttccctggccctgggggtttgggctgggtgggagttcgcttgcctctcrggagcagacctgagttccagccctggctccaytgcttgctacctgtgccgttgagcgggtcacttcccttcctgtgctctcgtgccytcgtctgtcagatggcaacaatggcaatgtgctctccagagcacagccaaggccaggcttgtgaasacacagattatgtctgtatagcctatratggagttgctggcacatagtaacgtcagtaaatgggagcaaagaccacctgggggtgaggaatgggcttggccrgtgggtggggctgagtaaggactggtgcctggaccaaggctgtcaggatcaccctgggcaaagcactgaggctcagccctatccccgagctggcaatcagtccaggggtgacgaatagatgacaggcccaggttctgcactgctgctgtatttttgggtgatggtgaacaagtccccattgtggtctgtttccttcacgtggaagatggggcagtgtttcctgtcccacctgttcccataaggctcagtgttcttagcacctgaaagactgtccttgctcacagtggctctcggcgggacagactgaggcctcgctgtctcagcgtgcggaggacggcaagactgagctttctttgatgcggttctccctggcgcatccactctggcgccccccagggcacagctctaagtttcttgggcacctctggggccgagtacaacaagatgcagctgcctggggtgccacctcggctcgcrgcccctccaccccgggggtgctcagcaactgcacctcgcccctggtgagtcccaagcctggcctccccttctgccttcacccccacaactcctctccaaacccttcccctctaggctcaccttaggtagtaacctgcctcaccagcccccgcccccagcctgctctcctgccttctttaggcctctgcttcctccctactccrtttctgtcctctcttctgactccctctttggctttccctctcctcttgcacccagcctgaggccttcctggccaacctcttcgtgcaccctctcctgcctccgagagatctgagcccgacagccccctgtccagctgyggccacagccagcctccttgcctccatttcccgaattgcccaggaccccaggtgaggagtggaggctgagatgcaggggcatgtggaggggggtgggctgatcctgtaggagtggggagctggggcgctgaggggggattcagaaggggagtcctctggggtgtggcgggaggagggcatgacttttgacstgcttcatgttatgttccagctctgtgtccccaggaggcactgggggccagaagctggcccagctcccagaacttgcttctgccgagatgagtctccatgtcatctacctgcaccaggtgagtagaggggtgcccaaaggagaaatgtggagagaaggcaggtgaacaacatggagactgaggtggggtggagtctacggaagggtctagcagagtggcaggaggaggctgaaaagccctctgcctctagcccaggtgcttggccctgccctccttggggtgcagccctcattcctcctcctttccatgcagcttcaccagcagcagcagcagcaggagccgtggggtgaggctgcagcctccatsctgtccaggccctgctccagcccctcacagccaccctcrcctgatgaggagaagccatcctggtcaagtgacggtgaggagggtggggcctgcaggggacagagcctggtggacactgggcatcatggaactgcccagctgatggcctttttcaccaggctccagtcctgcctctagccccagacaacagtggggaacccagaaggcccggaatctgttccccggagggtttcaggtgaccacagacacccagaaggagcctgaccgggcctcttgcackgactgagaygactcctcagggtcagyattgcctcctgtgaggggagggagaaaggacggcataggtagttggtttggagtccgacttgaagcgatgggagcagtggtgggaatttggggtgatgggaggtggtcatctctggaatctagacccctggactgcttgccaagagccgtctcctcccacaggtaccctggcttcggcagccacaggagattggagggtggagtagaaaaacacaaggagtcattgttagaggccccatagatgacaggcccaggtgctttagttgggcaggacctgggagtcagtgaggaactcgccccgagaacagagaaaaggtaggcaaggagaggagatgctgatggcatctggaaacaagtcttagagatggtctgcacccagagggaataaggggagacatccccaactggaatgtgtcctggagcagctgcctgggaagaagtcctcgagtttcctcaaggtgggggacagaggtcaaggatgaggccgagctaaatggaagggcgacagtgaggcaggtgggctttaaggctgtggattcgtcatgctggcggctgccagcagcactttcaggttccttggggcttgtaggggatggggacttgtcagtggaaagacgggagggatgatgtttttggacttcagtacgggtgtgatgtcccaggaagtgggtgtggctccccatcctgtatgaaataagcagtaaagcttgctcatggctgttgcacatctctgtgactcttgtttctggcaggccccactcctggcagctgagtgctgcacctgccttctcgatyacgagcctgagaactgcacgggggagcagcccagactggctggaaaccatgttttcagagtgcagggtcaagtggcgtgtaggactctgtyaaaagaatgacccctttccccaccacatacccacaactgcacaggttaaaacagaaatcttgtcattttataattgtaatccacgccgggtgcagtagctcacacctgtaatcccagcactttgggaggctgaggcggttggatcacgaggtcaggagttcaagaccagcctggccaagatggtgaaaccccgtctttactaaaaatacaaaacctagccgggcgcggtggcaggcacctgtaatcccaactacttgggaggctgaggcaggagaatcacttgaacttgtggggtggaggttgcagtgagctgagatcacgccactgcactccagcccgggcggcagagggagactccgtttcaaaaaaaaaaaaacaaaaaaaaaaaactgtaatccacatgagctggggtaggcactttagtagttctcctaacatctggcacagtcccttatggtaaatcttcaataataaatacttgatttagagattagactttacaggtaagatactcctgagagaggcaagaggaatctaacattcgactaagaaacaggaagcgggtggcagtaggccctggggtaccgctgctgggaggggccttccagattaaggcggacccaggcccgaggcaacaggcctagagagggaaaagaggcgttttgctccttcctggaggaataatgctgaatccttgcagcctctggacagatgtgagaaggcaccacctcaagaggggaggagcggggctgatcctggtcgggcggacctgagtcgggcagccgctctcccggaactggaagggaaagccaggyggctctcaggggctgttggtgtctgagccgggagggtcgaacgcccagggcactgcgccccgcaactgacgctcctgcaaggaaaagctctgggtgcgtatgcggcttgtcacctcctgggtgcgcagcgtgagcccgaaaatgtcttcgtggtagcgttgctgatcctgtcggaaaagagcacagtggatcagaacccgactcggagaccttagcaggaaccccgcacgctcaggcccggcccgcccctccgcacccgcagcacgccgatgacgtcgccggcctcgtccagctccatgtcgccctccgtcgccaggatgcgctgcacggtctgcaggacgttggttgccatggtracatcgccgcagacaaacatgtggccccgctcgaggcacagcacgcggtgcacctccgcagccagctccgtcctcaggatgtcctgcacgtaggtctgcggggcggcggggttagggcgggccctggtgggggtgggcgcgggggcgcagcccggggctgctggctggccctggacgtgaaaktctccggagcgggcctggtggggcctgcgtgccctggggcgktgtcaacaggggcagagccaaaggggcggggcaggggcgggaggaggcgggcctagaggggccggggcacaagggtgggccagagtgtgcaggggtggctgagtggtcgtgggaggccacgggagggccgtggttggtgtgccccgctggagagcgcgagtcctcccctctctccctatcttcaggttaccattgcgccctcagggtctcacaccttggggttgtcaggttcccgggagaaggcggtgaggactcggccaaacaccccgcgctgctgggcgttctgcacytcgtcgcggtagagatggtcaagttgggagcatcggcagccgaacaccaaagtcatgggagtgggctgcagccctgcaagcaaccccgcgcttgggaaggctcttctccggggcacagtgctagtggggcctccccacaggccaccgtcgcccagcctggcagcccagcgttttgggctgaaaccacyattactttggctgtttcatctctaagagagtgtagaatgctttcacagagaccctgcacagccctgatttacagagggaagggaagcgcgggtgaggtggtggcccctggtggagctgcgctagaatgcgcggcttcggactcagaattccatgccctttgcattgtgtgacatcgcagtccccttccccgctcccacttcatattctcccatacttataactctcctcccagtcacagccctcttcttttgattgacagaccaccctgggcaccccatgctcaatatgaacaccttgtagcatccttaggtcttggacagacctcggtcagctctggcacagtcaagaatccaccttgggcagttcttctttgagtcttagccctaatcccttygaaaattctattttcctttstcctcaatccagtcaacacctactatgtaccaggcaccaggaagccagaagctcagggcccagcccttgcctttggtacctgccctccccttggtctcatgagcgtcttttcagctttgtggactttgtttcctgccctctctttcctatttcctgccttccagccccacccctctgtccctagattgtgtgactcccttcaggcagtcctttagtccccagcctcacctttgctctcaatgtcatgcagccgctcctgccagaatccccggaagggggcaatgccagtgcctggacccaccaggatgcagggcaagctgggatcgggtggcagccggaaggagggagccctggcaggagagacactccatcaggtcccctttgcctttcctgctccaccattctcaccatgcagggtgggtggagcaaggaggacccaagttcttcccatctcaaaaaaaaattaaaaaaaaaacaaaaaacaaaaaacaactctacttgctgaaactccttggatctgtggtttctggagattgcaccaaaggaaatatagttcattttggattgaagaatacttagatgactcaggggatttagaaaacgtgggaagggtgaaagacactttcagttcataatgggttcactaagtgtgtttattttaagtatccttaatagtggtatttagtttatgttcagtagatgggtacggtttatttgtagtttagccacctgggtggatttgaatcaccaggcccagctgatggcagcctaggaactgttctcagtcctaccaggacttttggttcctggctgcgagagcgggcaagacttctggacacagcatgaaggaagggtctcttaaaatccttcaccctcggtccgggcgcggtggctcacacctgtaatcccaagactttgggaggcggaggtgggaggattgtgaggtcaggagctcgagaccagcctggccaacatagtgaaacaccgtctctactaaaaatacaaaaattagctgggcgtggtggtgggtgcctgtaatcccagctactcaggaggctgagacaggagaatattttttttttttttttgagacagagtctggctctgtcgcccaggctggagtgcagtggcacaatcttggctcactgcaagctccacctcccaggttcacgccataggagaatctcttgaacccgggaggcggaggttgcagtaagccgagatcgtaccactgcactccagcctgggcgacagagcaagactccatctctgggggaaaaaaaaaccaaaaccttcaccttctttgagtccttggtgacaccaaggccaaagggtggtcttaaccctaactagtagttctccctggattgagtgaggatttagtgactgtagttcccaggtgccatgctgcccaacatcagacagcccagggacatagagaggaacacagaagctttcagaaagccacagggccagccggtttgataccagctctggctctgggagctatagtttcagggcagaactctgagtctaaatgaatgagagagccaaagcttagccagagttctgaagtgacctaatgacaccacacccttgacatgttacagagctccttcctgtttccagtgacacccctcaccagtgacactcctcaccaaagctgccaccctgaccctgggcagctccccaccaagtcctccatctcacttacccccggatgaagcagggcacagggtctccgggcttgagctggcttagccacgtggagcagactccatagtgcagggggcccagcccatctgggggtgggaaggagaggccggtgaggggccagagaggggccggtcccaaccctgctgtggccaggcctgctcctgcttgttgcctcaccctgagtcctgtatgccagcacagctacagtgaggtggatctctcctgggtgggtgctgggtgccgagctgactgagtagtaccggggctggagcagaggcagctgggtgaggagcagtggggcaggcagcgccaccgacgggaactgctccagcacctccagcagcgtggggcagcggaaccacttccactcctcgtagcgtcggggatcctggcggggcaggatgcagtgggttggaggccccatagcccttcctagtaacctcccttcttgacccctcccccactgagcctctttagggtttctccctgctcagttcaggccaatagagttttctctaagacctggagaatccagccatgaattcctccctgaggagctgggtcttaaagcaccagtgcatgtcagccaggagaagaaagtccaggggggactttgcatgggggtttcctgccactggggtccccccagctcatcccgtctctctagcccctgtgcctcattggggtggcccccaacctggctgagggcctccagctcctgctgttccctgggctcttctgccaaggtgctgagcagccgcaagagctgagggctgggtggggaggtgatgtccaggaagaaggtgagagcctggcgcagcgtgcacgggggcagccgggggtcccgcacccagccggggggagggccacctggggatagtgcacagggagctctgaggacagggcccagcaggactgcagtacctgggctgatgtttgtgttttggtgactgttagagagcctgcccttgagcagcggggtcggcctgtctaggtagcctcagtgtattgttcgggggcccctggccggactgggttggtctgggctcctctgcctctgactccacccccttattttaaataaagcccaggcattgatgtggcagcaaatagccccagtgccagctccagagcaagctagattgctaggggagccttggagaggagcccagagggaggggacagccttttggtgggggtgcatttgagggtgtggggatggtccagcaacaaggccagcccggcagtgggcagcacagccagctctgagcctgcctgctgagctgtggaggaggtggccaccccctgggtcgggtcctgagctcctggaggcctggggccgggggtggggctgggcatggggctggtgtgccctgttgcttcccaggctgcccctcaccagggctgcccttctccagctgctctactgccacgggctcagtgggcgccggcgggtcctccacgcggctcagcagcgcctccacaaggccgggccggttgggcgggcagacacctatgtggtcccccggctggtactgcagcccctcctggcctccggtgtccaggcgcaccaggatggtggccctcctgggggtggggagaggggcacttatggggagtcagagaggggtgggggcgggagaatgtgggaggaggagggtccagggtcagggtgttcaggacaggggttggggggcggtaaagccgtcgtcctcacgtggacttgctgctttgcaggttttccactgagcggattgtagcctggaacatcttccgcctgtgcacgtggatcagacctgggggcggggaggggcaaatgaggcagcctgagctagggagcagggcctggccccagagtgctttagtcccggggtgtgggggcctcagagaaccagccgggttagggtgagggcagggcccacctggcagcaactgcaggccctcggcctgggcgctcagccggtacctctggcgcttccagctccgtttggggctgaagatgtctcgggcggcggccttggcatcctctcccacacagaaggtctcacaggcggcctgcgggacaggccggtgagggctgaggacctcccgccaccaggggtcgccctagtgaggcgcctgggcggcttcactgcgtcttgctcctggggggttggcagccccagtggctgaggccggcgccaaggacagcaccttttccgccagcccatttcatggattggccgctgggcccagggacccggctggctctttctctgcacgtcctgattggtgcatcgttccttatctggtgcgtgttaatcccgtgatccgagaagcatagtgcttggcacacggtagctctgtgaaggcgtctgtgtgttcagacctgcattcaaattccgaatcccgtacttacagtgacatgcctcagtttccccatctttacacctcattgtgttctggtgaagattaaatgagatactttatgtaaagcccttagctttccacaaagtgcgtgcagatagtaagtgctcctgggaagggacgcacaattcgggcggcagaggggaccccacggggcagatccctgggagggtgtggatcccgtctactcctggtcaggcacacagctggaaaactgctgggccagtcccaggcttgaaatgcagggctcacccgtgattggctgagcctcatatcaccaagtcccgttaatctttcttttgtggtgcgtgtgaagtcttatatctcttccttccttcctcggcccctccctcccttccttcctatctccactgctgctgctctgcttagctcagccttcctgcttctggttcggtgatgctgtaatggatcctacgcctctaaagtcctattcccaaaacctgatgatgtggtctcatcccgctgcaatggctctttttgtttaaattctttaagtcttattttccgttcccttcttcccaatcagggcctatgtgtttctgcagcctgacctccccgtccctgaggtagcccccactccctctcctcctaggatgccctcctcctccaatcaaggcaaatctgctgagctccagcctgggccccgggacagcagcactgccctgaacagtgtggcactggggagaccgagcccttgtcaactgcagacatgatccccagacaggcagcactgcccctgaggaagcccaggcttaaaaagccacagcccccagggatccacctctccctgtgcttgcttgcccggcccgggaccagttctgcggtgcaggcaccgccccaggctgtctggcctctggcttcctgtggcttctgtgctggcctcagcttcagcccttgcctctgtctgaccttctctctgtcccttccttctccctccatcctgcccatcctgggtggggtcccctgccctgccctgcaccccctccctttgtgcgcccacttgtgaggcccagcctgtgcctggctgaagctccctcctgccagggccctgcctgctctctttcggctgcacttctgcctgggctaggcacccctgtggtcggcagggccatgtcatcctctgcccctgacccagaagagctggctatgccatggagagatgagggtggattttggaaggaacaggaagggaccaaagaaccaaacagaatcagggcagagtgaggcaggaggaggcatcccagggggcaggagtcagagcaggggctgggctgggctcacctggaaggcagcctgggcccagcctcggaaggcctcctcctggccgcacagctcgtcgccctggcccagctgcagcagccgctccccgcccagttcctccagccgtgtgtccacggcacgagcaaaggcgcagaagtgggggtatgcccgggagccgagcccgaacacacagaacctggggtgcaggggtcgtcagtggagctccctttgcaggccacgtttgcccaggcagcttgcccacccgttgcacccctcttggtgaggccctgacctgagggtgcccagggcccctgcactgtctgtgttactggactccttcctcttccgccgccaagaggacaccagtgggtctgagcaggagatgctgttgaagcggatcttataactcctggcaagagaggacaaagacaaggttgtcacagggccctggggatacaggctaggcccagccccagccccagggacggcttcagggtctctgcctctgggacaggaaaggccctgcccttgggaggggctgagggccagcatccctggggttccgagcctggggccctgacacaccacacccccatctctgaagacctcaggactgtcccggctctcagaagcaggcaggtctggactgccattgcagcctggaatggagggcatcctggagccctggcttttggtgggaaaacgacttgaggca

SEQ ID NO: 94829 - DNA, 17663 bp, Homo sapiens
tgaggtctcaggcctgcaggggagggtgctgtggataaagcttaagtgaatttgctgagaagtctttcatttgccacacatacatgatggagaatctcttgagagggaaagccgggagcaagtagagaagtgaggagggggaggctgaactttggacattacatcagcctcctgcttactctgatagctccctttcagatgcccatatttattttcttttttttttttaacctaataaaacttcagtctcttcccattttcgtataggaaggagagattgtgccctccttccaaacctcccctgacctctccagagcaattcctgattaaccaagggctttgtccatctcatccagaggaacccagggtcctcgttggcccggctgggaccattccactgccccagaataccagggggccatgacagcacccactgacagtaagagctcacttcccttggctgcccttctcctgcatctcccaggcccccagagtctccccttcgatctttctccctagctctgtgtttggcctactccttctggctttcctcaacagtgttccacattcccctcaaattcccttttggtgtgctggcattgccatggtgctgctcctgcaagttctcaggaggaactgtggtgtcagggagcagaggtttggggttggggtatagtggctgggaggaggggtgcaaagtatgtctcctaacgcttaccctgcctatgtcccctccactgccagctccagcaaggaagctgccacccaagagagcagagggagacatcaagccatactcctctagtgaccgagaatgtaagaggggcaagggtcgggtgtctgggcctggggtaccttaacacaagggaagagaatgctcaggggacccagggaaaggattcgttctctctaaagactcagatttcttgggctgggcatggtggctcatgcctgtaatcccagcactttgagaggctaaggcaggcagatcgcctgagtccaggggttcaagaccagcctggccaacatggtgaaaccccgtctctactaaaaatacaaaaattagctgggcacggtggcacgtgcctgtaatcccagctacttgggaggctgaggcaggagaatggcttgaacccaggaggcggaagttgcagtgagccaagatcgtgccactgcactccagcttgggtgacagagtgagactccgtctcaaaaaagaaaaaaaaaaaaaagaaagactcagatttctctttttttctaccaaaacctttgctgtcatgactctcttccttttttcttctttttctgtcttgctcttcattctccctgtccccagttctgaaggtagctgtggagcctccttggcccctaaacagggcccctcgccgcgccacacctccagcccacccacccccccgctccagcagcctgggaaactcaccagaacgaggtcccctccgcccctttgtgccagagcaggagctgctgcgttccttgcgcctctgccccccacaccctaccgcccgccttctgttggctgctgaccctgggggcagcccagctcaacgtcgtcgcaccaggtaataggagttgaagggctaaggagcctcacagctataaaagaggatgttagaaatggcaaagggcaatttgaatccatcagagagatggatcaataagatgggtggcttggggggggtcctgaaacctttcaagaaaaatatttgtgcaagtgatctgggaaaaaaatgcagtgaaggagcagaataggaccttatatggagcctagggaccctggctttaatgtgagagttatgtggaatggtaggaagaacaccgagatccatcgagttgggggaacagagccttctaagattgggaaaatcttcgcttaatacttgctggggaaggggcagtgtctgacagagagtgggaagccactggcttgtgtgccaagagtccatcgcagcaggcagggagtgggcatttcctttatttctctccctttctcttcacctctgacttctctgtttttctctcccccgccccccgccatttcccatctcccttcctcccatccataacatccttccacagctcccttccccgctctgaggagagtcgatactaacagctaccctctccctgccctgggagacctggggtgggcagggaacccctccctgagaacctcagacccactcttccattgcatcctgtaggacccagtggaacctgacagagcccataggattccctcttctactttcttagacagcagggatgtcagggtctcaaactgcctaacactttgtagcttttcttaacacaaaagcaccccttctctcctaacttgggctctgaatactttcccaacaggaagtctgatctgttgccagacttcttggttagatggctcatacatttatctagagaagcacactcttgcttgctgtcaaactttagaacaccatggaaggtctaagggcatcctgtgccagggaaactttttaaggaattttatctatgggataaaccccatattccctctagtgtctactggtggctctaatactgctttgtgctgcctgccacacttgccctttgagcctgcgaatggccgctagtgagcaagctctgcttcagagcagtctagttaggtagaacagggacttaccagcttcccaaagggatctactcaccattgccaaactcttcatttccacattttgtgtaggtgtcagggaaccccaaactggtgttgctttggggtctctaaaggagattggctgacaccaccatttcccccagatccagattctctgagggaggttgtttcttgagagtagatccagagtgtcaaggatctgttagatcctggaatcccttcttgcatccatccctccctggtagctaggtcccgatatactcctgtcttgtgagattgtcgagatgagatgggggaccactcttcctctgtccttcctctctcctttcctccatagcaaggacgaccttccctgctccatgcccagagtatagctagatcccttcccctccctaccctctgaatgtgtgctagatcaggtgccccactgtgtttcctgaaatccttgggagccggatctccccatctcccctactcactcttcccttttcttctctcagtgttgtctgaataaagtgtgaaatcttttgtgttttctaaattgacattttcaatgaaaaaaagaatcacaaaaaaaaaagttgtcagcctcatttgtgcgtcatcccttattttcctgggatctcaggacctctgtccctctcatttctcacttctgagatctgcacatcttttacccaggagcctcagagctcctgagtctggtgtctgcctatccccatcttcactgttagtcctcctgcagattctgtgtctcctttcatgtaggtgctggatccctgtgtgtgggcttccgtatctactccctcattccctccaggaacctccagctctccccagtgacttctaccctttactctgggcgtgcctttgccaagatgtcaaagcttaccaacatctctggatccactaattacctcctgcctcctgtattcgtcttcccactctgattacctgacgtctgctccactaaaccgctggatctctctcaagacaaacccttacctccattgagagtgcaacacagtctgtcaccctatttacagaggcccccttccttttcctcctaaattcaaaattcagccttgtcacttcctatttccctctggtctaaggaatctttttttttttttttgagatggagtcttgctctgtcgccaggctggagtgcagtggcacaatctcagctcactgcaacctccgcctcctgggttcaagcgattctcctgccttagcctcccaagtagctgggattacagaagtgcaccaccgtgcccagctagtttgtgtatttttagtagagacggggtttcaccatgttggccaggttggtctcgatctcctgatcacgtgatctgcccgtcttggcctcccaaagtgctgggattacaagcctgagccaccgcgcccagcctggtctaaggaatcttatagttaaggtaaccctgttttccaaaccaaacaccagagtacccgatccaacacatttttgaccacatgtgagtctgttcttctgacatgatttggatcacacctagccatagatttaacacattacctcaactagaaagaatagagcaataaatcagaagcactccagaaaatcttgggtataaaatgaacttcccccgcccttttctggggcacagctttgattaaaacctgttaggaatgataattacccccttctctttgttcctgtgctattccttttactcctctcctctgattcctccatacccacccatctttcatccagtagcctcctccccatcatctcccatttcttctacagggggactcccccaggtctggtagcccaaagctgctgctacagccgccatgggggggtgaattcctcatcccccaatacaggtaagtattcactcctccctaccctcaaatcaagtaggccacattcactgtctactcctgccttcccattcacatgcctgatatttccacaggcaaccaagactccaagcagggagaacaggaaacaaagaataggtgaggtctaaacccctcccctaacagcctcccaccaccatctgactcccttcctaacatcattctcagtcacttcctactcttaaatcttattgtatgaactggacaccagctcctcccacaattccttctaccttacatcctgcaagcccctttcccccacaggttcaactctggtacttccctttggaatacggattctctgagaggttttaaatttggacatagcactaatggttccagcttcatacccatcatgtgtcctacattaaaacctggcccgagaccttgaagagtctgtaatcttaatttcctctttagtattcctataacccactctccatctccccacctaccaggtctgccagtgaggagcaggccttgtcacaggatgggtctggggagaagcccatgcacacagctcctccacaggccccggccccgccagcccagtcctggacagtgggtggggacatactcaacgccaggttcattcgaaacctgcaggaacgtcgcagcaccaggccttggtgaccgcagccccgtcaaacatcttcaaagtattatttctccctcactacaggaaagagccaaagcccaaccctcataatagatggatacattcattcattcattcattcagcaggcttatcagattcaagtcatttgtatcttttaaccagaccaataaaagtatttatttttatcacaagagctgttgaaaaatttgactcattatttcagccgcctcacccctcactgtcgttgcacccattcagccttcagccctgtttttgctcagctttttgctcaaaggcctcagctgtgaatacagcgcttgggggggcgggggaggctgtaacttgcgcaagcgcactcaggcagtctccgagcccgcgggcgcaggcgcgcttacagccgacagagcgcttcagccgcttccctcgagcctgcagtgcgcaagcgcgggacatctccgtttccctccctcagccccttccccccctacccccccgccccggcctcctttccccttcacgaagccggctctggggcgcgctcacccctgtgaggaggccggaggtcggactcaggaggctccttctccactcccggaagatcatgtaccagcccagccggggtgcggcccggcgtctcggcccttgcctgcgcgcctaccaggctcgaccccaggtgagcggaggagaagagggagggaggagagggggcggggagagaccctcctcaaagccggtgcgtggggcggagcgcgcgctgggttccgcgcaggcgcagagacacccgccgccccttcccacctgtgccctgcagcgcgtggacaggctaggggtcgcgggagcgggagggaggcgctgccgggcctgtcgcgcaaggacgtcggtcctcccaggtttgagggcggtcaggcggggtcaaggccaggcagcggggcgcgtctgcgttgcgcccgactctccgcggttacctgtgcctagaggtgatttgaagggcaggggccgagagattcgtagccctgctgcggcgccgtcccggagttccccggcccagaccagacccgcggggcgccctcagcagcccgcccgtcttgcactcggagagcggtcctggcaggaaggccggccagtgtgcacccggttcgggcccctgcgcccgggctggcaagatggccacgcccccagcagagacggcgcctctaggacaccatcggggaccgaggtacccgagcggtccgcccgccttccctgcagtgagacgatcccctggggggttccttgggagcggagggactcgggtgaggcctaactttgggtgacctccccttgcagtttcaacgtcggtaaacccaggagagtgaaggccagcctttaactgtctcctgaggttgtgtctgtcattagaggggcccgaaatgataatagcttccatttatgtactgctttctaggtcgctacgttttgtttacattcattatttcatataggcctcataacccagtgaggctttattgttctcatttataggacatttgtaggaagcggaggcatagggaatgagaatgcctaaagttacatgatagaattcagattcctagcttcagctggatattcttttttctctgtacatttgcctcgcacacttaatcatggagatgtacaggccacagcatttaatccacagtacaataaaacctgttattcgttaactcatcaagtatgtattacatgattcttgcgataagagaggtgaaactgcccccagtgttggaatctttttttttttttttttgaaatggagtcttgctccgtcacccaggctgaagtgcattggcaccatctcggctcactgcaatctccgtctcctgggttcaagcaattctccttcctcagcctcccgagtagctgggactacaggctcccgccaccacacccggctaattgttttgtatctttagtagagatggggtgtcaccatattggccaggctggtctcgaactcctagacctcgtgatccgcccgcctcggcttcccaaagtgctgggattacaggcgtgagccaccgcgcccggccacatttctttaagattccaacactgggccgggcacggtggctcacgcctgtaatcccagcactttgggaggccgaggtgggcggattacctgaggtcaggagttcgagaacagcctggccaacatggtgaaaccccatctgtaactaaaaatacaaaaattagccgggcgtggtgaagggtgcctgtaatcccagctactcgggaggctgaggcaggagaatggcttgaacccaggaggcggcggttgcagtgacccgagttcgcgccaatgcactccagcctgggcgacggtgagacttcgtctcaaaaaaagaaaaaaaagtaaaatgtctgctaggttttgggaggtgccggtatttatgtcacataaaacagtttgctcggctgggcgcggtggcccacgcctgtaatcccagcactttaggaggcagaggcgggtggatcacgaggtcaagagatgaaaaccatcctggctaacatggtgaaatcctgtctctactaaaaatacaaaaactagctgggcatggtggcgcgcgcctgtagtcccagctactcaggaggctgaggcaggaaaatcacttgaacccgggaggcggaggttgcagtgagctgagatcgtgctactgcactccagcctggcaacagagcgagactccatctcaaaataaataataaaataaaatggtttcctcctgttttcagtagagatggagatgaatccatcccttttttcctatagtaattccatccattctgtcaggaggaataggtattggaagcctgttgagcatccaggggatcaaggggtgttagacaagtggattcttatctttctcccttctgttctttctccttaggaccagctttatccagggactctaccattcccacccctttggccccactccacgacaaccacttccccatcttctcctctattctggtctcccctgcccccacgccttcccacccagcgtcttccccaggttcccccactacctctccctcagatccaggccctcagctcagcatgggtggttctccctccaggaaagggggaggagggaccaggacctgagttgcatagcggctgcctggatgggcttagaagcctttttgagggacctccctgcccctatcctggggcttggatacctttccaagtccctggaactgcccacccttcccctgccaccccgtcaggagatcctagtatggaggaacatctgtctgtcatgtatgagagactgagacaagaggtaagtcagtgcaaaagtggccttcgtctacagtgggaaggatgtgsgtaatccttggacgtacagggatagtcaactggattcttttttggaaccatgaggcaggcatagaaatatattataaacattttcctgagaaaatgatgttccagccaggcacggtggctcaaagtgctgtaatcccagcactttgggaggcttaggcaggtggatcacctgaggtcaggagttcaagaccagcctggccaacatggtgaaaccccatctctactaaaaacacaaaaatcagccaggcatggtggcagacgcctataatcccagctactcaggaggctgaggcaggagaatcgcttgaacccaggaggcgcagtgaaaggagatatctccattgtactccagcctaggcaacagagcgagactccgtctcaaaaaaaaaaaaaagaaagaaaatgatgttcctcattttgggttaagggaggttaatcatgggatgagatctttcactccaagatgggagtaaggaggccttaaaaatagaaaactgggcctggcacatggctcacgcttataatcctagcactttgggaggccgaggcaggcggatcacaaggtcaggagttcaagaccagcctggccaacacagtgaaaccccgtctctactaaaaatacaaaaattagctgggcatggtggtgggtgcctgtaatcccagctactcgggaggctgaggcaggagaatcgcttgaacctgggaggcggaggttgcagtgagccgagattgtacctctgcactccagcctgggcgacagagctagactccatctcaagcctgtaatcccagctactcgggaggctgaggcaggagaatcgcttgaacctaggaggcggaggttgcagtgagctgagattgtacctctgtactccagcctgggcgacagagctagactccgtctcaaaaaaaaaaaaaaattagaaaactgaaaaataggattatcttttctttcccactgggttgatgccatcttcttccacctagcttcccaagctcttccttcagtcccacgactacagtctgtattccttggatgtggaattcatcaatgagatcctcaacatacgtaccaagtgagaaytggggcacaggtagggcactggggaggaaaagcacccaraggtatatacatgacccttttcacttcccagagaagttcctagactgcttctcacagctgttccccattccttagaagccagtttggttttctaattctgccatcatgagatttctttcccatcccttcttcacaggggccggacatggtacattctttcactgaccctctgccgtttcctggcctggaattattttgcacaccttcgtttggaggttttacagctgacccgccaccckgagaactggaccctgcaagcccggtggcggcttgtggggctgcccgtccacttgctctttttgcggttctacaagcgtgacaaagacgagcattaccggtaagagagaaatgagaaaggacccaaactataatcagttccttttttttttttttttgagacggagtctcactctgtcacccaggatggagtgcagtggcgtgatctcagctcactgcagcctctgcctcccggcttccagcaattctccagcctcagcctcctgggtagctggaattacaggcacaccatcacacccggctaatttttgtatttttagtagacagagggtttcaccatgttggccaggctggtctcgaactcctcaccttaggtgatccacctgccttagcttcccaaagtgctgagattacagatgatctagtctcccagacaacccttgacctatcctcacttgactgtttaaggacagggatcctgtttagtttatgttaatgttaaaaaaaaaatagagactgggtatattagaaaaacctctgagcttcagtttcttcctatacagtgcctagcacatggtaggtactcaaatacttactgaacagactgggtgtggtggctcatgcctgtaatgccagcactttgggaggccgaggtgggcggatcacttgaggtaaggagttggagacctgcctggccaacatggtaaaacccaaaaaaatacaaaaattagcccagtgtggtggtacacacctgtagttccagctacttgggaggctgagatgagagaatcacttcaacctgggaggttgaggttgcagtgagccgtgatcacattactggactccagcctgggtgacagagtgaaaccctgtcacacacacacacacacacacacacacacacacacaaaagtactgaacaaatgaaaagtcctgtctcatatgttgagccttacaacctggtaaatttccgcctgggagtagaatcccaataaattgttagactcagccacaaacattggatataagtttttaaaccagcagttcccaaactgctgcacagtagaaatgcccaaggatygttaaaaaatattgacgccaaacactctgatttaaytgagacagggcacaacytaagcactgagatgtttgtaagttgcccaggtgatctaatatgtagcagaatttagggactactcgtttaaacaaatgcttgaattcagctttgggaccagtcaccttctccctcagtaagcctccctctattccccaggacctatgatgcctactccactttctacctgaattccagtggcctcatttgtcgccatcgtctagataaaktgagtcctaggtagggctgggtggggtaaagggtagaacatttgtgtgcctcccccaactggcattaacctttctccctgcagctgatgccttcacactcacctccaacgcctgtgaagaagctgctagtgggagccctggtggccctggggctgtcagagccagaacctgacttaaacctgtgttccaagccctgatccttgaccttggagtggaggcagcactgaagactgctacgcccaagagaaggaggtggaggcagccaagaatctcaggagccagcttcctctcctcgtttctctccttccttcctttccatctcatgctgtgtaaagctgctgtgtaatttaacttgtaaataataaagtttaactgactatatgagatagaatttcacatatcactttctctagatcccaaatgttcccacaagctttattccaaaaataattttatttaataggtattaaataatgtatagaaggaaaaggagctggtgtcaggttctgtttacgtccttctcttaccctagctcttctcgtgttttgcctatttttttgggcattttcttagcatggggatcttctagctccttggccttataataatggggagccacctccagaagccaactgctctcaatctccagtacctaggagagagaaaagatcaatggagttcccttctttccaacatagatcttttgttgttgttatttttttttcttaaattgaaacagagtcttgctctattgcccaggctggactgcagtggcgtatcatggctcaaagcagtcctactgcctcagcctcccaagtagctgagactacaggcacacatcacagtgcaccattaattttttgtatagttggggtctcactatgttgcctgggctgatcttggcctcccaaagtgctaggatcctgccttggcctcccaaagtgctgggatggtttacaaaaatgagccactatgcccagccccaacctagatccttatgtgtatggtcaaaagttatctttcctctttgactgcagggctaggtgtaaaggtgcctggctctattattatatacccaaagggcagatacacctctgtatgttattcaagataccaaataagctattcccaagaaaagtctagaacaacatgccaggcacagtggctcacacctgtaatcccaacactttgggaggccgtggcaggcggatcatgaggtcaggagttcgagatcagcctggccaacatggtgaaacccagtctctactaaaaatataaaattagctgggcgtggtggtgggcacctgtaatcccagctacactggaggctgaggcaggggaatcacttgaaaccgaaggcggaggttgcatgagctgagatggtgccactgcactccagcctgggctacaacagcacggaactctctcaaaaaaaagaaaagcctagaacataaagactatactctgtgagaccagagactgctttgttcattatagccccagcacctatacagtagccattcaaatatttattgaataagtgtctagttctcagatcttggaagatgctgacacacctgttagaaaggatgtctttgggctgggcatggtggctcacacctgtaatccctgcactttgggaggccgaggcaggcatttgagaccagcctggccaacatggtgaaacctcatctctactaaaaataacaaaaattagccaggcctggaggcttgcgcctgtaatctcagctacttgggaggctgaggcatgagaatctcttgaaccccagaggcagaggttgcagtgaggctagattgcgccactgcactccagcctggacaacagagtgagactccgtctcaaaaaaaacaaaaaaaaacaaaggatgtctttctattttaccctaccttcctctttctgtaccagtcccagcaacttgaacctgggttcttagcttgccaggacaccatctctctacatagtctccacctgcgtgggcacaggatgttctcctcacctgtctcatgaactctttggtggtcaagacaagttcgtggtagagcagccagcgtggctgttgctcaaagagggaggagttgggatgaatgaagactgtctgctgctgtttcactgtgcggtagccactccgagtcaaccgtgccgtgtggtaaaagtaaccagcagtgatggcctaaggagcgggcaggaaagaaaatcaatggaaaaggcagacatctggggaccctaagaatgcactacctttttagttcaggcttcaggaaaactagagaggtaaggaatgcatgaagaacttcccaggaatgaaccttcagtggtctggggaagaaagggccctgggaggacacgtcatacacaaggggaagagggcatgctctcacgctggaggaaatgctgcatgcccccagagaagcttgctcctgggaaggtactgggggtggaaagcaggaggctgaagaaatgctgaccttgcgtacacggatatagtccccctggcaggaactgagaccaacttccacacgttccaagagcccttccagctgttcccgcacatcccgggctcggcgcatcgatctgaactgtacaaagttctcatagcaccactgggaagagtaaccactctcagcccactgggaagacagttaaaaagaaaggagagataattaagtatacagcaggactaaagtcccccagtgtctctcattcccactcacccaagcccagtgacctgtgtgtaaacatttagcagaaccaggtggtcaccgccagggagaaagaagttgacacgggcattgtcagcatggacgaccttgtcctttggtcggtagaagatggagttgttgacagagagcatggcagccactgtcaggatctcctctgaacagctgtacctgggacaggaaggggaaagcatgagttcaaagcaagacacataggaacagatatggtggagtggggagtgatcactgtgtgatggatgtttcctcatgtggggaaggctggttggcataatggctacaaagcagccagcagatagattctggcagcagcttgggggtcaaggaagtaggggccatagatgaaacacagtcacaaaggagggacatccatggaggcaggagcaggaaacaccggggaattctgaggcttctgcagaaagtgtgcattcactatgtgcatttggaaaagatctctgacagcagaggaatggcatttaaaggtcatccctccacagctacatctaaatgttctagttggaaaccttaggaacaagtaagttcctcaaggggccgggcgcagtggaatcaaggataggatcaagtgtcttacccttgtgggcctcaaaagggggcaatcagagttatctaatactttattatgtgttaagggatagtatgatgaacagaaaaagacagacaaaggggaccctggagacagaggaggcctggcctgtttgtgtgctgggggcccaggtggaggcgagggcttacttctcagaggctaagatcattttggacagcatggggtccaccggcagctctgccatctttcgaccagactaaggagaagagagagagagttgagcccagtcctccctcaggtttcccgctactactacaggggtccctggagccatcctgacccctatcatcctgcctccacccatgctgtcccccgactcaccgtggtgagctccccaaggtggttgagggctcccagagcatacagctgctccaaagccagcagcagtgtctcatatggtggagggtccaggaaatcaaagtgcattaggtcatggatccctagaaagaggtgtgatggatggaacagagtcccttcaaaggacagtgactccagcccctccctcctctctcaggtagcccaatcacctaagctcttgagcagcaacacgacattgcccaagctggtcctctggatctcaggcactgtggtttcctcaagctcgtgctgataggcccaggcggtatacaggcggaagcacttccctgcagccacccgacctgccctgccagctcgctgattggctgaggcctggaaagaaaggggaacaggctggctgacaatttggtcagggaaaagaaaaaggcagtatttatgcaagaaatctggaaggatgcaaactgctcatcccggttccctaggaagcccccaccctgcttctgagttggaccttctctgtgggccaactccacctcccccactcccatgcatccccaggctgaccttgctgcagggtgtgacagtgagcgattccatgcctgtgcgggggttgtagctcttctgcttacagaaccctggatccagcacataaatgatgccctcaatggtgagtgatgtctcagcaatgttcgttgccacaaccacctgagtgataggatatggggtcacccagtgaccccacctacctagttacccagaaaaagtaatcttggaaagttaggagtagtgaagcagttgcagtaaggggcaggagctgagggaattagtagtatccaaggtcaggagcaggggacaaggccagaagacaggggacagggaagtgggggctgggagtcagcagggccataggaggaaaggaaatggagaagaggatttagggttttttttttttttcagagatgggaaatgggggtgttcaagttcctgcccgatcctccccatcaccgctttcgtcttcacacaacacttcctgtaagagcctcctaacgtgtatccctgcttctgctcctagcctctgtcacatggcatccaggatggtccttttaaaatacaaacctgtcacatcactccccatccttcagtggcttcctatcctactctagaattcaatccaagccccttaaaagcctggatcacctaccccagctgcctttctgacctcatctgctagcactccaccacctccctcactcctcccacacactgctttgctctgcccaagtaagtgcactcctcactggatcatttgcatcagctattccctctgtctggcatactcttctcccagatatcagcctggctccctccctcacctggtttgggtctctattccactttccccttactgaagaggccctccctacaccccaaggaaaataccttcatgccagtcctcactcccaccccacagagtcaagttccatcctactatgctgccttgtatctcttcatagcactggccacaaattgacaatatgtatttatgcatccactgcttccccgatagaccacaagtgcaagtttgttaggctaaggactttgttttgttcatcactgtatcatcaacccctgtgtacctgacacacagaaggaactcattaaatatttgttgaatgaaagttatatctctgctcaaaatcctttgactgctactcagctgtctaaagtccaaacttcgccaagcacagtggctcatgcctgtaacccagcactttgagaggccaaggcaggcggatcacttgagtccaggagttcaagaccagcctggccaacatggcgaaaccccatctctactaaaaattagctgggtgttggccaggcatggtggctcacgcctataatcccagcactttgggaggccaaggtgggcagatcacctgaggtcaggagtttgagaccaacctggccaaaatagcgaaacctcatctctactaaaaatacaaaaaattggccaggcgtggtggagggcacctgtaatcccagctactggggggctgagacaggagaatcgcttgaacctgtgaggcagaggttgcagtgagcagagttggtgccactgcactccagcctgggcgacagagtgagactccatctcaaaaaaaaaaaaaaaaaaattagcttggggtggtggtacacacctgtaatcccagctacttgggaagctgaggcacaagaatcacttgagcctgggaggtggaggctgcagtgagccgagatcttgccactgcactccagcctgggcaacagagcgagactctgtctcaaaaaagaaaaataaataaagtccaaactttcctgtcatcaaaggccctccctaatcttagccccaaattgtttttagccttgtctcctactccttcaccacatgaacctcccactaagcctactagctcacactctgacctcaaacataccttgggccttcctctgatgacttctcagccatttttcttttttgagatggagtctcgcactgtcacccaggctggagtgcagtggcacaatctcagctcactgcaacctcctcctcctgggttcaagcgattctcatgactcagcctcctaaacaggtgggattataggcgcacgccaccatgccctgctgatttttgtattttcagtgg

SEQ ID NO: 94830 - DNA, 55211 bp, Homo sapiens
atgttggccaggcttgtcttgaactcctgacaggtgattgacccacctcagcctcctaaagtgctgggattacaggcatggccactgcgcctggccagttattttgaaccctataacaattggcagatccttttattctgcccctgctagagatgaggagacagaggttcaaaggaattgtgcaacttgcttaagatcacacagcttgtcagtgaattcaaacctaaattcagaagatcccagagctctttctactccatggcatggatcgttaagatcacctctgtgaggtactggcctcctcacctaggaaaggaggaagatgatgaggctcatgtcaccaaggagagcgtgctgtgccctcaagaagtgcatgagcttctgatgcttccagaataatctccgggatgcccccccgactgcctcttagggggtcaggctccatgatgggggtgtctgccctgtggccctggctgcctgtggagtgtcaagccagctgtgtgtccgagagagagagagattgtgtgtgtgtgtgtgtgtgtgtgtgtgtatgtgtgtgtgtgtacatatgcaaacaaggagggcagagctggggctcagggctgaccatatttttcctcctacctgtgagggcagatgtcttactgtgttttgttttgttttgcttttgagacggagttttgctcttgttgcccaggctggagtgcaatggcattatctcagctcaccgcaacctccgcctctcgggttaaagcgattctccttcctcagcctcccaagtagctgagattacaggcatgcaccactacacctggctaattttgtatttttagtagagatggggtttctccatgttggtcaggctggtctagaactcccaacttcagatgatccgcccgcctcggcctcaaagtgttggattataggctgagccactgcccccagccagatgtcttcctgttaaaatggggctttaaattcctcacctaacatcattgtttgcaacaacagcaacaaagagcttccatagacagagtcagtgtcccagaacggggactaaacaaccaaacatctagaatctcaccagtcagtgaccctgaaggagacctcagtcacaacctttgttggagagcaagtggaactagggttttttaaagcctgaaagcacatcagttgtgccctaacaatgaaaggtttcagagtagttgaaagctaggaatttgaatatcttagaggaagttaagtggcttgaggtgcttccaccgaaggtctcagcaccatgagaatgcctgtgcttctgccggccccattcctgccagtgagcccacagacaaggggcgatgaagaaccaggaaacagatggaaagaaacgtggaagagaggaaagcctcagactgtcagggtgaaatctaggttgagagttaagttttagttcattctttggagagactgagccacaaggagccataattacaatagcgtttcagcacatccaggtgatcttggtctgcagtatttggttgaggactgtgtgaaagcagctgaggccaaatgtggtggctcacacctgtaatcccagcattttgggaggctgacttgggtggatcacttgaggccaggagtttgagaccagcctggctaatatggtgaaaccctgtctccactaaaaatacaaacattaaccaggcatggtagtgcatgcctgtaatcccagctacttgggaagcttgaggcaggagaatcgcttgaacccaggaggcagaggttgcagtgaactgagatggtaccactgcactgcagcttgggcaacagagagagactccgtctcaaaaaaaaaaaaaaaaaaaaaaaaagcagctaaggaaggctactatggtcacaaaagacttcccagaagatgggacttgggctggatcttgatagggaagatttccataaggagagagggcaggacatgggtggaacaggtgcaccaacagtagggcaccagggatgagagagctgctggttaggattatggtgagcaccacagaccacagacaaaccagaataaacgaacctgtggaccagcgtgtcctgcactgagacacacaccacgcacaccaacagggacgaagcacgttgcccacattgtatcgatgtatgcgaatgtggataagtcagctcattttctccttcccctccccacaaccaagtttactgctgctcctggctcccccatcctggggaatagcacatggtaagaacctcagcacccactccactcctctcgccctcatctccacacagctacctgtcaattccaccttcacactctttctgccaactgagccctcctcatctctctgcctctggcctgcctccccactacaactgagtttccatgcagttctcagaggaatccctcgaaggcacatgtgcaacctcatcacttccaggctgaaagatcttggttaagagaaatattagtacaagctattaagacttaggaggctgccgggcatggtggcacatgcctgtagtctcagcattttgggaggccaaggtgggctgactgcttgagcccaggagttcaagaccagcatgggcaacataaagagaccctatctctacaaaaaaaaaaaaaaaaaattagctggtgccttagtccgttttcatgctgctgataaagacatacctgagactgggcaatttacaaaagaggtttaggccaggtgcggtggctcatgcctgtaatcccagcactttgggaggccaaggcaggtggatcacctgaggtcaggagttcgagactagcctggccaacatgttgaaaccccatctctactaaaaaatacaaaaattagccagtcgtggtggcacgtctgtaatcctagctacttggaaggctgaggaaggagaatcgcttgaatctgggaggcggagtttgcagtgagccaagatagcaccactgcactgcagcctgagtgacagagctagactgtgtctcaaaaaaaaaaaaaaagaaaagaagtttaatggacttatagttccacatagctggggaggcctcacaatcacggcagaaggcaaggaggagcaagtcacgtcttacataaatggccgcaggcagaaaaagagcttgtgcagggaaactcccgtttttaaaaccatcagatctcgtgagactcattcactatcaaaagaacagtgcagtaaagacctgcccccataattcagtcacctcccaccaggttcttcccataacatgtgggaattgtgggagttacaattctagatgagatttgggtagggacgcagtgaaaccatatcagtcaggcatggtggcatgcacctgtaatcacaactactcaggaggctgaggtgggaggatcaattgagcctgggaggtcgaggctgcagcgagttgtgattgtgctactgcactccagcctgggtgacagcgagaccctggtcttggggaaaaaaaacaagaagacttagaaagctacagtgatgaaaacagtgtcatactggcacacgcatacagagatcaatgacacagaatatacagtagttcagaaatagctacttacagttacttagtagtaaaaagatgactggcaggatgtatttgtgccatatatgatagacaaaatgttaattgcctggatacatataaagcacctacaaatcaatttcagaaagaccaacaatccaatagaaaagtgagccagagacatgagcagctagttcatagcagaggaaacatgcatgacttcatctaggcagagatgctcaagctcactcgtaaaagagaagcaaattaatgtggtagtgaaatgccactttttcgtctctcagattagcaaagctaaaaaaaaaatcctgaaacttctactggtgagggtgtaaggaaactcagacatgacaggtagtggggcataaattaaacttctttggagggtaatatatctgtatttaaattgtaaatattctttgttccatttctactaatttctttcttttcttttctttcttttttttttctttttttttttcttttttttttttttttgagacgtagtctcactctatcacccaggctggagttcagtggcacgatctcagctcttggctcactgcaacctctgtctcccagattcaagcaatctcctgcctcaccttctggagtagctgggattacaggcactgcgaccattcctggctaattgtgtgtgtgtgtgtgtgtgtgtgtgtgtgtgtgtgtgtgtgtgtgtgtgtgtgtttagtagagatggggtttcaccatgttggccaggctggtctcgaactcctcacctcaagtgatctacccgcctcagcttcccccccagagtgctgagattacaggcacgagtcatggtgccagcctcatttctattaatttcttaagcaaatcaagagcatacattgtggcattgtttgtagtggcaaaagattggaaacaacctaaatgtccatcataggaaattcatgaaataaaactacctcatgtatccagaggaataccatgaaactgttgaagagaatggggacatagtccttgtgtgctgtgacaaaacgatctccacacacagtattaagggaaaaaaagtacctggcacggtggctcatgcctgtaatcccagaactttgggaggccgaggtgggcggatcacctaaggtcaggagttcgagaccagcttgaccaatatgatgaaaccccatctctactaaaaatacaaaaattaaccaagtgtggtggcatgcgcctgtaatcccagccacttgggaggctgagacaggagaatcgctagaacctgggaggtggaagttgcagtgagcccacatggtgccagcctgggcaacaagagtgaaaccccatctaaaaaaaaaaagcaaggcgccattgggaaggggaagtggggcctgcatggctgaattcagagaaggaagggagtcttggttatcagattatctctgcagctgatctccaaacctatttcccttcttcctggcacaggggccactcatttcccagactcttttgcatggaggcatggttgtgtgattgaaatccagccaggcgagcaggctcagcccacagaaacctcccatgggccacccccatgccttttcttcctctggtttgtgtggaatggtgctgagcccccagggcgactttggtggaatctggtgttgaaatcagagtcccaccgccgggcgcggtggctcacgcctgtaatcccagcactttgggaggccgaggcaggcggatcatgaggtgaggagatcgagaccatcctggctaacacggtgaaaccccgtctctactgaaaatacaaaaaattagccgggcgtggtggcaggcgcctgtggtcccagctactccggaggcggaggcaggagactggtgtgaacccgggaggcagagcttgcagtgagccgagatcgtgccactgcactccagcctaggcgacacagtgagactccgtctcaaaaaaaaaaaaaaaaaaaaagaataagcaaatcatgcaaatcatcctgttctaaactctgaaccgctgcttccaagaccgtccctgcccttgccctggccgcctctctccttgttaactgggctccattcattctttccatttctctaacacgtgccaggtggtctcatctcctggcctttgcccttgctgttccctgtcatcattcaggtctcacttgtcatttcctgaccatggtacttataaaagcagtgccgtctgccccatccatgtcacctcgttcatctccttcacctccgaaatgatctcgcttttgggtttacggccggtctcttcacctggagcatcagccggggaggtcagggtcgccctggctcgggcctgttcacattggggtcaaaggcacacattgggggctcaaccaaggcgagctgcgttcgcggggccgggtctttccgcacaggcggagggcggtggcgggcgcggaggcgtcgcgcgagccagggggcagccacgggccgggggtacctagcgccacccgcttcgcttgcatcagctgcgcgccccatcccgaggaatggtagaggcagccccgcccccggcccgcccccgcctttccattggctgccgcgcggggcggggagcggggtcggctcagtggccctgagaccctagctctgctctcggtccgctcgctgtccgctagcccgctgcgatgttgcgcgctgccgcccgcttcgggccccgcctggsccgccgcctcttgtcagccgccgccacccaggccgtgcctgcccccaaccagcagcccgaggtcttctgcaaccaggtgagcccaccggccgggctcgcgctttgttttccggcccgagtcccccgcaggcccctaggaaggccccgcgccgccgtgggccttagtgtactcatctggggctcgaggggtttgcagaggctgacctggaagcacatctgccccctcctctcctgcaagcattttagccccttcgccgcctctgacagtccccgtcccatttccccgtgacttgggccccctctccgtcttcgcccagcctcggtctgttttccagggccaactctcggggttccgttctccccatggtccttgctttcgggtctccgcagggtccccaccctcacccactcagaagacgcgaccaagtccctctttgcaggaactttcctgtcttttccttagtcatcccctttaccccctgactcatgccctcatccaaggagttcaaaaggaaaaaccaggaaagaggtgatttgcagccacgttctccagttcaccatgggcgaggccacgctcggctgcttccattgctgggagtagggaatcctggaggaccttcggccccagggggccgaccccaaggggtgtctgcggcttccaacgccggcttcgaccaaaccaaggaggagctttccaggataaaactgattcctgtggtccatttattgattgctcaatcagtaatactttggaatattttttgttttgatctttgagtttggttaaagttctagacttcacagaggctgaaattggttatgaaagagtttgttttgtttgtgccagtgcatgttggctgccttctctgacttaagctttttctcctataaatggaaaggcgctctgagggttaggttcacacaggccctcatcaaccagtcacttcatagttaatcacagctcctgtcctgtctgcacagcctttgtgcagcactgttctaagcgtctacctgttttgcaatttaaggtaatttttacaacagcctcagtaggaagggactgtaattctccattttacagatgaagagactgagtcacaaagaggtttagtgactcacctaaagaccaaagtcagtggcatagttggggttcacagctgaacttccaggagtaagcccctaaccagaacattccatggtatgttgtgactctgggtgggaacaaagggaccaccgatcctctgggactattgctgatttgggatgctgtagagctggctcctagccagctgctttcaacagcacacctgctggtctggccctgagtgtggctgcaaatctggatataggtgatgggtaaaggcacatgcgtgtgattttaggggatgttacaaaggtcatttgcaagggaatttttaaaaggataaaataaaatcttttgcataacacaagctaaaaaggcagcagctatggctcccttggcagcctgtgcaagttcatgcttggaagacttgagcatcaaaagatctagcagaggccaggtgcagtagctcatgcctgtaaatcccagcattttgggaggccgaggtgggatgatccgttgagcctaggatttcgagaccagcctgggcaacatagcaagaccctgtctctagtctctactaaaaaagtaaattagttaggtgcggtggcacatgcctgtagtcccagctatatgggaggctgaggtgggatgatcccttgagcctaggatttcgagaccagcctgggcaacatagcaagaccctgtgtctagtctctactaaaaaagtaaattagtcaggtgcggtggcacatgcctgtagtcccagctatatgggargccgaggtgggaggatcacttgagcctaggagttcgaggctgcagtgagctatgattgggccactacacttagtctgagcaacagaacaagaccctgtctcagaaatgtcctcaaggaacagccatcgccctaggaacccttctggccacaggatctgattaaaatctttatcctttatcacatgcagatgaggcagctgggtccagatrtgcacccaggcccataggtaacacatcctgttctccagatttactctgtgggtgtaggctggaggagccgagtcaattccctgtggctgcttttctttatcagactttttgagatcattaaagtaacacatgcccactgtataaaattgcagaggactgacttacaactctctggacatggtcagtcaaggtgattcatgcctgtaattccagcactttgggatgccaaggtgggaagatcgcttgagattagatgtaaggctgcagtgaactatgattgtgccactgcactccagcctgggcaatggagcaagaacccatctcttaaaaaataaataaataaataaacctctctggataccccattttactccctccaagagcactgtgaacaggtgggtgtgtctcttgtagacattttgtttgcatttacaagtgcctgcagcaagagagagagagagagaatgcaagcacaccagacttttttttttttttaacataaatgagatgcaaccacttatattctgaagctcgccgtctcactgaacaatgtacctgggttatcattctgagtacgttcagatctcatttaaccctttccaaggaccacagagcattctactctggtggcgccgtgctggaactggacctcttagagccccctgggctgtttgcagtgtggccttattgctgactcagcagggaagagggatggtgcatacagcagtggactctgcacctcagctgcctcatctgtaaaatggggtaaaatggctgggtgcagtggctcacacctgtaatcccagcattttgcaagactgaagcaggcggatcacgaggtcaggagttcgagactagcctggccaacatagtgaaaccctgtctctactgaaaatacaaaaattagctgggcatggtggcgcgcacctgtaatcccagctacttgggaggctgaggcaggagcatcacttgaacctgggaggcagaggttgcagtgagccgagatcacactactgcattccagcctgggtgacagagcgagactccatctcaaaaaaaaaaaaaaatgtggggggtaaaattccatctgcatcaccgaattgctgtgaggaccaaatggggtgaggcttctgcagccacaggcagtgctggcttcatggccactggtgcctccatattgactgcagccttaagcaggagctgggataacagtgacgctgtggacttgcagtgtcttggtgatcaaactccatttgatatggatgctgttgtatttgcagtttgtttcctgaaggggtgagctagattgtggtaaagtagaatgggagtttggggtgaattaaaacttgcatctttattcttaccctctctttctgtttttgtttttgttttgagacagggtctctcactgttgcccaggctggagtgtagtagtgctcactgcagcctcaacctcccaggctcagtcaacaagttatcctcctacttcagtcttccaagtagctgagactacaggcataccccaccacacctgactaatttttgtattttttattttattttatttatttgagacagactcttgctctgttgcccagggtggagtgcagtggtgtgatcttggctcactctaacctccacctcctgggttcaagcgattctcctgcttgagcctcctgagtagctaggattacaggtgcccaccaccacgcctggctaatttttttgtattcttagtagagatgaggtttcgccatgttggccaggctggctggtcttgaactcctggcctcaggtgatccacctgccctggcctcccaaagtgctgggattaaggcactgcagccagccaattttttataatttttatagagatggggttttgccatgttgcccaggctgggtcttgaacttctaggctcaagcaatcttccctccttggcctcccaaagtgctgggattacagtgtgaagcactgaactaaagagagaactgacaggcaattaaggatggatttcccaaggctaggtgtggtggctcacagctgtaatcccagcactttcagaggctaaggtgggaagattgcttaaccccaggagttcgagaccagcctgggcaacatagcaaaactccatctctacaaaagcttaaaaaaattagctggacatggtggtgagcacctgtagtcacagctacttgggcggctgaggcaggaggattgcttgagccaaggagtttgaggcttcagtgagctttgatcttgccactgcactccatcctgggcaacactgcaagtatacataggcaccatacagaaatgttcattgcaacttcttttatgtcagtaaaagcttaggaaataagccagctcgagctccattgggaaatagatgaacacctatgttacagttataggaggaaataatcctctgcatgtagcagttayaaatcattggctcaacctgtacaaataatgtatctcaaaaacaatatgtcaaggaggaaaaatgtccagcactctacaccatatgaaaccatgaaaactgtacaaaactttatgttgtatgtagatagacagatctccataaaaaatgtgtaagaatgtgctggaaggaaaattctccttggtgtgagggtggttactgcctgagtgggcaggacaggataagggtagtgatgaacgaggactctggcttcatttaaatgtttgatttctttaaaaattggccaggcacggtggctcacgcctgtaatctccgcactttgggaggctgaggcgggcagattgcttgagcacaggagttcgagaccagcctgaccaacatggtgaaaccctgactctgctaaaaatacaaaaattagctaggcctggtagcccacgcttgtaatcccagctactccggaggctgaggcatgagaatcactttaacccgggaggcagaggttgcagtgagccgagatcgcaccactgtactccagcctgggtgacagagtgacacttcgtctgaaaaaaaactccccaaaaaacaaaaaaaacttaataccccatgagcagatattaaaagaaaaaagaaaaaatataatggtcccctgatgtgccacccctgcagataatcactgttaacggtatatctgaagcagaaatttgctttttcttgtttgcctgggagattcttacagaatgagccaaaacctgtgttttggagtgactttgtgctgactgaatctccctattgattgtacaggttgatgacttctttaggagtgtcctttgtttttgtttttgtttttgagatgtagtctcactctgtcgcccgggctggagtgcagtggcacgatcacggctcactgcaacctctgcctcccgggttcaagcgattctcctgcctcagcctcctgagtagctgggattacgggtgccgccaccatgcccagctaattttgtatttttagtagagttggggtttcaccatgttggccaggctagtctcaaactcctgaccttgtgatccacccgccttggcctcccaaagtgctgggattacaggcgtgagccactgcacctggcctcttttttttttggtttttttttttttttttgagacagggtcttgctctgttgcccaggctggagtgcaatggcatgatcataactcactgcaacctcaaactcttgggctgaagcgatcctcctgcgtcagccactagaggcactgggattataggcatgggccacaacatccagctaggagttttaagagcctctatagaaatagatttaggtggccgggcatggcagctcatgccctggcataagagtgaggcctagtgacagagtgagactccgtctcaaaaaaaaaaaacaaaaagaaatagatttaggcaggctgggtgtggtggctcatgcctgtaatcccagcaccttgggaggccgaggcaggcggatcacctcaggtggagaccagcctgaccaatatgatgaaaccccgtctctactaaaaatacaaaaattggccggtgtggtggcatgtacctgtaatcccagctacctgggaggctgagacaggagaaacgcttgaacccaggaggcggaggttgtggtggggcccagtgacaccgcccgcctcagcctcccaaagtgctgggattacaggcatgagccaccgtggccggcccgtgtttttaatcagagaacacaaatgggcattcaatacttcctgcctgcccagaatctgtgggacacacttgagtttcaggtgacagggctataataatgtttgtgctcctgaggtcaagctgagttgagaatttacatgttgtggacatgtgtatgtattccctgctccagtaatcatgattattcatcacctattttccatcaggccctctactgaggacttctacctgcatttcacctttcatcctacccgcaactctataagcctggtagtattgctgtcccgtcttgcgggtgaggaaactgaggctcagggaggtcaagttcacattaagtataactaagggcatgtgtgtgaaggttgggcagggcagaatttgaagcccactttcaaacttataacttaatgtgaacttgacctccctgaataatgatcagaccataagaatgtattaataaacatttaagggacaattgaatagaattttaaaatcagagaggaggagccatgtttgtattgttcacttttgcattcctggcacctagcaccttagcataggatcactgttgggtaaatatttattgaataatgaatggttgccatttacgaaaccatgtttacagttttgtgctccagaagtgaggtaaagggttgcttaatgagaacccagtatttctactcaaaaggaccttattgcaaagtatttggaagtttaaaagagtgggaacatggggacgcatagggagtggtgaaactggcycagggaaagtccattgcagcaagatagaggttgccaaaccgtaagcagaacaagttgaaaccgcgcctgtctggcaaacagtccaaagtggaattgaaactcccatctttgaagtggtgaaaaaaggccctggggtgggggagtggggcagagggctggcgtctgtctgcctgggttagtcttggttcgggagtgtcccgagcaagcctggggagatgactgcccctcgccttgatccccaactaacctggggttctggattatgtgtggggaagagggaatgtgtgtggcattccgtgtttgtcttgaactttactccctggaatcttgtaatacaagcaatggcatctgctttccatcggacataatcacctaaccgcagattagcaagtgaaagagcacatgccgttgggatcatcccaggctgcaaaaccgcgccattagcttgctcactctttgggaaaatacggtgttccagggacggggatttcctaggtaacatgtccagttctctcatgcatcaaagcttgaactgaaatctttctagaatgtatcctgcctccttaaatcagaactactgaacacagtttagcctttcattggagaccctgggcagatgattactgaacacagtttagcctttcattggagaccctgggcagatgataaccacccattgtcatgaggtctgggggtggtggccagaatttcattctctcctggccttggtctgacctccgcccccaaggtccagttgtcctgctctgggcactgaccctgccccagctcctgagcccctcgaccaccacaatcaccactaagtctctgcctggcatggagaacaagatagccaaggtgaagagggatcctgttaccctctaactcagtagttctaatttctacacagtaatctgccccatgtttggaaaaacgcatgtgaaagggttcgccacagctgttgctggaatggcgatcacttgtcctaaaagtgcatttgtaggaaatcgttaaataaaccatggcctgaccgtgttgaggaacgctatgtggcttaacatgaggcagagctgcctgtggaataacgtccaagagaaactgagaaaagcgagttagcaaacagcaagtctattacccccacttagaaaggacacggcagtgtcccggttctctggtctcctgggtcctcccagcatcaagtgcagatcctggcacacagcaggtagaatcgcgagccccccgctctcccctcacctacaccctgcagccactcctcctgtccccaggctcttcctagcagtcacccttcagacccctcagctggccaagcctcctcctgcttctcacttgcttggttttgcttgtttcctgcgccctctcctcaccaggacttcagctcccacaagccaggacttggctcttggactccctgtgctggagtggccagggctgtcagtgaaagcttatggaatgcgtgggtgaatgaatccaatttttacaaaacaaagtgagatgtatttattaaaatatgtaggaattagagtattttgatagaaaatctttatgttttgcctacagtctagattgaaaatgtcaactccagacatcactgtgcttctggaaactataaagaggaagtgggagctaggacatccccccaccacgccccgcccaagagcgtttacgtgtgttatgtaagtcgagcttcgggtttctggtcaggaggttataaagcatttggcccagagtctggcctggtgtttattcaggaaaactgctcctcacttgaagcagaactttggcagaaactcagtgtgagaacagttcctacccagccccccaccggggagggaagccactgagtctggctctgggagaagggaaatgggaaatgtaaaccggaggaggtttccagcgtcctacagcagacccaggtttatcttatcagtggagaagggaggatgggttgttgaaaatgcagcctggttcaacagtgaagggtgattgagaacattctgggctttgaaaggcaaacatgccagggagtggtctttccaggatcctaatctaaatcagaggggccagcccagcgaggaaggggtggggctggtggggttttagccagactggcccacctctccccttcctacttcctgatctttgcaaaataaagtttaaaatccaggacaatttagtatgctttggtgcagggaacaacataaagagtatagacctggccctcgctcctaagaatctttaagctacgagagagctgcaggatctagaacactgcaggaccccctgcgggcaaggtcctagcttaggaactgtacactcgttcttgcatttaaccttcacatcagcccccagaagtactcgatgaggcatctgggaagtgaagggatttgcccagggtcaaatctgtgagggatggagtcagaattcaaacccaggccgggcatggtggcgcacagctgtaatcccagcactttaggagtccaaggcaggaggatcacttgagcacaggagtttgggaccagcctggccaacatggtgaaagcccatctctacaaaaaatacaaaaaaaatcccacctttatttaagaaaaaaaattcaaacccagatctktttggctttgaggttggtgctttttacaacattcagaataaaattttttttttttttgagactctgttgcccaggctggagtacagtggtgcaatcttggttcactgcaacctccatctcctaggttcaagcaattctcctgcctcagcctgtcgagtagctgggattacaggcaagtgacaccatgcccagctaatttttgcatttttagtagagacagggtttcaccatgttgtccaggctggtctcgaactcctgacctcaaatgatccacctgccttggcctcccaaagtgctgggattacagggatgagccactgtgcctggctcagaatcaaaatgtgaaatcaacgtgtgttgagtcagtaagtaaaccataaagatggagatttgggaatcagaattccaacctccttgaaggcagacctgggctatggctggaggttggagttgggaaaaacacaggccttggagtcccaaagacctggcttcaaagcctggctctgcctttgctgctgtgtgacctagagccaagtggctggactcttctgtgcccagcatcctctgctgtgaagtggagaggatgaagttcacctcctaggtttgctatgaggtttaaatgggaacaatccaagtacacagaaccgctggtgtggggctggttcttgaggggtagctagtgaatgttagccatgtccatgacacgcagagggctgagtggacttcctccctgggtgggggaggaagaagcttggggatagtacaaggccaaccagacctacttccacccagcccagcctagtgcttctctgtactctcctaaccctgctgacccaagtgctttgctgtgaggcagttgtgtgtgaggcgtgaaccctgagcctgtgctacagggggaaggagagaaggatgcctactcaatggctgcaagctgcctgcccgccccccacgcccgtgagcccccatcttccagcaggcagacccgggaactcccttctcctccacgggcaccccgaggaggagctgactttcagagtcggggagtaaacacccaggacctgctgcccaggcacggcatagtccaacttgaacttaggtctggcagtttcctggctttgaacctgagctctttattgccacacctgtccccacactggaaatgacccagccctcccgtggaaagaaagaagggtgccatttccctaaaaattaacgattgactaactaatatgaaaccacacaagcacgcctccagaaccccagttaatgtttacccatgttcttctccggtgccaagagcctttcctgtgggtgcacaactgcgggttccaccatagagattatgcggaacaaatttcagcctgggaatatgattcctgctaggcccttacctgaacgactccttcctggggcactctgtttccaccctgccatcgtcatggcgttgggcattcactccatgcttggcgcagagactgcagaccctcacatggctttataaaaagggggctctagggtgattcccaccctacagatgaggaaacaaagacacaggggtgaggtgcttgtcccatgtgacaaaatcaggagcaaaagagcccatattcggccaggcgcggtggctcacgcctgtaatcccagcactttgggaggccgaggtgagtggatcacctgaggtcaggagttggagaccagcctggccaacatggtgaaaccccgtctctactagaaatacaaaaattagccgggcatggtggcaggcatctgtaatcccagctactcaggaggctgaggcaggagaatcgcttgaacctgaaaggcggaggttgcagtgagccgggatcgctccattgcactccagcctggggaacaagagccagactttgtctaaaaaaaaagaaaaaaaaaaccctcacacctgtaatcccagcactttgggaggcccagacgggcggatcacgaggtcaggagattgagaccatcttggctaactcggtgaaaccccgtctctactaaaaacacagaaaaattagccgggcatggtggcaggcgcctatagtcccagctacttgggaggctgaggcaggagaatggtgtgaacctgggaggttggagtgcagtgagctgagattgcgccactgcactccagcctgggcaacagaatgagactctgtctcaggaaaaaaaaaaaagcccatattcgtccagattctttttttttttttaagagtctttttctgtcacccaggctggagtgcagtgatgcaatcacggcttactgcagcctcaacctcccaggctcaaatggtcctcccacctcagcctcctgagtagctgagactataggcacgcaaccacacctggctaatttttcactttttgtggagagagggtctcactatgttacccatgttggtttcaaactcctgagctcaagcaatcctcccaccttggcctcccaaattgttaggattacaggcgtgagccactgtgcctggccacccagattcttgtcttgaacctctgctcctttttgtgttttcttttttgagagagggtcttgctctgtcacccatgctggaggcagtggtgtgatcatggctcactgcagcctcaacctcccagactcaagcaagtgatccgtccatctcagcctcctaagtagctgggattacaggcgcatgcgaccacacttggctaatttttcattttttgtggagatggaggtctcactatgttactcaggttggtctcaaattcctgagctcaagcaattctcatgccttggcctccaaaagtgctgggactacaggtgtgagccactgtgccaggccaaatgtctgcttttgaccagtgagcctggccacccctccccagccctgttgtgagcctcactccaggctttgcttggcagctcggtattctttatggtccgagactctggcccagagtgaccatggatgtctcactggagttctaggccagggccaggacatgcagggatgctggggccaaagggacccccaaggaaggcaggcagagaggcagatgtctttgccttcacgtcacctgtagcctttgcctcagcactggtgaggtgaccatggaccctgccaggacactggtttaccaagcccgaagggaacagcttgctgggagatgtcttctctgcactccccaagaccatcgcccagtgcctggaaagcagagggcgaactctggcactttatgtatgtatttatttttattttttgagacggagtttcactctcgttgcccaggctggagtgcaatggcgtgatcttggctcactgcaacttctgcctcctgggttcaagcgattctcctgcctcagcctcccgagtagctgggactacaggcgcctgccaccacacctggctaattttttgtatttttagtagagatggggtttcaccgtgttggccagactggtctcaaactctggacctaaggtgatccgcccaccccagcctcccaaagtgctgggattacaggcatgaacaccgcacgcagcctcgcactttaataggtgactttaggtaataagtaaggacccttcctctgagcaaatggaggggctttggctctctgacattggcctcatgaggaaggaagtctttcccccagatgtggcttggttgggtgatggcctggtctgaattacattctagaggcggaaccgtcttgggacccgccctcctccctgaccccgttttttatcacttcctttctggttcaccagtaactctggccacctttgctttttctcaaatctaccagacttattcctgccctggggcctttgcacttgctattccacagcctggactgctggtcctccggctcttcctgtggacccctccttttcatcattccggactcggtcaaatgtccactcctcagggtgacctgcccctaccaccacggctggagttctctaccccccaccttagtcaccttctctggatcctcttcttcccttcgccttcatctgtacagtctgaggtggtcttctgtgtttgattgcctctttatttcctgggcaccatgagagcatggtctttgttggcttttggctgtactgtgtcctcagccctagaactgtgcctggcccatcgcaggtgttcattaagtgtttgctgagtgagtgaagtaataatctagggctgggcatggtgactcacacctgcaatcccaggaccttgggtggctgaggagggagtatcgcttgagtccagcctggggaacatagagggacctcatctctacaagaaatacaaaaattagccaggcgtagtggcgtgtgcctgtggtcccagctactcaggaggctaaggcaggaggatcacttgagcttaagaggaagaggctacagggagccatgatcacgccactgcactccagcctgggcagtggagtgagaccctgtctcaaaaaagaaaaaaaacaataaaaagaataatctaatttagttctcacaacaaatttgtgtgggagtggaatagaatgaaggtggttgcaaattgtttgccattccttctagggagaaggggaggctctctcctcaacctgggactctggactgagcctgtgactcactttgaccaacagaatttggtggcagaaatgaggccaagtgacttctgaagctagatcttaggaagcctttcagcttccacctgggtctctaggaacactgtctcaggggaagccagctgccatgtgggaagtcggactagcttgagccagccatgcagtcaggaagcccaagcagccatgtggtgccagacgagtaagtgcagaagccatcttgcacatccagcctcagaggtggatgactattggccccagctgtcctcacactgtagccacacaagggaactctgcccagatgagcccaaccaggggactctactgtgggagataagaaatcattttaagccaccaagttttagggtgctttgttacacagcaatggataactagaacaagtatgaacattctcttcattttttaaagaaaccaaggcactgagaagtcaagtgacttacccaaggtcacttggcagagtgagcattctggcctagattgtctgcaaggcctgtgcttttcatttgtaggctacaccactctgaaattaattcatatttgctttttcttgtttttttttttccttacaatactggtagtcagtattaggttgacagctggtcctgagaacttctttccttctcattgtagattttcataaacaatgaatggcacgatgccgtcagcaggaaaacattccccaccgtcaatccgtccactggagaggtcatctgtcaggtagctgaaggggacaaggtgagaactggtgacttaccttgggggagggatggattcgtcttctattttatacgtttttgtgtggtgaaagctttaccatatatgtgtattactttcacaagtaacagataccagtgaaaaattccgagtaaattaatcaatagaaacttgtctgcagacaacggtgttaattcacttagtgtagaactatagacttagaagtgaattcggcaaatatctaatacagtgtctcctttccagacctggaagttgaaggtcagagatggaaaccttgctgggtagaatttgggtctcctaagatctagctcctgtggaggtttgaattgtacagactgtaggaaccaatcgaaactgataatattctgtttaaaatttttaaattagactcttagtaaaaatattttgtgtttttggccgggcgcagtggcgcaggcctgtaatcccagcactttgggaggctgaggtgggaggatcacttgaacccaggaatttgagaccagcccggggaaacatagtgagataccatctctaaagtaaacaaagaaacaaataagtaatttaaaactaagaaaatacaggccaggcgcagtggctcaagcctgtaatcccagcactttgggaggccaaggtgggcagatcatgaggtcaggagtttgagaccagcctgaccaacatggtgaaaccccgtctctactaaaaatacagaaattagccaggtgtggtggcatctcttgagtaatcccagctactcaagaggctgaggtaggataattgcttgaacccgggaggcggaggttgcaatgagccgagattgcgccactatactccagcctgggcgacagagcgagatttcgtctcaaaaaaaaaacaaaaaaaaagaaaatacagaaattatccggattctcattcccaccaggacttcatgaaaggaggggaaggtcatgttattcaaccccattgctgaagtctggtgctcatcagggctctgccgggctaggagcattgtttacggggcaggttttctgtgcagcgatatgctgatgaccttctggatgtgtttgtattcggacctggttattactgagaagacctgagttttccaggaaggcttgagttttcctgtgttttctaggaagatgtggacaaggcagtgaaggccgcccgggccgccttccagctgggctcaccttggcgccgcatggacgcatcacacaggggccggctgctgaaccgcctggccgatctgatcgagcgggaccggacctacctggcggtgagtcctcagcccttctccccctcagatcccatgtggtgaataggctcgcagcatcctgtgaacagccaggaaccaagcatcctgtgaacagccagggaacacacatctgacacgggactgatgggaatggcataggatggacacctttagggggcacctctgtactaaccagaggagcctttcagtgtctcctttgtttttttgttttgttttgttttgcttttttgagatggagtctcactctgtcgcctaggctggagtgcagtggcgacatctcggctcactgcaacctccacctcctgggttcaagtgattctcctgcctcagcctcccaagtagctggaattacaggcacaagccaccacgcacagctaatttgtgtatttttagtagagacaaggtttcaccatgttggccaggctggtctccaacccttgggctcaagtaatccacctgcctcagcctcccaaagtgctgggattacaggcgtgagccaccgcacctggcctttgatgcggcgggtttggctaagcaagaaggatctgggggaggggagaggagctgtgtcagggaggccttcccaggagagagacccctgggaatggacacctctccctcggcccctccatggtgggccttctccctggctgcaagaggagaagaaaccaggaggcaatctcctcccagccacaattgattctgcacacagaagccagagcaaaccttccagaaggcagattatacatggcactctgctcttatccctgcatggcatgcggtgtccttaggataaaatcctcaacatggtctgtaagaccagcctgtaacatggcaagatcctgtctctacaaaaagttaaaaaactagctgagtatggtggcatatgcctgtagtcctagctacatggtaggctgaggcaggaggcttgcttgagcccaggagttcaaggctgcagtgagctgttgtggtgccactgcgctccagcctgggcaacagagtcagatcctgtctcaaaaaaaaaatgacccagcctgttctagttccatcatctgagtcatgctgcactgcagtcctcacattcacatgtgctcctgagcctgggctcccatgcttgatggccaagcctctttgagcatcagcgcttgcacctgcctgggatgctcttcgccctgctgccatctgtaccatcccctttgcccagttgccccctacatatcattcaggttctagcctaaagggctcatctctggctgatgtttctagacagggctgggcagcctggctccctgctttctattttttagcattcttttattattattattattttttgagatggagtctcactcttcacccaggctggagtgcaatggcacaatctcggctcactgcaacctctacctcccaagttcaagcaattctcctgcctcagcctccccactagctgggattacaggtgtgcaccaccatgcccagctaattttgtatttttgataaagtcaaggtttcactgttttggtcaggctggtctcgaacacctgcctcggcctcccaaagtgctgggattatagctgcaagtcactacatccggcctctagcactcttaacacatgtgactgaggacttgtgtcattatgcacagtctctttgctctgtaagctccacgctggtctctatcccagyacctggatatggtagagagcagaagctaaaagagtgtgtttatgaaatcactgagtgagaaattggtggctcatcctgcctggcccccttcctcctcctccctgccttyggagagaccatggcaatagtccagagatgctagtgacatttggggcacaaagcggactctcaccctgggcttgcaccagcccttctcagtcccagccttggcgccctctgtcagccctttgttttcctctcattcctgcacccatgtctctgctgaccttgttttcttctcaggccttggagaccctggacaatggcaagccctatgtcatctcctacctggtggatttggacatggtcctcaaatgtctccggtatgggctcagctttcctgttctttgttctggcaggggaaaaggggaggcaacgttgttaggaggtaaaaattaaattacaaaaattcaaaaggggcagagcgcggtatctcatgcctataatcccagcactttgggaggctgagccaggtggattacgtgaggtcaagagtttgagaccagcctggtcaacatgatgaaaccccatctctactaaaaatacaaaaattagctgggcatggtggcgcacacctgtaataccagctactcaggaggctaaggtagaagaatctcttgatccctggaagtggaggtcacagtgagccaagatcacgccactgcactccagcctaggtgacagagtgagactctgtctcaaaaacaaaaacaaaaaatgaataaattacaaaaattcaaaaggatcacaggagtcagagaaggctactctatttagactccagctcatgggaaaatccttcaatatcacaaattgtgattagtcataaatgctttcttttgttcttgagtcacttttggtactttctgtgttatttggaacttgtccattttatcgaggttatctaatttgttggtgtacaattgttcacagtattctcttataatcctttttatctctgtaagatctgtagtgttgtcttcattttcagttttacttatttgggtcttctctctgtttcttagcctagctaaaggtttgtccattttgtaaatgttttcaaagaaccaaacttttggttttgttgattttattatttttctattcaagaaaatattgtcttttgtctatctccgtttcagtctttatttccttccttttactagctttgggtttggtttaatcaaaaatgtttgattgattgattgattgattattattattattttttgagatggagtctcgctctgttgcccaggctggagtgcagtggtgcgatctcagctcactgcaagctccgcctcccgggttcatgccattctcctgcctcagcctcctgagtagctgggactacaggcgcccgccaccatgcccggctgattttttgtatttttagtggagatggggtttcaccgtgttagccaggatggtctcaatctcctgaccttgtgatccaccctccttggcttcccaaagtgctgagattagaggcgtgagccaccacgcctggcgattgattgataattttaattttttttttttgaggcagggtctcactcttgcccaggctggagtgcagtggcacaatcatagttcactgcagtgttgaccttctgggctcaagcaatcttcccacttcagcctcctaagtagctgggaccacaggcgtgcatcaccatgcctggatactttttaaattttttgtagagacgggggtcttgctatgttgcccaggctagttttggactcctgggctcaagtgatcctcccacctcggcctcccaaagtgctgggattacaggcatgagttactatgcccagcaaacataaacatttcaatgaccaaggaacaagggctttgttaaagcccatgtgttggagctgccagaaattcactgaggccaggcacagtggctcacacctgtaatcctagcactttgggaggctgaggcgggtggatcatttgaggtcagaagtccaagaggagcctggccaacatggtgaaaccccatctctactaaatatacaaaaattaaccaggcagtagtggcgcatgcctgtaatctcagctactcaggaggctgaggcacgagaatcacttgaacccaggaggtggaggttacagtgagccgagatcgtgccattgcactccagtctgggtgacagactgaggctccatctcaacaaaaaaaaaaggaaagaaagaaattcactgagcccaacttaaacgatagagtcaagaggtctctaatgcaaaaggccattgagtctcactcacctccctgcttgcttcattctcctcagctacactggctttgagggccagtttttacattgggacctggtagcccacaccacctgttcttgtacctccatgcctgattccagccaggctaagctgtcatcttttagttgtaatgccatattcctgagggaggaccctgagtggctggccttggttctggccagctgtggccaagggtggacagatcatttgtgtacataatggctgcctccctatgacatgtaaacagaggtggtggggaggaagcagtgccagaagagtagaggttggacaagaaaacagttgggccgggcgcagtggctcactcccataatcccagcagtttgggaggccgagctgggtggatcacctgaggtcaggagttcgagaccagcctggccaacatgatgaaaccccgtctctactaaaaatacaaaacttaggctgtgcgcggtggctcatgcctgtaatcccagcactttgggaggtcgcggcggggggatcacgaggtcaggaaatcgagaccatcctggctaacacggtgaaaccccatctctactaaaaatatatatatataaaaaattagctgggcttggtggcaggcgcctatagtcccagctactcaggaggctgaggcaggagaatggtgtgaacctgggaggtggagcttgcagtgagctgagatcgcgccactgcactccagcctgggcaacagagcgagactctgtctcagaaaaaaaaataaaaaataaaaaaattaaaacttagatgggcgtcttggcaggcatgctacttgggagtctgaggcaggagaaycgcttgaacctgggaggcggaggttgcagtgagctgagatcgcgccactgcactccagcctgggagacaagagcgagacttcgtctcaaaaaaaagaaaaaaaaaaagaaaacagtcggtatccttcacaacaggtgcacacagccagggcaatcacgcctccccggggacactgggcaatgtccagagacatttttggcagcctcgactgcgaggggaagggtactactggcatctagtggatagaggtcagagatgctgctcaacatcgtacaatgcccaggacagtcccacaacaaagaattctccagccccagatgtcagcagtgccaaggctgaaaaactccctctgcaaggacaccccagagagagcagcctggtacatctcagttggggccacatgctttcctgaattttggcattctgcttttgtgctgatgaaataacttctggggcttgcaaaacacatgtcatgtagactgtgtttgtatagatctgggggaggraagctgcaatgcctgggcttgcatagattggcaaccccctagctagctttcttccagggtcacaaacccatgttcaaacccaggtcactagccaggtgctaatggctcgagcctgtaatcccagcactttgggaggccaaggcaggaggatcacttgagctcaggagtttgagagcagcctgggcaatatagggagacccacatctctacaaaaaatttaaaaacattagccaggcatggtgacatgtgcctgtagtctcagctactcaggaggctaaggtgggaggatcacttgagcccaggaggtcaaggctacagtgagttatgattgtgccactgtactccagcctgggcaactgagcaagaccctgtttctttctttcttttcttttttttttttttttttgagacagagtctcgctctgttgcccaggctggagtacagtggcgtgatctcggctcactgcaacctccgcctcccaggtttaagccattcttctgcctcagcctcccgaggtgctgggattacaggcacccgccaccacgcccagctaattttttgtatttttagtagagacggggtttcaccaccttggccaggctggtctcgaactcctgacctcgtgatctgctcacctaggcctcccaaagtgctgggattacaagtgtgagccaccacacccagcaagaccctgtttcttaaaaaaaacaaagaaggtcaggcatggtggcaggtgcctgtaatcccagctacttgggaggctgaggtagagaatcgcttgaacctggggggccgaggttgcagtgagcccagatcacaccactgcactccatcctgggagacagagcgagacgctgtctcaaaaaaaaaaaaagaaaagaaaagaaagaaaaaaaaaaaatctaattcctgggcatgagccccagagagtgggattgagtagattggaaatggactcctgggatctggtgttttttacaagaaccccaggcgattctgaggcttgggggttagctacctagagtagattttcgtgacctttgcagtcacttgtctctctctgaataagccaaaagcaaagacagttttcagaaagactcagctggaccagtttgagtcttctctttctgccagggtttgcaggggtccctgacaatcattgattcgagcttgaacgtttctttgtttaaaggtattatgccggctgggctgataagtaccacgggaaaaccatccccattgacggagacttcttcagctacacacgccatgaacctgtgggggtgtgcgggcagatcattccggtgagtccagcctccctggagtttcttcagggtgccctgagatttggcagtctgccagactcattgcagaggttctggggtggtgtcggaaggcagcctgggtggcaggtaagaagatgggctctgacaaagccaatccggtttgagtctcagcactgccactcgtgaattctgtaaccttgggcaagtcacttatcccccaagcctcagtttccccatctgaaaagtggaaatgaacatagtgcctgtcttagggaggtaattagggcttagcatggtgtcacggacataaaagcacggataaatgtgagtctgtcatcgttgtgcaccgcctgcctcatccattcatcttaaaaccacgatggatggagttaggggaggacacgcagggttcagagaactcggtgctgcttctgccctctggggttgccaccttctgctacccagtgtagttctctgaggaagcttggatttcgagggctgctgttgtttgttgcagtggaatttcccrctcctgatgcaagcatggaagctgggcccagccttggcaactggaaacgtggttgtgatgaaggtagctgagcagacacccctcaccgccctctatgtggccaacctgatcaaggaggtgcgtggcttatcctggtcttaacctctaaatgcccttgttgaggcttgttctaaaggagttctgagaagggtctcaggggtccctaaacagggaggtgtgtttgtggagcccccatcaccatgtgaaccagagtggctccctcttagcttttttccacattggacttcactgcaagatcccctttgaagaattaaaaatattgctctaggccaggcttggtggctcacgcctgcaatcccagcactttgggtggccaaagcaggagggttgcttgagttcaggagtttgagaccagcctgagcaacatagcaagaccccatctctacaaaaaattaaaaatcagcygggtggcatgcacctgtagtcccaactacttgggaggttaaggcaggaggatcacttgagcccaggagtttgaggctgcagtgagctgtgatcacaccactgcactccagcctgggtgccagagagagactcggyctcaaaaaacaaacaaaaacccactgttgttctaagtgaatgctgtcaggggaggggcaaagacacagggraccccagcgaacagactccttctccgtcccatttagaattcccatgtagtgccccatacaattagcttctgaccacatgtgtccttggcagactgtcccaccctctctgagaaaggatgtgtcttcccctggttgagcccttcagaataggagggtgactyccaatgtcccctggctgtttgctcacaggctggctttccccctggtgtggtcaacattgtgcctggatttggccccacggctggggccgccattgcctcccatgaggatgtggacaaagtggcattcacaggctccactgaggtaaggtgaccctggcctcaagcttgcagcctccttggcccaagctccccctgtcctcagtggacgacatgctcaaggtgagctcccgggtgtcaagcggaggccttttcctccaggacgaccctgtaggtaccaggaggggtggggcagggttgagcccttcgtggtctggttgccacactagctgcccttgggaggggccagtgtcccatgtggactaaggaggccaggcctggccagactccacatagcccagagctgaccgcttgccccaaatcaaagcatcttggccaggtcagactccttgaccaggactgccattgtggttaaaaattagccttgtgtggtggtgtgtgcgtgtggccccagctacttggaaggccgaggcaggagggttgccagagcctgagaggtcaaggctgcagtgagctgagatcacgccactgcactccagcctaggtgacagagcgagaccctgtccaaaagaaaaaaaaagtgaacgtctatttggtgaaattctctaggtctctcgtggtccagttgctcactcaagctgtgggggactctgttctgtgtctatagagtgctggactcttttctcccggcactgagagcttgttcctgtctttctgtccccacagattggccgcgtaatccaggttgctgctgggagcagcaacctcaagagagtgaccttggagctgggggggaagagccccaacatcatcatgtcagatgccgatagtgagtttccagctggagaaggcctggccttgaaggtagccctggccrcctgtgttgtggctccagccratcctgtcgcccccccagtgcccaatggcgttggttgctgtccctcgggcctcaggataagacgccagcgcagggcctgcatggcctggccttggcctgtccccagcctctccctggctgctctctgcatcatcaggctaggccacgcccctgctatctgactcatccacttgccgccatcacgccctttgtcctggttggcagtgggctccgagagcacccctcatctccctgtatctgtctctggcacccagcaggcatcaacccttacagtggtgggaacaggctccattgggcaggcggccaccagggccagggtcctcctcctcactgtcacctttctgtctcctgcccacttcccgcagtggattgggccgtggaacaggcccacttcgccctgttcttcaaccagggccagtgctgctgtgccggctcccggaccttcgtgcaggaggacatctatgatgagtttgtggwgcggagcgttgcccgggccaagtctcgggtggtcgggaacccctttgatagcaagaccgagcaggggccgcaggtgagccaggcagtgccgcagggtctgggtgtctagagccagcatgagaagcagagagggcatcgggctcagatcagttgggactgggttcaggtctcagctctaccacacagcagctgtgtgcctttgggaagctatgttccctccctcagccttcatttccccatcccgagccgtgccctgcctcattcacagggtggctgtgatgtagaaattaatcctgggaagcactttgtaaattgcatatatgtaacaaataccaggagtgtctgcaaaagggagtgtgtgtttccaagaccttggtcatcagtagaagtgtatccaccagaagatacacagctctgtgaaccttcgtgtctgagagccatggtatggctagtatagggactttatttcacttcatgttttgagctgtttgattttatttatttatttatttacctatttatattttagagacaaggtctctctttgttgcccaggctggagtgtagtggtgcaatcatacctcacctcagccttgaattcctgggctcaaggagtcctcctgctttggcctctcaaagtgctgggattacagacatgaaccaccacacctggcctggattttacttttgagcagttgtaggtttatagaaaaatagagctgaacgtacagagggtgcccatatattccttcgcacctccctgttccaccagtttcccctttattcacatcctgcatgagtgtggttcatctgttagtattgatgagccaatactggtaccttattattcacttaggtctgtagtgtatattcgggtttttttttttaatttttattttttttggagacagagttttgttctgtcacccaggctgcagtgcagtggcacgatctcgactcatgcctcccgggttcaagcaattcttgtgcctcagcctcctgagtagctgggactacaggtgcgcaccaccacgcctggctaattttttgtgttttagtagagacagggtttcactctgttgcccaggctggtctcgaactcctgagctcgggcaatctgctgtcaggcacccagcctcggggtcattttttgtgttgtacttactatgggcctagacaaatgtatcataatgtgtatgataccatcattctagtatcatataaatatatttgtgccctgaaacccccgtcctccacctattcttccctcttttcctcccctgagccctggcaggcaaccactgatttttttttttttttttttttttgagacagagtctcgctccgtcaccaggctggagtgcagtggcgtgatctcggctcactgcaacctgtacctcctgggttcaagtgattctcctgccccagcctcctgagtagctgggacttacaggtgcatgccaccatgcccagctaatttttgtatttttagtagagacagggtttcaccacgttggccaggatggtctcgatctcctgacctcgtgatccacccacctcagccttccaaagtgctgggattacaggcgtgagccattgtgcctggccgatctttttattgtctctatagttttgccttttccagattgtcttatacgaatcatacagtaggtagccttctcagactggcttctttcttttagcagtttgcatttctgattcctcagtggggagccacagccatgtctgaggatggactggccttgccatgggacagggttatgtgcccaacatccccctctttgattttttttagagacagggtcttgttctgttgcccaggctggaatgcagtggtgtgatcatggctcactgcaggcttaacctcctggcctcaagtgatcctcctgcttcagcctcccaagtaggtgggactacaggcacacgtcaccacacctggctaatattcatattttttatagagatgaggtcttgctatgttacccaggctggtcttgaattgctgggctcaagcaatcctcccacctcagcctcccaaagtcctgggattgcaggtgtgagccactgtgcctggcctccaacatctctatctttaatagctttattgagatataattcacgtagcataaaatgcaccattttagtgtacgattcagtgatttttagtatattcacaactttgtgcaaccatcaccactaattctataatattgtcattgcctcccctaaatatcctgtacccattagcagtcactccccattcctccccctaccaggcccaggcaaccaccaatctatgttctgcctatagatttatctattttggacattttatgcaaatggaatcctacatggttctttgtgtctggcttcttccaagtagccatgttttaaaggttcatccatgttgtaataagaatgtatcagaacataaaaggccaagtaatattccattgtgtgaatagaccacattttgatttttcyattaatctgttgacagacttgattgtttccaccttttggttactgtgaatagtgcagctaggggcactaacatttctttctttcttttgagaccgtctcgctctgtcacccaggctggagtgcagtggcatcatctcagctcactgcaacctccacctcctaggttcaaacaattctcctgtctcagcctcctgagtaggtgggactacaagtgcacgccaccacgccctgctaatttttgtatttttagtagagacagggtttcaccaagatggtcaggctggtcttgaactcctgacctcaggtgatccacctgcctcagcctcccaaagtgctgagattacaggtgtgagccaccgcacctgtcctaacatttcttttcttttttttttttttgagacagagtcttgctctgtctccaggctggagtacagtggcacgatctcggctcactgcaacctccgtctcccaggtttgaatgattctcctgcctcagtctcccgagtagctgagattacaggcgcccaccaccatgcccagctaattttttgtatctttagtagagacagggtttcaccatgttggccaggctggtcttgaactcctgaccttgtgatccgcccacctcagcttcccaaagtgctgagattacaggcttgagccactgcacccgtcctaacatttctttttgtctcatttctctttgtggctaattattaagataatataaacttgcattaataaatttaatgagaaagtgtttaggctatgtgtggcagctcacatctgtaaccccaacactttgggaggctgaggcaggagaatctcttgagcccaggatttcgagatcagcctgggcactacagcaagacctcatctctactaaaaaaaaaaaaatgcaaatcatgaccagcctggccaacacggtgaaacctcatctctactaaaaatacaaaaactatttgggcgtggtggtrggcgcctataatcccagctactcgggaggctgaggcaggagaatcacttgaacccgggaggcgcaggttgtggtgagccaaaatcgtgccaccgcactccagcctgggtgacagagtgagactccacctcaaaaaataaataattttttttttaaaaaaaagcaaaaaaaaattagccagatgtagtgatgcstgcctatactctcagctacttgggaggctgaggtgggagcccaggaggtcaaggctgcagtgagcagtgatcacaccactgcactgctgcctgagtggcagagtgaggccctgactctttttaaaaaaaggtatttaatgtaaaaaataagactttgttgcatttcttttattctccatyggtaaccactcatgcacacacagttatgctgttgtatgtttattttttaaaaaataggctgggtgtggtggctaacccctgtagtcctaacacttgggagggaggccaaggtgagtcaattacttgagcccaggagttagatactagcctgggcaacatagcaaaaccccatccctactaaaaatataaaaattacccaggtgtggtggcacacacctgtggtccagctactcgggagactgagatgagaagatacctgagctcagggagattgaagttgcagtgagccgtgattgtgccactgctcttcagactgggcaatagagtgagaccctgtcgcccttctcccctaccctataaaggagtatatagtgcatattgttctacaagctttacttctttttttttttttttttgagacgaagtctctgttgccagagctggagtgcaatagcgcgatcttggcttactgcaatctccacctccctggttcaagcgattctcctgcctcagcatgtgccaccatgcccagctaatttttgtatttttagtagagacggggtttcactatgttggccaggctagtcttgaactcctgacctcatgatctgcctgcctcgtcctcccaaagtgccgagattacaggcgtgagccactgcccctggcccaagctttccttctttttacagagtatcttgggccatctttctgtgtcagttagttcacagatctattagtgatgacaatatactggatgcaccgtaataattttaaccaacccctctactgatttatacttagaattgtttccatcttttgcctttacaaaatgctcccccagcctgggctacaaggcaaaaccctgtctctactaaaaatacaaaaattagcccagcgtaggggtgcatgcctatagtcccagctactcgggaggctgaggtgggaggatcatttgagcatgagaggcagaggttacagtgagtggagatcgcaccactgcactccagcctgggtgacagagtgagaccccatctcaaaaacaaaaatacaaaaaaaaaaaaatactccctagtgaatatccttgttcatttctctttgtgcatatgtagaataaattcctagaagttaaatagctgggccaaaggatctgagtatataatttttgagcaatattaataaaccacttgctctaaaggctgtaccagtctgtcatccttctaacagtatatgtaacggtctcttgctatcagtgtattttcttcctaaactttttggtaatcttatagttgaaaagtaaagattgatttgatgtccttttctccggtaggctgaggaagttgggccttttttgtgttttctgctattggccctgtgtgtttcctcttctgatcttgctttcttatgaccttggtcmatttcccagttgtcttgttgcctgcataattctaagcctgaagcctaggagaggtctgaatccgatgtctccataactctgggttccttctcccacaggtggatgaaactcagtttaagaagatcctcggctacatcaacacggggaagcaagagggggcgaagctgctgtgtggtgggggcattgctgctgaccgtggttacttcatccagcccactgtgtttggagatgtgcaggatggcatgaccatcgccaaggaggaggtgagcacttggggccagtgctctggaaacattcttggcgggaggtgaggtaaacagttcagcctggcatcctgatgctgtcacccatctgctggcttggggccagatctcaagttatacccagaaccagtgcccataacacgctattcatagtatgtatctgatcttgtccctcctcttcagcttgtaccctctgtctgggagatcgtctgcattcctcagcatggcctgcaggccttggtgtcctggccctcagagccaggagtctaggaatgacattgtctgctccttcccatgaccttttttctttcagtcagattcttgctctgttgcccaggctggagtgcagtggcataatcatggctccttatagccttgaactcttgggctcaaatgatcctcccacctcagccttctgagtagctgggactacaggtgctcaccaccatgcctggctaattttaaaaaaattttttagtacaggctgggtgcagttgctcacgcctgtaatcccaacactttgggaggccgaagtgggtggatcacctgaggtcatgagttcgagaccagcctggccaacatggcaaaaccctgtctgtattaaaaataagaaaaaattagccctgcgtggtggcgcttgcttgaaatcccagctactctggaggctgaggcaggagaatcgcttgaacctgggaggcagaggtttcagtgagccgagatcgcgccactgcactccagcctaggcaacagagcgggactctgtctccagttttagccacgcctggctaatttttgtatttttagtaaagacagggtttcaccatgttgatcagactagtctcgaactcctgacttcgtgatctgcctgcctcggcctcccaaagtgctgggattacaggcatgagccaccacgcccggcttattttttctcttctcgttttgagatggagtctcactctgtcgccaggctggagtgcagtggtgcaatctcagctcactgcaacctctgcctcccgggttcaagcgattctcctgcctcagaccctactagtagctgggattacaggcgcacaccaccacgcccagctaatttttcttattttcagtagagatggggtttcaccatgttggccaggcttgtctccaactcctgacctcaggtgatccacctgcctcagcctcccaaaatgctgggattacaggtgtgagccatcgtgcctggccaaaaattttttttttttttttgagtaaagacagggtctctctgtgtttgccaggctggactcgaactcctagactcaagcagttctcccaccttggcctcccaaagtgctgggattacaggcatgagccacaatgcccagctgacttaaattctttgacactaaatctacgtgtcacgtgtgaataacatacctggcaggattgtttagaaatgggatactgtatgtaaagcccggggcgcacaggaggaagttggcccctgttagctccattccctctgtgttctgctgagcttgatggctgttgtcttcccctggaactgttagagcatggctgggggcttatccyccaatctggaatcatctgttctgctctgagagagytcgatggcaggtgcctccgtgttgccgaaccctcctacgctgctctctcactccagatcttcgggccagtgatgcagatcctgaagttcaagaccatagaggaggttgttgggagagccaacaattccacgtacgggctggccgcagctgtcttcacaaaggatttggacaaggccaattacctgtcccaggccctccaggcgggcactgtgtggtaagagcctcccagcagcccctcacaacccaacagagattcctcaaagccagggcctactggaatctggtggtcaccatcctggaatttggggagctgggctcagtttctcctgggtcagggtgtgatgtcgatttgagaggtcctgctacctcacctccgaaggatcaagcttctctgtggtgcaaaggccctgcacctgaacttggcaggcagcggagtggtggggctcctccccagctgcctcagggcaggagaccagagcagagggacccatgattgtgacactgatcctaaaagcttagcctctgcttcacacttagcccccactaggatggctatatttttattatttatttatttttagttttattttttcagacagaaaaaaatattctacccaggctgaagtgctgtggggtgcgattatagctcactgcagccttgaactcctgggctcaagcaatcctcccacctctgcctcctgagtagctgggaccacaggtgtgtaccaccacacctggacaattaaaaaacatttttattttttgtagagatgagatctcgccatgttgcccaggctgggctatatgtatatatattttaaagtattggtaaggatgtggagaaatcggaaccctcctatgttgctgatgggaatggaaaatggcacactcattgtggaaaataatttgggagctcctcaaaaagttaaacatgaagcccccatatgacccagcaattccactcctaggtatttatccaagagaaagaaaaacgtgctcccacataaaaacgtgtatatgaatcttcacagcagcattatttgtaacagccaaaaggtgaacacaacccaaatgtccgtctgtagatgaatggatacagaatgtgatctgtccatgcaatgaaatgtggctcagccacagaaaggaatgaagtagctgtatgagtctgttctcacactgctggtaaagacattgcagagaccgggtaatttataaaggaaagaggtttaatggactcacacagttccacgtggctggggaggcctcacaatcatggtgaaaggtgaaaagcatgtctcacgtggtggcagacaagagaagagaacttgtgcagggaaactcccctttataaaaccatcagatcttgtgagacttactcactgtcacaagaatagcatgggaaagacctggccccatgattcaattacctcccacaacacrtgggaattgtgggagctacaattcaagatgagatttgggtggggacamagccaagccatatcagtagccatgcatgcaatagcatggattaatcttgaacataacattgagtgaaagaacccagactgtctgggtgcggtggctcatgcctgtaatcccagcactttgggaagccgaggtgggtaggtcacttgaggtcaagagtttgagaccagcctggccaacatggtgaaaccttatctctactaaaaacacaaaacttarctggctgtggtggcaggtgcctgtagtcccagctactcgggaggctgaggcaggagaatcgcttgaacctgggaggcggagattgcagtgagtggagatcatgccactgcgctccagcctgagcgatagagtgagactccaaaaaaaaaaaaaaagaacccaggcacaaaaggccacatgctgtgtgattccatttacagtattataaatatctagaataggcgaatccatagagatagaaagtatgttagtggttgccaggggctgggggagggaggaatggagagtgcctgcctcctgggcacagggcttctttcagtgtgatagaaatgttctgcaattagacagtggtgatggtcacacaacactgtgaatatgctgtcaaccagtgattgtacactttaaaatggtgaattttaggctgggtgcagtggctcacccctgtaatcccagcactttgggaggccaaggtagacggatcacgagatcaggagatggagaccatcttggccaaygtggtgaaaccccgtctctactaaaaatacaaaaattaggcctgggcctggtggctcacacctgtaaggccgtggtggttcacacctgtaatcccagcactttgggagtccgaagtaggtggaacatgatgtcaggagttcaagaccagcctgaccaacatggtgaaaccctgtttctactaaaaatacacaaattagacgggtgtggtggcatgcacctgtaatcccagctacttgggaggatgaggcaggagaatcgcttgaacccgggaggcagaggttacagtgagttgagatcgtgccattgcactccagcctgggtgacagagcaagactctgtctcaaaaaaaaaaaaaaaaaaaattagccgggcgcagtggtgggcacctgtaatcccagctactcaggaggctgaggcaggagaatcacttgaactttagaggcagaagttgcagtgagccgagatcgcaccactgcactccagcttggcaacagagtgagactctgtctcaaaaaaagaaaagaaaaagggcagggcgctgtggttcacacctgtaatcccagcactttgggaggccaaggcgggcggatcacgaggtcagaagatcaagaccatcctggctaacacagtgaaaccccgtttctactaaaaatacaaaaatttagccgggtgtggtggcgggcacctgtagtcccagctactcgggaggctgaggcaggagaatggcgtgaacctgggaggcggagcttgcggtgagccgagatcgcaccactgcactccagccagggcgacggagcgagactctgtctcaaaaaaaaaaaaaaaaagaaaattaaaaataggccaagcgtggtggctcacacctgtaatcccagcattttgggaggccaaggcaggcatatcacgaagtcaagagtttgagaccagcctgaccaacatggtgaaaccctgtctctactaaaaatagaaaaattagctgggcatggtagcatgcacctgtaatcccagctactcgggaggctggagattcgcttgaacctgggaggcggaggttgcagtaagctgagatctcaccactgcactccagcctgggcaacagagtgaaactccatctcaaaaaataatctcaaaaaataataataataaataaaaataaataaataaatggtaaatttcaaattcaaataaaatttaataatttttttaaattgcaaaaaaaaaaaatgaaagaaaagaaaagaaagccatccaggtgcagtggctcataccagtaatcccagtgctttgggagcctgaggcaggagaattacttgaggccaggagttcgagaccagcctgggcaacatagtgagaccccatctctacaaaaaataaaagataaaaaaattagccaggcatagtggcacatacttgttatcttaactacttgggaggctgaggcaggaggatcactgaagaccaggagttggagaccagcctgggtaacataatcagaccctgtctcttaaaaaaaaatttattgccaggcrtggttgcacgtgctggtagtccagctactcaggaagctgaggcaggagaatctcttgaaccccagatgtggaggttgcaacgagccaagatcatgccatggcaactccagcctgggcaacagagaaagattctatctcaaaaaaaaaaawttttttttaagttaaaaataaaataaagactttggggcaatacagggggtcctgggagtgtaacccataacccccaagagtgatttctgcaatctcgtttcaaattacagggtcaactgctatgatgtgtttggagcccagtcaccctttggtggctacaagatgtcgggragtggccgggagttgggcgagtacgggctgcaggcatacactraagtgaaaactgtgagtgtgggacctgctgggggctcagggcctgttggggcttgagggtctgctggtggctcggagcctgctgggggattggggtctgttgggggctcggggcctgccagaggttcaggacctgccggggactcagggcctgctggaagttcaggacctgctggggatcagggcctgccagggatttagggtctgctgggcgggccaccttttggcctctccctcatgcttgaggccatcagtgtttcctactaatttcccattttaagcctgagaagtgacaagagagggtaaagacccagcctctgctctgtcccatgagaaatactgagggacgtgcccccatcaggcctatgcggtcatttgctgggcttcgttatacgccaaggcctgtaggcctgagaagagggagagacttcagggggcgragcggagaggaaaagcttctagtaagaatcttttcagattttcaccaggcgcggtggcttttcaccgggcacggtggctcacacctgtaatcccagcactttgggaggccaaggtgggtggatcacgaatgaggtcaggagtttgagaccagcctgaccaacatggtgaaaccttgtctctactaaaatacaaaaattagccaggtgtggtggcgtgcgcctgtaatcccagctactcaggaggctgaggcaggagaatcgcttgaacacgggaggcggaggttgcagtgagtcgagattgtgccattgcactccagcctgggcaacagagcgagactccgtctcaaaaaaaaaaaaaaaagaaaagaaaaaagaattagctattaggttggaatggagcaattcccacagtaataaaaatatttaaaaataaataatacaaacataagctattaggcatgagatatcaaggcccataaccatatgcatctcctttgatttgcaacttcaatgactggaatatagcctgaaggacccatcagaaatacaaagaaagcgttccttccataaatattcatcactgctttatctctaagaggggaaaatcagatgtaaacttaatgcccaataaattatggaacaccccaatcaaggagtaacaggtatctgttacaaatgtttttgtagaatatttgatatgaaaaatgcttagcctttaaagtaaaagcagtatacaaactaatatatcatcaatataagcccaatttttggaatttatgtacatagatagatactcagatacatttacttataaatataaaaaaagaaaggaaaaactggagcgtggtgttgcatgcctgtagtcccagctactcgggaggccaaggtgggaggatcgcttgagccacaagtttgaagctagcctggaaaatgggttgagcaggcctttccaggattggaatcaccaggctggagtgtactggtgccatcacagctcactgcagcctccacctcctgggctgaagtgatcctcgcatctcagtctcccgagtagctgggactacaggtgcacatcaccattcctgactaatttttgtatttcttgtagagatggggtctcactatgttacccaggctggtctcaatctcctgggctcaagtgattctcctgccttggtcccaaagtgctgggattataggcatgagctaccacacccagcctggctctcagttttgtaagtcgaaaaacttggacaggccaaattgaagagtcatgttcgccaatttcataagcgattaatttggcaatgtagcaagataccatcttattaaaaacaaaatggccgggcgcggtggctcacgcgtataatcccagcacttctggaggctgaggtgggtggatcacaaggtcaagagatcgagaccatcctggccaagatagtgaaaccctgtctctactaaaaatacaaaaattagctgggcgtggcggcacatgcctgtagtcccagctacttgggaggctgaggcaggagaattgcttgaacccgggaggtggaggttgcagtgagccaagattgcaccactgcactccagcctggcgacagagtgagactcaaaaaaaaaaaaaacaggccgggcgcagtggctcacacctgtaatcctagcacttttggaggttgaggtgggcagaccacgaggtcaggagatcgagaccatcctggctaacatggtgaaacctcgtctctactaaaaatacaaaaacaaaattagctaggtgtggtggcaggtgcctgtagtcccagctactcaggaggctgaggcggaagaatggcgtgaacccagtgggtggagcttgcagtgagccaagatcgcaccactgcactccagcctgggcgacagagcgagactccgtctcaggaaaaaaaaaaaaagaaaaaacaaacaaacagggaaatatacactgaagtgaaaatgatttactgtgaatactaattatagtttaaccagaaaacataaacacaagtgatgtttaaggaagaggcaaatgggttgagctagcctttccaggattggaaaagaggaggctcagggcaagcctgccagctgtggagcaggtgagaaaaggcaaacgggactcattcagggccacagtgccaagcctgagactggagaggccgaggacacaacctgtgttcctgaatagctcactggaatcaactaaacgtgtttacttgtttagtgtggaaactttccaatctatgcaaagaataggtataatggtagaatgaggccaggagtggtggctcatgcctgtaatcccagcattttgggaggccgagatgggcagatcacttgaggtcaggagttcgagaccagcctggtcaacatggtgaaaccccatctctactaaaaatgcaaaaattggccaggctggtggcatgtgtctgtggtcccagctgcttgggaggctgagacaagagttgcctgaacccgggaggtggaggttgcagtgagctgagatcgcgccactgtactccagcctgggcaacagagcaagactctgtctcaaaaaacaaacaaacagaccgggcatggtggctcacgcctgtaatcccagcactttgggaggccgaggtgggcgaatcacaaggtcagaagatccagaccatcctggctacggtgaaaccccatctctactaaaaatacaaaaaattagccaggcgtggtggcgagtgcctgtaatcccagctacttgggaggctgaggcaggagaatggtgtgaactcgggaggcggagcttgcagtgagccgagatggtgccactgcactccagcgtgggagacagagcgagactctgtctcaaaaacaaaacaaaacaaaacggaaaaaaaaaaacagtagaatgagcctctgtatccccaccataaagctatgacaaagatcagctcacagccagtcttgtttactgtataccccacccacttcccagtgggtacacttcatccactgcccgagcagagtccacaacagcaggaggtggccatgtgggtggacagcctgtgctgggctttgagttatgacatcggataaaaggtccaacttcagttggtgagtcttaaatcttggcacatgactagtgttaaggaggcgatgtccaggatggccacgtgacagggtggtatctaagctgatatacctgaaggatgagtggaagtagagatggtgaggggaggaagagaagaacgtactaaacaaagagcatagcttctggaaaagctgtgatggcgagaaatatggctcttccaggaactgcaggaaggttgctggtggtggaagatgtagtggttagtggggagagagcaaggccagaatgcacaggcccttgttggccatgatgtggggtttgatgtctttgataatggagtttgatctcagctatgggagcattttaagtagaagaattaggtggctcaatttttttttttttttttctgagccagagtcttgctctgttgctcaggctggagtgcagtgctgtgatcttggctcactgcaacctccgcctcccgggctcaagcgattctcatgcctcagccacttgactagctgggattacaggcgcctgccaccacacctggctaattttttgtatttgtagagatgaggtttcaccctgttggccaggctgatctcgaactcctggcctcaagtaatctgcctgcctcggcctcccaaagttctgggattacaggtgtgaaccactgtgcctggcccactcaatttgtatttttaaaagattgctctgcttaatctatagagacagaaacttattactggtcatctagggcatggggaatgggtagtggctgctcatgggtgcaagattgcttttggagatgatgcagatgttctaaaactggagtatggtgatgattgcacaacttaaaatattctaaaagcaattacacttgattgtgcataaatcatatctcaagaaagttgtttaaaaatttaagaaagcggccaggcgcggtggctcacgcctgtaatcccagcactttgggacactgaggcaggtgaatcacctgaggtcaggagttcgagaccagcctgaccaacaaggtgaaatcccttctctactaaaaacacaaaaattagcaaggcttggttgcaggtgcctgtagtcccacctactcgggaggctgagacaggagaattgcttgaacctgggaggcagaggttgcagtgagccgagattgcgccactgcactccagcctgggcaacagagtaagactccgtctcaaaaaaaaaaatttaagaaacctcactctgcttgccctagggagaatggaccatccagtatgaggagggatgagggagctgtcaggagactgctccaaggagaaagatggtggtttggattggagtggtgcagtgcaggtggagaaaagagggtatatgtgacaggaagccaggagtaggattggcgactctggatatagagaggaaaagcaaaactaggaatcaaagatggcacccaggtttccaaggaggggttgagtggtgacgccagtcctgtgatagggaacactgaatgaagtactgtggttctctttagggttgtgtttggggtacctgtccaaacccaagaggtgatgtggagaacacatctagggagatgggcttggagctccaggggcaagacccagatttgaaatagaaattctgacatcattggcctataactsttcatcaaaatcatagttacaggccacgtgccatggctcacgcctgtaatcttagcactttgggaggcccagacaggcggaacgcttgagcccaggagttcaagacaagcctgggcaacatagtgacaccccatctctaataaaaatacaaaaagttagctgggtgttatggtgcatgcctgtagtcccagctacttgggaggctgaggtgggaggatcgcttgagccaggaggtcaaggcagtagtgagctgtaattgcacccctgtactccagtctggggagaaaaaaagaaaagccctttctgctcacacttagtcagctcctagctgaggggacctacagatcacagggaagcaggaagatctaacggcttctctgtcccccttacaggtcacagtcaaagtgcctcagaagaactcataagaatcatgcaagcttcctccctcagccattgatggaaagttcagcaagatcagcaacaaaaccaagaaaaatgatccttgcgtgctgaatatctgaaaagagaaatttttcctacaaaatctcttgggtcaagaaagttctagaatttgaatygataaacatggtgggttggctgagggtaagagtatatgaggaaccttttaaacgacaacaatactgctagctttcaggatgatttttaaaaaatagattcaaatgtgttatcctctctctgaaacgcttcctataactcgagtttataggggaagaaaaagctattgtttacaattatatcaccattaaggcaactgctacaccctgctttgtattctgggctaagattcattaaaaactagctgctcttaacttactgggtaactctttgtccatctcaataaccaaaggaaggtgggcatggtggctcacgcctgtaatcccagcactttgggaagccgaggcgggtggatcactcgaggtcaggagtttgagaccagcctggccaacgtagtgaaaccctgtctctcactaaaaatacacaaattaggcagtcatggtggctggcacctgtaatcccagctacttgggaggctgaggcaggaaaattggttgaacctgggaggtggaggttgcagtgagtggagatcatgccactgcactccagcctgggagtcagagcgagactccatctcaaaaaaagtaaataaatgaaatagcctaaggaaatgctggcaggcagtaatgatatggcacactggatatgatttctgcccctcctctgctgtgggtaaacagcttctgtttcatgcatttacttttttattttaattacaccaataagaatgtgcttgaatgtttcatgcatttaatttgtttcatgcatttaacttctggcctgtttacctgtagcaggctctgagatgtgctctagagacagaacctaaacatgatgcccaagagaggggagagatactgaatgtccaatgttctcaaattttttttttttttttttttgagacagggtcttgctctgccatccaggctggagtgcagtggcacgatcatagctcactgctgcctcgacctcctgggctcaaatgatcctcctgcttcagcttcctgggctaatgtttgtattttttgtggagatgggactttgttatgttgcccaggctgttttcaaactcctggactcaagtgatcctcccgccttagcctcctaaggtgctgggattacaggtgtgagccactgtgcccaattcagttctcagtaaaaacttgatcaggccaaatgaaagtgacatgggccaatttcataatagattgatttggaaaccagatgtcaatttacttactttaagtgagatctgtatcttcagtaaccagacctcttgagtctcccacccagaacactatcttcctctagtcaagatacctggcaaaggccgggcacagtggctcacgcctataattccagcactttgggaggccaaggtgggtgggtcacctgaggttgggagttcgagaccagcctgaccaacagggagaaaccccatctctactgaaaatacaaaaaaaaaaaaaaaaactagccgggcatggtggctcatgcctgtaatcccagctactcaggaggctgaggcaggagaattgcttgaacctgggaggcagaggttgcagtgagccaagattgctccattgtactccagcctgggcaacaagagagaaactccgtctcaaaatataaataaataagaaaaagaagaaatggaagctgggttcaagagggcaatcagcagtctctaccatcatgtgaaacaccactctgtgatttgagtcttgacaatgtattttctttttttttttcttcttttttttttgagactgagtctcggtctgtcgcccaggctggagtgcagtgacgtgatcttggctcactgcaacctctgcctcctgggttggagcaattctcctgcctcagcctcctgagtagctgggattacaggtgtgcgccaccatgcctggctaatttttgtatttttagtagagacggggttttgccatgttggccaggctggtgttgaaggcctgacctcaggtaatccacccacctctgcctcccagagtactgggattacaagtgtgagccaccgtgcccggccaactgtagggaccagccccacagggtcggtgggtttttctccccatgtgcggagacgagagattgtagaaataaagacacaagacaaagaggtaaaagaaaagacagctgggcttgggggaccactaccaccaagaggcggagaccggtagaggccccgaatgtctggctgcactgttatttattggatacaaagcaaaaggggcagggtaaagagtgtgagtcatctccaatgacaggtaaggtcacgtgggtcacgtgtccactggacagggggcccttccctgcctggcagccaaggcagagatagacagggagagagagagacagcttacgccattatttctgcgtatcagagacttttagtactttcactaattttgctactgttatctaaaaggcagagccaggtgtacaggatggaacatgaaggcagactaggagcgtgaccactgaagcacagcaccacagggagacggttaggcctccggataactaatgattaatgatattcatatataatcatgtctgtgatctagatctagtataactcttgttgttttatatattttattatactgraacagctcgtgccctcggtctcttgcctcagcacctggatggcttgccgcccacagccaacaatgtgttttcaatatgctccccaaactacagcaaactcctcttaactcgggatttagggtgatgccctacttatgcctaactttatcaccagcttaaccctcatctcattatataggatgatattacttctaggaagattttctatgtatggagggtgcatcatttaagagtattttaggccaggcactgtggctcatgcctgtaatcccagcattttgggaagctgaggtgggtgatttgcttcagcccacgagttcaagatcagcctggccaatatggtgaaaccccatctctacaaaaaaatacaaaaattagctgagcgtggtgatgtgtgcctgtggtcccagttactctggaggctgatgtgggaggatcacttgagcccaggaggtcaaggctgcagtgagctgtgattgcaccacttcactccagcccagagtgagaccccatctctgaaaaaaacacaaaaaacaagaaaagaatactgcaaagaaccttggtaggggtgaattggaaaaagtagagaaatgtaatatttctttcctgctgtactcactgtaactgtgagaggatcggctcttttaaccaacagataagaaaggaaatattagctatgaagaaatgtctatcaagttgattttgacaacctagacacattaatctccttgcacttttagtgacaggaacccattagaaccttaagcagctgtctgaagtaaaaacaaagctctcaggtgatgaaccacctaatctccctgggtattcggatgtgggtcagtcacaggagtattaggtgtaaagccgctgcttctgggtagagcctccacttgtggctgcacagagggcacagagagcttttccttcagcccggagaagcttcctaagtgtgggcgccaccttgtgggacatacattgaactacgacgctatttctccaagaattaacaggacagcccctcccaccggtgtccttccaacgatgttgcatacaatttggctgtacatttggcaggcagtgtaatgagggaatcaaagaccaggatcacatactggaaagaattgaaaacagagactcccaacaaaaacttgtacacggacgttcacagcagcactattcacgacagctcagagatggaatcaacccaaatatcagtcaatagatgaatggacagacaaaatgtgacatatccatgcagtggaatattatttagccataaaaaggaaggaagtgctgatgcatgttgcgatgtggatgaaccttgaaaacatgatgctgagtgaaagaagccagacacaaaaggagaaggactgtatgatttcacttataggaaatatccagaacaggcaaatctatatagagagaaggtcgattgctgggggccctgggaagggaccaagggggagtgacttctaatggtggggtgcccttttggggtgatgaaaatgttttggaaccagatacaggtggtggttgtacaacattgtgaatttactaaatgcaaccaaattgctcacttaaaaacaacaaattcaggccaggtgcagtggctcacacccgtaatcccagcactttgggaggccgaggtgggcggatcacatgaggtcaagagttcgagactagcctggccaacatggtgaaatcccatctcggccgggcgcggtggctcacgcctgtaatcccagcactttgggaggctgaggcgggtggatcacgaggtcaggagatcgagaccatcctggctaacacggtgaaaccccgtctctactaaaaatacaaaaaattagccaggcgtggtggtgggcgcctgtagtcccagctgatcgggaggctaaggcaggagaatggtgtgaacccaggaggcggagcttgcagtgagccgagatcgcgccactgcactctatcctgggtgacagagtgagactctgtctccaaaaaaaaaaaaagaaaccccatctctacccaaaatacaaaaattagctgggcatggtggctggcacctgtaatcccagctactcaggaggctgaggcaggagaattggttgaacctgggaggcagaggttgcagtgagctaagatcgcaccactgcactccagcctgggtgacagaacgagactgtctcaaaaaaaaaaaaaaaaaaaagtggccaggtggtgccatggctcatgcctgtaatctcagcattttgggatactgaggcgggtggattacctgaggccaggagttcgagatcagcctggccaacatgatgaaaacccatctctgctaaaaatacaaaaaattggctgggcttggtagcatgtgcccagctacttgggaggctgagacaggagaatcgcttgaacctgggaggcagaggttgcggttagccaagattgtgccactgcactccatgggtgacacagagagactctgtctcaaaaaaaaaaaaaaaaaagtaaatgctatgttatgtgaatttcacctcaactgaaaaaaacagggtcccagagctggtcaggggaacttggacaaaccacacaacttctgagcttccatttcctcacaatctctgcagtcacttccaactctcatttggcttattctgtgaaggataaaacagagctgacatttgttcatttgtattgattttatttacatttttcaaaaggaaatagatgcagatggtatagaaagtttcagtgaaatgtaaatctgatgcccaatcctgtggccccaagaagtattaactgtgcacccactacatgccaggaactgtacttggagccttctcaagagcttcttaacaatattttcattttttatattttttaatgacagggtctaactccgtcgtccaggctggagtgcagtggtgcgatcatagctcactgcagcctctacctcctaggctcaggtgattcttctgcctcagcctcccaaatagctggtactacaagcatgtgccaccacagtcagctaattatttttggagagtcagggtttcactatgtagctcaggctggtcttcagctcctggcttgaagtgatcctcctgccttggcacatagaaggggttacaatatacatatattagagtgagagcatagatgtgatgcctggcgatatggcttacttatgagacagcacctgacctacagccatctatgactcctactgtatcttccatgccaggagtaagggtgaggatacctggcaataataaaaataataacctgagagtctaatggcttattttttgtagagatggggtctcactgtgttgtttaggctggtcttgaacttctgggctcaagtgatcctcccacctcagcctcctgagtagctgggattataggcgtgcactaccatgcatatatatatatatttttttttttttttgagagagagagagagagatggagtcttgctatgttgctcaggctggtctcgaactcctggcctcaagtcatcctgctggcttggcctctcaagtgctaggattacaggcatgagacactgggcacagccctaatagcttatttttaaagctatatcaaaatgtcatgcacctgaacatttgaagt

SEQ ID NO: 94831 - DNA, 38872 bp, Homo sapiens
tagtagagacggggtttcatcatgttggtcagggtggtcttgaactcctgaccttgtgatctggtctctgggctctttctaagaggaaagagcagaagctgcaaggtctgttgaggcctggggtcagaactctcccagtgccacttttctcacatttttgggtgaaggctaactacagggccagcccagatcccactggtggggaaataaacctcatctcctggtgggggaagctatgaagtatctgtggccagccttcatccttcatgcctataattctaccatctatttggtaaaaccaaatgaaattgccacagtttggcaatttttggcctaagcagcagcacttttatatggctcaatctaataattttggctgggcgcagtggctcatgcctataatcccagcactttggaaggccaaggcgggtggatcacctgaagtctggctcaagaccagcctggccaacatagtgaaaccccatctctatgaaaaatacaaaaattagctgggcatgatggcgcatgcctgtaatcccagctactcggggggctgaggcacaagaattgcttgaacccgggaggtggaggttgcagtgagccaagatcgcaccactgcactccagcctgggcgacagagcaagactctgtctgaaaaaaaaatttaatactttggagtttgttttttaattttatagttttttatagacaggggtctcactatgttgcccagggtggtctcaaactcctggcctcaagtgatctttctgccttggcctcccaaagtgccgggattacacgtgtcagccaccctgtgtagcctcaatctaatacttcctgaattcaccctggtctgcactgccgtggtcatctggtctactacactagcttcctagcaggtgcgtatgcccccagaggttttcctgcagttcctttgtctcacagcagccagtaagatctctgccacctttgagtgtgattaccccactcctgctgaagactcccaactcatttacatttttcctaagtggcatgtgaggccctccagatcaggcacctacttaactcacctgctccatttgcttcccagctcataccctctgctccacctccactattgcaggactttcctcagatgctgggctatgtcatagagaagttggttgtcctgtgacttttcctctccagtttctcagatcttgaggacggtattttctcccccactgcactctaaagcagaaacaaaaattcaaagaaactgccaggacttaagggtgaggtgaaaagtgttcacctctaggagtcctgctaacatgggcatgagggaagagagaggcggctaaaaatagagtcctctgatgctgcagaggacactcccctcctccacccagaggcaaatcatctgtggccagtcttgtccccttaagtccttctcccgcaaagagctctggagacctggacaccctgtgtgggaagaggagcctggagggggagtcttgttgctccaccaagttgcccccaaacaacttgtgagcagaagcatcccccgccctttgtgagtaaagtcctcgttccgcctctgctcttccatcactgggctgcgagtcccgggctctcaacggaactctttcctcttcactcagtccttcccttccatctcatttttcctaatccttcctgttcccaaggtaacaatcacttcttcgggaagggtttttttttttttttttttttgagtctgagtctcgctgtcgcccaggctagagtgtagcagcatgatctcgactcactgcaacctccgcctcctgggttcaaacgattctcctgcctcagcctcccgagtagctgggattacaggcgcctgccaccatacccggctaatttatgtatttttagtagagacgggggtttcaccatgttggccaggctggtctcgaactcctgacctcaggtgatccgcccccaccttggcctctcaaggtgctaggattacaggtgtgagctaccatgccaggcatgttccttcatcacaatctcccatagtgccctgtacttcctgaatcagcattatcttaggcaacctctgaaggtctacatagattctctcattcactccttacaacaaaggtgttgattcctattttacagataaagaagcaggcacagagaggtctagtaatttggcccagtctggctccagggcccacactcttaaccacaagggtgtatttgcctcatgctgcttttgggactcttggttaaacatatgtcctcacttctatttgaagtccagtaagggtagtgagtatatctaacttaatcaccactgaattcctagctggcagcaggggggtactgcagagaaagctgccctgttaacgtgtgttaagaaccaggtgtggtggctcacacctataatcccagtgcttttgggaggccaaggcaggaggatcacttgaggccaggagtttgaagttacagtaagctatgatcacatcattgtactccagcctgggtgacagggcaaggccctgtctctgtaacaacaacaacaaaaaaaaaacagaagtgggcctggctcagtggctcacacctgtaatcccagcactttgggaggccaaggtgggagaatggcttgagcctgggaatttgaggctgcagtgagctgtttgtgccactgcactccagcttgagtgacagagcaagaccctgtctcccccaacaacaacaacaaaatcctcacaccctcctttttaatggtacaaataaatttattactacttgtattttttaagttggatttttttcattacatggctttgtctattacctatagtttacatagagtacaacgcaaagatagtaggtataaaatttcatgagttttgataattgtatacacgtataatcactgcttcaatcaagatatagagcatttttggctggtgtggtggctcatgcctgtaatcccagcactttgggaggccgaggcaggcggatcacttgaggtcaggagtttgagaccaatgtggccaatgtggtgaaaccctgtgtctactaaaaatgcaaaaaattagccaggcctggtagcgggcgcctatagtcccagctactcaggaggctgagacaggagaatcgcttgaacttgggaggtggaggctgcaatgagctgagattgcgccactgcactccagccttggaaatagagcaagactccgtctcaaaaaaaaaaaaaaaaaaaaagatacagagcattttcatcatccctgaagttcccttgtaccccttcccagtcaatcctactcactctatctcatccccaggcaaccactgttctgatttctatctctatagattagatatacctgttttgggcttatatgaatggaatcatgcaatatgtactctttttgcacctgggttctttcatgcaatataatgtctatgagatgtcaaatctctccacttgatcttggccaagagagcgagacgcgatgagatgtcaaatctctcatccatgttattgcatgtatttcattcctttttattattattttttgagacagagtcttgctctgtcacccaggctggagtgcagtggggcaatcttggctcccgcaacctccgcctaccgagttcaagcgattctcctgcctcagcctctcccgagtagctgggattacaggcgcaccccaccacacctggctaattttttttttttttttttttgagaccgggtctccctctgttgcccaggctggagtgcagtggcgcgatctcagctcactgcaagctctgcctcctgggttcacaccattctcctgcctcagcctcccgagtagctgggacgataggcacccgccaccacgcccagctaattttgtttttgtatttttagtagagacagggtttcactgtgttagccaggctggtctcgatctcctgacctcaggtgatccacctgccttggcctcccaaagtgctgggattataggcatgagccacygcgcccggccctaatttttgtatttttagtagaggtgaggtttcgccatgttggccaggctggtctcgaactcctgacctcaggtgatccaccagccttggcctcccaaagtgctagggttataggcgtgagccaccgcccccggccctttttttgatttttaatcaacattattgaaaggtataatttatataccatgatattttaaatgcacaagttctcacacaaaaattagccaggggtggtggcgaagtgctatattcccagctgctggggagctgaggtgcgaggatcacttgagtctgggagatcaaggctgcagtgagctgtgaacgtgccactgcattccagcctaggtgacagagcaagaccctgtcacaaaaaacaaacaaaaacagttattcttccttgggaactgcttataaaaaagaaaaagcaggtcagcactgtggctcacacctgtaatcccagcactttgggcggcccaggcaggcagatccttgagctcaggagttcaaggccagcctagccaacgtggtgaaactccatctctactaaaaatacaaacattatctgggcgtggtggcgtgtgcctgtaatcccagctacttgggaggctgaggcaggagaaccgcttgaatccaggaagcagaggttgcagtgagccaagacccggccactgcactccagcctgggtgatatctgtaaataatggttccatgagtttagaaatacaaagtagcatgacttaacaaatttacacatctatgtaaccaggtcccaatcaagatacagaataattctatcacccaggaagttctcttgtgtctggaccaaacatccttctccacaggtaagctctgttagtttttatcagcatagattttatttgtcctattcttgaatctcatataaatagattatacattatgtatttggtggtccttcaacataatggccaggtgtggtggctcatgcctgtaatcccaacactttgagaggccaaggcaggaggatctctggagttagcaggagatcaaaagcagcctgagcaatataatgaagacttccgtctctgcaaaaagtttaaaaactagccaggagtggtggtgcgggcctgtgggcccagctacctgggaggctgaggtgggaggtcaagggtgcagtgagccgagatcacaccactgcattccagcctgggcgacacaatgagaccctgactcaaaaaagaaacgaaaaaacgcattgtgtgttgtgtttattggatggtggaattatggggtttacgggtcttctgttgcgttttggtttttgttttcttacctgttatcgcgttcctaacagtagaaattggcatcatatagtattctcatggaactttcctttgttcaaagccctacagttcagagacttacacatttaatgtgagatatgacaggcttaaaaagaaacgttgggggccgggcgcggtggctcacgcctgtaatcccaacactttgggaggctgaggcgggaggatcacaaggtcagcagttcgagatcagcctggccaacatggtgaaaccccatctctactaaaaatacaaaaattagccgggcgtggtggcgggcacctgtaatcccagctactcgggaggctgaggtagaatagcttgaacacggaggcggaggttgcagtgagtcgagatcccgccacggcactccagcctgggacagagcgagactccgtctcgaaaaaaaataataaaataaataataaaataaataaaataaaataaacgttggcttatttcagtgtgaagtaaggcaataaacggagggctaacagttccacttcgtagagctcagacattttaagaagcgaggaggccgcgtcctggaagggtgagcaaaaagcgcgaggtttgcgcacgaagggaaaggcgaggcccgaggagagacctggcgccgcgcagaatgatgatgtcgcacgctgggtgggaactgacgtcacctgtgctcaccgccgcttccggtccgcgtgaggtgcattctcgcgccggtggcgaggttagggcccgcgttgcgacgtggtgcagcgcatattttcacaagtgggtctcccttgtccgggactatggccaccgactcgtgggccctggcggtggacgagcaggaagcggctgtcaagtcggtcagtagctcagctcctggcgaggaggacgtagcaggggcccaagcgaaacctcccaaaagcacagggagctccccgggttggggaggcccctgggcaacgcgctcctgcagtttgctagggcagtcacttgcccttgatttgctcttagagctaaagagaccaatgtcgagctttttatctccatctgggctggttaaggacttcatcctttggtaaatccgccccactatgcatgctgtcattcctctattgacctcctcggtgacgattataaggaaagccaagtttagattctgattctctttttcattacgcgactgttcttcgcatgtttctgtactactctgtatttaacatttcttagatccatgcttaacgtggttggtagtttgtagctctttgcagaataacagattgacttttggatttaatacctcaatctactgcagatgttggaaggaggcactacaaattgtttcattgatgtgtaaagtaacggtttcatgtacttgttctttcagtaatgaatattcattcaactggaatgtaattacagcatacactgtggctttctgttcttatatctaagacctaaactttaggtttgtttagtgataatggactgtctttttttttgttgtagttgtttctcttttgaggcagagttttgctcttgttgcccaggctggagtgcaatggcgccatctcggctcaccgcaacctccgcctcccgggttcaagcgattctcctgcctcagtctcccgagtagctgggattacaggcatgcgccaccacgcccggctaattttgtattttttgtagagacggggtttctccatgttggtcaggctggtctcgaactcccgacctcaagtgatccgcccacctcggcctcccaaagtgctgggattacagccgtgagtcaccgcgcccagccggtatggggatttttgagagggctattgacagaattagacaaggctggcaaggatttattgaactacagagaacagaatatgttagaagtgatggctaatagaaatatcagtgtagaagttattctgatagccccgagatagagggcctatgttgggcagtggaagtgaaaattaagggatgggtataagatatgaaggtagaatgggtaggacttgctaacataataaaggagagaagggagataaagccaaaggtttctgttttcaacctggatcctattggtactactaacgtcccaataacaggaataggaaagtgggaggaagggcagatttgatagaatggtgaaggcagccgggcatgatggcacccacctgtgatcccagcactttgggaggccgaggcgggcagatcactcgaggtcaagagtttgataccagcctggccaacatagtgaaaccctgtctctactaaaaatacaaaagttagccaggcgtggtagtcgtcccctgttaataccagctactcaggaggctgaggcatsagaattgcttgaacctgggaggtggaggttgcagtgagccaaaattacgccactgcactccagcctgggctactgagtgagactctgtctcaaaaaaaaaaaaaaaaaaaaaaagaatggtgaaggctgggcacagtggctcacacctgtaatcctagcactttgggaaactgagacaggcagatcagttgaacccaggagttcaagaccagtgtgggcaacatggcgaaaccccatttctacaaaaatacaaaaaaaattagctgggcggggtggtggtacactcctgtagtcccagttactcaggatgctgaggtgggaggatcacctgagcctagggaggttgaggctgcagtgagctgtgatcacaccactgcactccagcatgggtgacggtgagaccctgtttcaaaaaaagaaaaaagggaatggtgagttcaggtttggctgttctgaatttaaaataaggaaacatcttggtaagtacctgttgtgggagtccccaagagatgccaggtttgacgatttgttaggagaactcacaggctcagtatgtagttgtactcacaactatgatttattatagtgaaaagatacaaagcaaaattagtggaggaaaaaggctcatgggctaagtccagaggaaaccaggcaaacttccaagttatctcccaatggagtccacagagtgtgcttcattcttccggtagcaaattgtaacagcacatatgaagtggtgtcagggaagcttgttagagactctacttgaggcttttattggggggctgtcatatagtcaccmtgtgcctagcatgtaccagaattccagacttccagaaggaatgcaggtggttagcataaattacatgcaactgtttttaaaaagagttgaggcagactgaccccctcttatcagttctaggaatgatgggaaccttcccaaagtccaagttcgcaggtgacagccaagggccagccttgcaaataggctttcctaaggagagcggtcaggcctgctgtgttctcttctgcccggtagccatcagacatttggaaatacagcactggagttcaggagaaggagcaggtcagaggtataaaactggcagtttccacaaagaaattacaaagcattatcaagggcatggtccttgcactctggagtttaaaatctagcgtttagcatcagatcttctctgaaagagttactgagaattggtttcaaaccttgtgaaatctgtgatcctaacctagctgtgacatgaatatcacaaatataggcctaaacatacttggtatctggttctaagcatccagcttatcagaaggctggtataaataaaggcttcctaatagttggagaagaccttttttttcaccatgtagacttgtgtaccttcacttaataaatgattcatggtcttaggttatcatgtggttctgctctctagtgtagagataaccaatgaaagtgacagaaggctgggtgcagtgactcacacctgtaatcccagtgctttgggaggccaaggtgggaggattgcttgagcccaggagttcgagtttgagttcaagtaggcatggtggtccacacctgtgttcccagctactagggaggctgaggtgggaggatcgctagaacccaggaggttgaggccgcagtgagccatgatcgtgctgctgtactccagcctaggtgacagagtgagaccttgtctcagaaaataaataaatagaaagaacttgagttgggagatgagcagaggttgaggttttctgaaactttccccccaaccattatatttagtccacccctccccttgttttaaggctgttgaagatatttgaaatgatggtttcacacagactttcagcaactctactttgagggaacaaaccgactccctgaatactggtgctgaaagtttcacactagacttttactagaaagtttttcttttcttagggaccttccttttattgggtcctttgcttaaytctgttttcttttatttctattcagatgaccaatttgcagatcaaggaagagaaagtcaaagcagataccaatggtgagtcactagtaactacaagctagaaaagagttccatgtgrgccgctgctttgcactcatagctgcattgtacaaagagctgtcatttcgtgtaaacttcagctgtttacaagccagtgaattagattttgttactgaagggatatgtcgattttccacattttatcctttgacttcttaaaattaagagtctctctattggattgtactgctactgttcatttgataatattttggcaaattatttatttatttatttatttatttatttatttatttattttgagacggagtctcgctctgtcgcccaggctggagtgcagtggcacaatcttggctcactgcaagctctgcctcctgggttcataaccattctcctgcctcagcctcccgagtagctgggactacaggcgcttgccaccacgcgctagtttttttttttttgtatttttagtagagatagggtttcgccgtgttagccaggatggtcttgatctcctgtcctcgtgatccacccacctcagcctcccaaagtgctgggattacaggtgtgagccactgtgcccggcctaaattttttattttttatattagatttttaaaattttatttgagacagggtctcactctgtcgtgcaggctagagtggagtggcgtgatcttggctcactgcaacctctgccacccaggctcaagagatcctcccacctcagcctcccaggtagctgagactacaggcatccaccaccacacctggctaattttttatatttttagtagaggcggggctttgtcatattgcccaggctggtcttgacctcctgagctcaagcgatctgcctgcctcagcctcccacagtgctgggattacaggcatgagtcactgcacttggcctaattttattatttatttatttatttttatttttttttgagacagtctcactctgccacgcaggccggagtgcagtggtgtgatctcggcttactgcaagctccgcctcccaggttcacgccattcttgtgcctcagcctcccaagtagctgggactacaggcgcccgccaccatgcccagctaattttttttttgtatttttagtagagatagggtttcaccgtgttagccaggatggtctcgatgtcctgacctcgtgatccaccccgcttggcctcccaaagtgctgggattacaggtgtgagccaccacgcccggccaattttattttatttttttaaataaaatccagatcctgcatgaggtaaattttttaactttttgaaaagtgaatctgggttcaaaactcagaaagtataataaagtacaaggattagggcccaccctagtgacctcatcttaactacagctgtagcaaccctatttcaaaataaggtcacattctgaggtactggttaggacttgaatatatgagtttgaggtcagcgggccacacacaattcagctcataacaccatcctatcccataagtagccactgttcatggatttttaatattcttccaaagactttatgcaaagcaaatataagtgtagattctcatattctctctctcaaccaaaacgtggcgtgatatatacagtatacttactttttcactcaacagtatcccttggcaaactttccatatcaatacatgcagtttcatccatgtctttttttttttttttttttgaggcagagtctttctctgtcacccaggctggagtgcagtggtgcaatcttggctcactccaacctccgcctcccgggttcaagcgattctcctgcctcggcttcctgaatagctgggattacaggtgtccgccatcatgcccagctaatttttgtatttttagtggagacggggtttcaccatgttggccaggttggtcttgaactcctgacctgatgatctgcccgcctcggcctcccaaagtgctgggattacaggcgtgagccactgtgcctggcccttccttgtgttttataattatgtgatactgcattgtgtcgatctaccacgatttttttttttttttttttttgagatgaagtttcactcgttgcccaggctggagtgcaatgatgtgatctcggctcaccgcaacctccacctccggggttcaagcgattctcctgcttcagccttccaagtagctgggattataggcatgtgccaccacgcctggctaattttgtgtttttttagtagagatggggtttctccatcttggtcaggctggtctcgaactcctgacctcaggtgatccgcccacctcagcctcccaaagtgctgggattacaggcttgagccaccgcatctggctgatataccatgatttttaaagcaatcatagatgtttgggtggtcccattcttttgctattataaataatgcttcatgaaataaccatgaacttagctctttttacatgtatgcaagtgtctgtaggataaattccccaaaaatggatttgctaggtcaaaggtatatgcatttgcgattttttctttctttctttttttttttctttgagatggattctctgttgcccaggctggagtacagtgggggctcactgccacctctgcctgccaggttcaagcaattcttctgtctctgcatcccgagtagctgggattacaggtgcctgccttgcatgcccagctaattttttgtatttagtagagacagggtttcaccgtattacccagactgctcttgaacttctgagctcaggcaatccgctcgcttggcctcgcaaagtgctaggattacaggcacgagccaccacgcctggcctttttttaaaattttttttaagacgtgatcttgtaggttggacacagtggctcatgcctgtaatcccagcactttgggaggccgaggcgggcagatcatgaggtcagccctatcagattggcaaattctaaaagtttgactattaattctgtgatgagattgtagggaaacactctcattcttgctgatggaaatattaattggtggccgggcacagcggctcatgcttgtaattccagcactttgggaggctgaggcgggtggatcacctgaggtcgggagtttgagaccagcctggccaatatggtgaaaccctgtctctactaaaaatacaaaaattgcccgggcatggtggtgcatgcctgtagtcccagctactcgggaggctgaggcagaggaatcacttgaacctggggggcaaaggttgcagtgagccgagatcgtgccactgcacttcatcctgggcaacagagtgagactctgtctcaaaaaaaaaaaaaaaaaacacaggctcttgctctgtcacccaggctgcagtgcagtggctcaaactcctgggctcaagctgttctcctgcctcagcctcctgaatagctgggattataggctaattttttaaatttttagtagagactaggtcttgctatgttgcccaggctgacatttgcaatttttgtcagtattttcaaagtcttttccttaggtattataccaattaatatttctggggtttttttttttctttttttgagacggagctttgctcttgttgcccaggctrgagtgcaatggcgtaatctcagctcactgcaacctccgcctcccaggttcaagcgattctcctgcctcagccttcccgartagctgggattacaggcatgcgccaccacacccagctaattttgtattttttagtagagacaggttttctccatgttggtcaggctggtctcaaactcccgacctcaggtgatccacccgcctcagcctcccaaagtgctggaattacaggcatgagccgctgtgcccagccaccaattaatatttccatcagcaagaatgagagtgtttccctacaatctcatcacagaattaatagtcaaacttttagaatttgccaatctgataggtaaaaaatggtagactatgtttgctaataaggctgtattttaaagtagggctagtaagaggtaacatattctgatctgtctgaaattagtcaaaatttctagaaatttaaaatttttcaccaggtatagtagttcatgccagtaatcctagtgctttgggaggccaaggcaggaggattacttgaggccaggaatttgagaacaggctgggcaacatggcaagactccatctctacgaaaatatttttgttttaaattagctgggaatagtggtgcatgcctgtagtgctagctactcaggaggttaaggcaggaggatgtggtggcatgcacctgtagtcccagctaagtgggagcctggggtgggaggatcacttcagctcaggaggttgaggttgtagtgagctatgattgcaccactgcaccttagcctgggcaacagagggagaccctgtctcaaaaaaaaaaaaatttctagaaataaaaattcactaaacataaagaaatgccaactatttatattttgattacttaaaataacttttcaggctggacgctgtggctcacgcctgtaatcccagcactttgggaggccaaggtgggcggatcacttgatcgaggtcaggagttcaagaccatcctggccaacgtggtgaaaccccgtctctactaaaattacataaattagccaggcatggtggtgcgtgcctaatcccagctactcaggcggctgaggcgggagaattgcttgaacccaggaggtggaggttgcagtgagccaaggttgcgccattgcactccagccttgggctacaagaggaaaactccgtctgaaaaataaaaaaataaaataaatttcagtgtatttatttatattgtcccacatttttggtggttctcatatttgcctttctaattatgacaattgttttcttgtgtaggtattatcaaaaccagtaccactgccgagaaaacagatgaagaggagaaaggtaactacttttggatgcccttggcaagagacggtatgacccagggcttgccttcctggagccaggggcactccaagctacaagatccaggagatgagaggaatcagagaaggaatagtcagtgagaggaggagaacaaaacaagtccgaaagcggtagctcacacctgtaatcccagcactttgggaggccgaggtgggaggattcctttgggccaggagttcaagaccagcctgggcaacatactgagaccccatctctacaaaagatttcaaaatgagctgggtgtggtagcacacacctgtactcccagctacttgggaggctgaggtgggacgattgccagagcccaggaattctagactacagtgagctctgattgctccactgcactccagcctgggtgacagcaagaccccatctctaaaataaataaatagagacctatcagtgtgatggtttttctccagccgtgcttgactgcccaggtgctagtgtggagagggagaaagagtggcttcataagcctggggtttgccagatgagtatgaagatctactggtttcttcctgacagaggacagagctgcccagtccttactcaacaagctgatcagaagcaaccttgttgataacacaaaccaagtggaagtcctgcaacgggatccaaactcccctctgtactcggtgaagtcgtttgaagagcttcggctgtgagtattcgctcctttcaacagctcttcgttgccagtctctccccacataaaacttagcatctgagagattcttgtgagaattttacttttaaaaatttagtgtattttttccttttttttttcgagacagagtttcgctcctgttgcccagcctggagtgcaatggcgtgatctcagctcactgcagcctctgcctcccgggttcaagcgattctcctgcctcagcctcccaagtagctgggattacaggcgcccaccaccatgtcaagctaattttttgtatttttagtagagacggggtttcaccatgttggccaggctggtcttgaactcctgacctcaggtgatctgcctgcctcggcctctcaaggtgctgggattacaggcgtgagccaccgtgcctggctattttttttctttgaaaagaagtcacatgaataagtcacatgattcaaaagtcaaaaagtatgaaaaaatttgcagtattaatctcccacccttgtgtccttggctatcctgttctcttggtaggaattttttaatgcttcaaattgatttatcatagctaaaagtcttatttctcttatactcttagaactttcaataaaatattggctgacaggtgatttctggatgtcaggaacatttctgattaggtaagcccttaagtgagaacatgtgctatttgttttttttttacaaaaaaaaaaaaaaaaggccaggcacagtggctcacacctgtaatcccagcactttgggaggccaaggcaggcagatcacaaggtcaggagttcaagaccagcctgaccaacatggtgaaaccctgtctccactaaaaatacaaaactcaaaacttagccaggtgtgatatcacaggcctgtaatctcagctactcaggaggcggaggctgaggcaggagatcacttgaacctgtgaggcggaggttgcagtaagccaagttcgtgccactgcactccagcctgggcaacagagcgagactctctctcaaaaaaaaaaaaatatatatatatatatatgtatatttagactatagggtttacagtcttacagtttatctgctttttaaaaaatctgtcaaatctgtttttggtttgttttttttttttttttttttttttttttttttttttgagaccaagtcgtgctctgttgcacaggctagagtgcagtggcgtgatctcagctcaccacaacctccacctcccaggtccaagcgattctcctgccttagcctcccgagttagctgggactacaggcgtgtgccacaacacccagctaatttttgtatttttagaagagacagggtttcactatgttgggcaggctggtctcgaattcctgatctcatgatctgcccgcctcggcctcccaaagtgctgagattacaggcatgacccactgtgcccggccttacgttttaggtttacttcagtaaattaatagaggattaagtgtggatcattgtgttatatacatgccactgtgctggatgttacaaggaacacaagacctacttattattcttgctgcctgccaggatcacaatcatagaaagtagctgatgaataagaatatggtggaatcaatggattctttgccttagttcagcaaaatctatagtatggccactatggacaaattgaagccacattccttccagctattaccactgagaaagagacacttaaaacaagaaagctaactagttgttaagtaatcttgaagaacaattttttatttttattttttatttctattcatttatttatttacttttgagactgtctcactctgttgcccaggctggagcgcagtggcacaatcttggctcactgcaacctctacctcccgggttcaagcgattctcgttcctcagcctctcacgtagctgggattacaggcctgagccaccacacctggctaattttggtatttttagtagagacagcgtttcatcatgttggccaggctggtctcaaactcctggcctcaagcgatctgcccgcctcaacctcccaggctgctgggattacaggcatgagccactgcacccagccttatttttttatttttaaaaatagagatgtggtgtcactgtgttggccaggttgctcctgaactcctgtggtcaaagagtcctcctgcctcagcctccaaaattgctaggattacaggtgtgagccactgcacctggcccaataactttttttttttttttttaataggatgaggttttaccatgttgcccaggccagaccaaaaatgtatttttaaacagttatactttaggtcgggcacggtggctcacgcctataatcacagcactttgggaggtcaaggcaggtggattgtctgaggtcaggagttckagaccagactggtcaaaatgatgaaaccccatctctactaaaaatacaaaaaaattagccggctgtaatggcacatggcttgtagtcccggctactcaggaggctgaggtaggagaattgcttgaacccaggaggcggaggttgcagtgagccgagatcatgccgttcgttgcactccagcctgggagataaaagcgaaactccttctcaaacggaaattatgcttttctatgtgttttctctgtcaaggactttattcaccaaatctgtcatctccacttttatttttaarctgtatcaggacagctagacatgtggtatgatttccttagagtgacagtttgctcctccaagtatcaactgcctttttaaatttcttccctttagaagacgtgagctctcagtttaaccactgatgaattgtcctctgtaaaagacaggttctctctgatttagttgttggtaggaaaaggaaacaaagaatgaaaccaagatcacctaatgtacttggtctgctttgtacctaaaatatttgagttaatctgcaaaatcaaagaaaactgagtcagtggaagctgttggatcatttgagtcccaattaaggtagtgactttgtttccttggcaaccaagtcagaagctgccgagtgtcacagcattttctcccaaatggaagatatgaaagattatgtttttaaatttctttgtgtctgagaaccaacatacgccagagaatttgccttttagagagcctgctaaactccaaggaaggcttagagaacagttgggttgccttttctttagaaacaatctggtatgatttttcttaaacatcttgtcaatttagaggtagcagagagctgattgtaaatgcaatgtaagagcaacttaaattgataattcttgtgtagctgtttacataagaagttggtgtccaggtgcggtggctcacgcctgtaatcccagcagtttgggaggctaaggtgagtggatctcttgagctcagaagttcatgaccagcctgggcaacatggtgaaaccttatctctacaaaaaataaaaaaaaattagccgggtgtggtggcatgtgcctgcagccccagctactcaagggtgggaggatctcttgaggcctgggaggtgtcggttgcagtgagcccagttcacacaactgcactccagcctgggcgacagagtgagaacgtctctcagaaagaagtagttagtgtttgtctgtttattttgattagacctaagtgaatctgagcatttgtaaagtttagtaggttaatcgaaccacctttatttactgtatatcagctactagaaactggcttcatcaattttctttttttatggccgggcgctacagctcacgcctgtaatcctagcactttgggaggccgaggcaggtggatcacctgagattaggagttcaagaccagcctggccaacatggcgaaaccctgtttctactaaaaatacaaaaattagccaggtgtggcagtatgcgcctgtaatcctagctcctcagaaggctgaggtaggagactcgcttgaacccaggaggcagaggttgcagtgagccaagatcacgctattgcactctagcttgagcaacagagcaagactccatctcaaaaaaaaaaattttttttttcttttttctttctttctttytttttttttttttttttaagagatgacctggccttgttgcccagcccagagtgcagcggggcaatcatggctcgctatagtctctaactcttagcctcaggcaatcctcctgcctcaatctcccaagtagctaggactacaggtgcatgccaccatgcccagctcatttttcttttttgttttgttttgttttgttttgttttagagacagggtctcactgtgttgcccaggccggtcttgaacgcctggactcctcaagcagtcgtcccacctaggcctcccaaagtgctgggattacaggcgtgagctaccacgcccagcccatcaatttccttacctattgattgtctggagtatttgcatagctggctttggaaggaacatggaacaaaaggacttctaaatcttagcagtatagtaaatagtgtttattttcatttattatttactttagagtcccactctgtcaccctggttggagtgcagtggctcagtcacagatcactgcagccttgacctcctgagctcaagtgagcctcccacctcagcctcttgagtaactgggactacaggtgtgtccagctattttttgtatttttttgtagagacgaggtatcaccatgttgcccaggctgttctcgaacttctggcctcaagcagttggcctgccttgacctcccaaagtgctgagattacaggcatgagtcactgtacctgacctgtttttagatatatcttttataatttatgtaatgctatgaattaataaccaccacccttgctgtgtccagggaacacttgtcttccaaggccagccagatttgcgggtctgctgaaagcattaatttctctaagaaaagaaaccattctgtattttatgaattatagaatagttgcagattaagattccttagggaagggcggtagcttggtttgatttggtttggtttttgacagtgtttttttaaggcataggaaaatacgtctgacagaggtaggaggcatcattcctttctatagaaaaagataagattctaggcctctraaacaattctaacttctaggcatccatcctctgtcttcctggcttcctaggaaaccacagcttctccagggagtctatgccatgggcttcaatcgwcchtccaagatacaagagaaygcattacccatgatgcttgctgaaccgtgagtatgcagatgaagcgcatctcacccagtgtgattagatcaatcttccccaaactgcgtttttgtgcctgagaacagaaggagctgtttggggccacgtgtttcctcaggaatacagcttaggcaagtgcagagagaatcggatggagttagctacagtttctgcctttcccacttaacaatagaaacttatagagaaaggtagtgctttattccatgctatcttaaaaactgggcttaaggccgggcatggtggctcactcctgtaatcctagcaytttgggaggccgaggcgggcggatcacctgaggtcaggagwttgagtccagcctggccaacatggcaaaaccctgtctctactaaaaatacaaaattagctgggcacggtggcccaaacctgtaatcctagcactttgggaggccaaggtgggcggattgcctgagctcagtaattcgagaccagcctgggcaacatggtgaaaccccgtcttactaaaataaaaaaaaaaaaaatatccaggcctgttggcatgtgcctgtagtcccagctactcaggaggctaaggcaggagaattgcttgaacccgggaggcagaggttgcagtgagccgagatggtgccactgtactctagcctggtgacagcaagaccctgtctcaaaaaaaaaaaaaaactaaactaaaaatacaacaattagcctggcatggtggcacgtacctgtggtcatgtagctgaggcaggagaattgcttgaaccccagaggcagaggttgcagtgagccgagacatgccactgcactctagcctgggaaacatagactctgtctcaaaaaaaaaaaaaaaaaaaaaactgggtttaaaaaatattattttgatgtgaatggtgttgcaataaattcaaaaacaaacaaaatattatttggaaatttttgagacctacacaaaggtgtaaagaacaataccaagaacacctctgtagccctatcctgccaagaaaggaagcaggtccagttgatagttgaagcccctgaattcccctccttccacatccttctcccaccctgacaagactaagttccttttgagacagggtctcattctgtttccccatctagagtgcagtggtgcaattacagcccactgcagcctcgacctcctgggcttaattaatcctctcacctcagcctcckgagtagctgggaytayaggcatgtgccaccatgcccagctgactttaaaaaaacttttttgtagtttgagaagctgaggcaggtggatcacttgaggtcaggagtttgagaccagcctggccaacatggtgaaaccccgtctctacaaaaaatacaaaaaaattagccgggcttggtggcgcacacctgtaatcccagctgctagggaggctgaggtgggaggatcgcttgaacccaggaaacagaggttgcaatgagccaagattacaccattgcactccagcctgggcgacagagtaagactctgtctcaaaaaaaaaaaaaaaatttgtagagacagggtatcactatgttgccagggctggtctcaaactcctggcctcaagtgattctccagcctcagcctcccaaagtgttgggattataggcatgtgttactgcacctggcatatttatcattttttcttttttgagatggagtctcctctgtcgcccaggctggagtgcagtggtgcaatcttggctcatttcaacctctgccttccaggttcaagtgattctcctgcctcagcctcctgagtagctaggattacaggcrcacaccaccacacctggctaatttttgtatttttttgtctgtkcgtttgtttttgggatgaagtctcgctctgttgcccaggctggagtgcaatggcgcggtctcagctcaccgcaaccttcgcctcccgggttcaagtgattctcctggctcagcttcccgagtagctgggattacaggtgcctgccaccatgcctggctaatttttgtatttttagtagagatggggttttaccacgttggccaggctggtctcgaactgctgacctcgtgatctgcctggctcagcctcccaaagtgctgggattacaggcgtgagccaccgcacccagcctaatttttgtatttttaatggaggtggggtttcaccatgttggccaggctggtgtcgaactcctgacctcaagtgatctgcccaccttagtttatttatttatttatttatttatttttttgtgagatggagtctcgctctgtcgcccaggctggaatgcagtggcgcaacgtctgctcactgcaagctccgcctcccaggttcatgccattctcctgcctcaaccttcccagtagctgagactacaggtacccgccaccacgcccggctaattttttatatttttagtagagacggggtttcattgtgttagccagggtggtctcgatctcctgatcttgtgatccgcctgcctcggcctcccaaagtgctgggatgacaggcgtaagccatatttatcttttttaatgacaaccatgccacctattcccatgatgctgggtcccataaaatggaatgtaaaagttccctctaaaacatccacctgacttagcatcttgtccataaaactggggaaaggcacacacagaaggaaccaaattctgggaatgcatcatggctcagccaaaaatattgctggggtcttgtctgggcacagatcttactctgcacacttgatttccctgtgccccttggggtgcaaaactggggtcctttagctgtgctagaggctagaatgagaatttcttggtgtgagcccatttaaaataatcatttattttacaatttaagcagctttttaacagcgtataaaaaaatgtatgaaagtaatttgtgctcaatggagaaaacctgggtaatatagagaagcacgaagggggaaatatgcctttcattcagaaagaacattttgacatgttactgagtttcaccaatttaagtttcatttctgttcttccttgatccagcccacagaatctgattgcccagtctcagtctggcactggtaaaacagctgccttygtcttagccatgctcagccgagtggagccatcagacagatacccccaggtgagggcttgcggggctgggtgtcctaggttgcctgccctggggagcgcagtgccatctggtgaggagtaacgagaggtctgaagcttctgacaccttaggctgtggctcaggcagagcaagttcctacaccaggccctgacctgggagaatgtgcttgaaagcagcagccttagaccatggcttgcaaaggcctctgccaagccagggctacctgctgcaggcttcagtctatggctgaaaggtgggcctggatgggaggacatgcttccctgtgctattcaagtgctaataacatcagcatactgggtgccttcaggtctgttaccaaatggctctcctaaactcatcctttatgatttttctgtcagtgtctgtgcctctccccaacatatgagctggcgcttcaaacaggaaaagtgattgarcaratgggcaaattttacccagaactgaagcttgcctatgccgttcgaggcaataaatgtgagtacggcaggcgacaactgaacagtgagcagggtagggggttgggcgtttgaattttgaagatgcgatgaccgtattcaactttctaattcagtctgaccctggagcctaactgtgttgctctatttgaatctatttgaatacctgctaatttgttaacagtctttttcagtcttaaaataagattttcggttgattaaaaaaaaaaatccacgcatggctcacagagttcttaatatctagagttcttcgctcagaaggtagagttttgaatttagcgtccagagttctgggacctgctaccaaagagggattaacaggactgaggatggaaggttggggtcagctccctttctttaaaagtaagcaaaaccaggtacagtggctcacacctgcaatcccagccctttgggaggccagggtgggaggactgcttgagcacatggttcgagaccagcctgggcaacatagtaagacaaaaaataaaaaaaaaaaaatagccaagcgtggaagtgccagcttgtagtcccagctacttgggaggctgaggcaggaggatcgcttgaacctgtgtggtcaaagctgcagtgagccatgactgtgtcaccgcactctagtctgggcaacagagtgagaccctgtctcaaaataaataaataaataaacataaaaagagttggatgatgttggattataggaggaagaagaagggaactgatgcttattgaaggattgctgtgtgggatttgatcctgaccacagtgcactgagataggtgtcattctgcccacttcacagcagaagagaccaagactgaggggaacactcatgtgtgttttgaaatctggaaataacttgttctcctagtcstagaaggatgggcagggctttgatytccagagctggctttgcctttgaaatacctatgaaaatcacctgggtctccacagtggaaagaggccagawgatcagtgagcagattgtcattggcacccctgggaccgtgctggactggtgctccaagctcaagttcattgatcccaagaaaatcaaggtgtttgttctggatgaggctgatgtcatgatagccactcagggccaccaagatcagagcatccgcatccagaggtagggatctcgagggtgggggactcctcagactccccatctgcagtgtcttctcccttcacttcagacgcctcctctggcttctgcctgggtcttggctctcgtactctcagcagcatttgtttgacgggccatttccatgtcagcgctgatcacagtccctcccaacctgggttgagaaaggagacctagggactcttccccaacccttgtccccatcccaggcctgctgctcctcctccccaagatgctcctcycccatcagccttcctgggcatctagaccctcccagctgggraggctgtgcttccgttgcttcccagggccacctggggccatctacccgggccttcccttgcaggatgctgcccaggaactgccagatgctgcttttctccgccacctttgaagactctgtgtggaagtttgcccagaaagtggtcccagacccaaatgttatcaaactgaagcgtgaggaagagaccctggataccatcaagcagtactatgtcctgtgcagcagcagagacgagaagttccaggccttgtgtaacctctacggggccatcaccattgctcaagccatgatcttctgccatgtgagtagcagcggcagtggcaggcctggcccctccctctcagccagctccccacagggctcaggaggactggatgcccctgagcgccatggraagaagggaagtgctttttgaagatgtaagagacaggctctcctttagtgggggtaatggtagtatcccaagggatacatagcctaaagatagagcccctgaactttatgtcttatttgtggatgatgtattgttgcacaacccaagagaatcaactcatatttgtaagaaaaataaaaaattcaacaagatggccgggtacggtggctcatgcctgtaatcccagcattttgggaggccgagatgggtggatcacgaggtcaggagatcgagaccatcctgactaacacggtgaaaccccatctctactaaaagtacaaaaaattagcgcggcgtggtggcgggcgcttgtaatcccagctactcgggaggctgaggcaggagaatggtgtgaacccgggaggcagagcttgcagtgagccgagatcacaccacggcactccagcctggcaacagagagagactccgtctcaaaaaaaaaaaaagttcaacaagatagtcataacattcacacacatagttttccagtctcaaacaacaaatacttagaaaatggaagcatagatctcattgataatagaaaaaataaatatttaagatctctgaagaaaatgtcaaaatgattttagaataaaagagacaccggagcacggtggctcatgcctgtaatcccagcactttggcaggccgagacaggcggatcacctgaggtcgggagttggagaccagcctgaccaacatggagaaacctcgtctctactaaaaatacaaaattaactgggtgtggtggtgcatgcctgtaatcccagctactcgggaggctgaggcaacagaatcacttgaagctgggaggcggagattgcagtgagctgagatcgtgcccctgcactccagcctgggtgagagagcgagactccgtctcaaaaaaaaaaaaaaagaggccaggcttagtggctcacgcctgtaatcccaacacctttggaggccaaggtagaaggattgcttcagcccaggagtttgagaccagcctgggcaacgtcgggagaccccatttctaaaacacttaaaaaaaattagctggatgtggtggcacacacctgtagtctcagctactcggaagactgaggtgggaggatcccttgagcccaggagttagaggctgcagtcagctgtgatcacgccactgcacttagcatgggtcataaagcaacactctgtctcaaaacaaggaaacatacaatgcaatgatacagtgataacagtaatatatctctcaaatataatccacgttctcctatctccacttgtgccaaaagtattctttttttttttgagaccgagtctatctagctctgtcacccaggctggagtgcaatggtgtgatctaggctcactgcaacctccgcctcctgggttcaagcaattctcctgccccagcctccagagtagctgggattaccagcgcccgccatcatgcccagctaatttttgtatttttggtacagggggtttcaccatgttgcccaggcttgtcttgaactgctgaccacaggtgatccaactgccatggcctcccaaagtactgggattacaggcatgagccactgcgcctgacgccaaaaaatactctttttttttttttttagacggtctcactatcttgcccaggctggactcaaactcctgggctcaagcaattctcctacctcaacctcccaagtaggtgggactccaggcacatggcactgtgcccagctcatctttattgctttttgttttgttaaatccaagagccagtcaagttttgcttgttgcatttagttgtcatgtctcttaagactcctaaatctagaagaatttcctcacctttattttattgcctctcattacaatgacatcttgaagcatccagggtagtcttttctttttgagatgtagttttgcttttgttgcccaggctggagtgcagtggtgcaatctcggttcaccacaacctctgcctcccgggttctagcaattctcctgcctcagccttcccgggtagctgggattacaggcatgtgccaccacacctggctaattttgtatttttagtagagacagggtttctccatattagtcaggctagtctcaaacttctgacctcaggtgatccgcccgcctcggcctcccaaagtgctgggattacaggcgtgaaccaccgtgcccggccaatctggtttttttttttttttttttttttttgaaacggaatctcgcctcttgcccaggctggagtgcaatggcatgatcttggctcactgcagcctctgcctcccgggttcaagcgattctcctccctcggcttcctgagtagctgagattacatgcacatgccaccacgcccagctaatttttgtatttttagcagagacggggtttcaccatgttggtcaggcttgtgttgaactcctgacctcgcgatcggcccacctcggcctcccgaagtgctgggattacaggcatgagccaccgcgcctggcccccagggtagtcttttactcctaggctcaagtgatccttcacttgatctcccaaattgctgtggttataggcgtgagccaccgtatcttgccccaggttaaatatttttgtggtataaattttcttttttttttcttttcttctttttttttttttttggagacaaggtcttgctccgtcacccaggctggagtgcaatggtgcaatcttggctcaccagcctcgacctctcaggtttaagcgattctcctgcctcagctccctcaagtagctgggacttacaggcctacaccaccatgcctagctaaattttttgtagagacaggtttggccatgttccccaggctggtctcgaactcctgagttcaagcgatccacgtgcctcgtcctcccaaagtgctaggagtacaggtgtgagccaccatgcccagccaggtacaaatattttcgtaagattacaagccaggtgacattgttacttcctgttgcactatatcgggtttacaattttaagaaatttagcttttagctgctaagtttcaggtacagtcttccagatcaaaaatatcttcagctgagcgtggtgcctcacacctgtactcccagccctttgggaagccaaggcaggataatgacttgagcccaggactttttagatcaccctgagtgacagcaagactgtgtctcaaaaagaaaaaatatatactcaaatactttcatttctcaattgttttttttcttccagactcgcaaaacagctagttggctggcagcagagctctcaaaagaaggccaccaggtggctctgctgagtggggagatgatggtggagcagagggctgcggtgattgagcgcttccgagagggcaaagagaaggttttggtgaccaccaacgtgtgtgcccgcggtgagcagaggacgtgtcccacctggtctgccaggctcggggtcccaggcccaattagagccagaaatccttgtatacagggaagtcggatggtctcagggagatgggtggggttggtgacactattcctttctaggagagactgtttggatttccctgaggtggtaagaactcacacatgccaggtgcggtggctcatgcctgcaatcccaaggcaggaaaattgcttgaaccctggagacagaggttgcagtgagccgagaatgtgctatagcactccatcctgggtgacagagtgagactctgtctccaaaaaaaaaaaggaagagggcaggcccagtggctcacgcctgtaatcccagcactttgggaggccgaggtgggcgaatcacctgaggtcaggaattcgagaccagcctgaccaatatggtgaaaccccatctctactaaaaatacaaaaattagccgggcgtggtggcatgcgcctgtaatcccagctactcaggaggctgagacaggagaatcgcttgaacccgggaggtggaggttacggtgagtgagatcgcgccattgcactccagcctgggcaacaagagcgaaactccgtctcaaaaataaaaaaagaaagaaagaaaaggaactcccgcagaaaccagtagtcctgacttggtggaaggaaatgtacaggcatctgactggtagagaacggagcctactcttccaggggcgcccatctccagaacattgtgtctcccagaggattaccgactgatctcatgattttgttggcacttgccaaagttctcttcttttcctctgggttctgttgcctgcctatatgtgtgccctctcttgtacccagagttggcctgtcccaaattctttccctctatcccaaagttggtacgcattgacctacctatggatgacagtgatttctgtctcctgtccttagtcctctcagcctccaactctccttcctgcaggcattgatgttgaacaagtgtctgtcgtcatcaactttgatcttcccgtggacaaggacgggaatcctgacaatgagacctacctgcaccggatcgggcgcacgggccgctttggcaagaggggcctggcagtgaacatggtggacagcaagcacagcatgaacatcctgaacagaatccaggagcattttagtgagtcccggggagggtcctgtgcctggcgccctttgctaagtagggcggggtggtgaaaggggtaggatcttctgtagccccaagagaggctctgtccctagcacactcccctcctttctgaccatatggcagttctcagggagcacacctggagacttcaggacccagggactccaaggacagctcccctgtgactgggcttcggggcgtggggctctgactgttgctgtcagtgactaggggccctgctgccccctgcttaggcacccggagcctttgggsctgaatgaatgattgctgtggcctgaggtggggcacattcctgggcagggtagagacytgtgtatctttcccccagataagaagatagaaagattggacacagatgatttggacgagattgagaaaatagccaactgagaagctccaccagccactgatgccagccctggcactgcccctgcacaggagacaagtgcrttyagggcacaggccccgacatcaccccaaggacaacggcasaagtagagagaaactacctacctcacttcaaattatgtttggacttgacaaaaataggtgcaaatgatggggggcaatagaagaaaaaatttgcattttggaaaattgggtcctttccccacttttttaaagccacattcccccatctttataataatctggwcacagtggtagtcgctggccccaggaccccctcctgattttggctaggcatcgtggaaccagctccagcccctgaagaaacgatagatgtgcaggttgtgcggaagaggctgagtggaaaatggtgtgagccccaccgctgtgcatcgaatgagggaagtggcagcagagaggccagagctgccccctctctgtctcttcaatggacccttcacaagtgtttctcctgcccttggggctgtcttccttctcctgaaatccagagactttcttgctcatcccttctccctttcacttctgttctctgctgcagaaagcagacttgcatatccctgatgagcagctcggctacttttgtaaacttcagatttggagagaaacacgaaagtctgaatcctgaccccttgagagagagtgatctggcgagggccgatgaaggggctgggcctggtcttgccttctcttctctcggttgctccctctgcctaggcccctggtactcagtcacggcagccaggagaccccaggtgagtttctgagcgcatacgtagttggttcttacccccaggtgtcacacggggccgagagctgagcaagaatttggaatggaagttatgaccaagggaattatgctgttcatttataatagtggacattatggagagctctgattcctacataatatgaataaggatggataggccgggcgtggtggctcatgcctataatcccagcacgttgggaggctgaggcgggcggatcggttgagctcaggcgttcgggaccagcctggccaacatgatgaaaccccgtctctaccaaaaatagaaaaaaatatagccgggcctggtggcgcacgcctgtagtcccagctactcgggaggctgaggtaggaggatcgcttgagcctgggtagaggctgctgtgagctgaaatggcgccactgcactccagcctgggtaacagagcgagaccccgactcaataaataaataaggatggataaattgtagcgtatgcaccattcattatgctaagacattttaaagtaattatgagaaacgctctactaatgatttgtttttatttgtatttttctgcttattagacaaatatatactcattttaaaaaggcgtgtgtgtatataaagtgagagtgctctctatcccttctcttctgggatcctgattcctggcagcttggtgaatattctaccatattgccttttatttgcataaacccatttttcttttacaaaaacaggaacattctgttcacactactatgcaacctgctttcactgatcagcatgtgttagacatgttgacatgtccaatacacacacatcttccttgccctggaaacaccatccaccttcctttctgcrtgtagctgtcccggcatttatctcctggttcctctagtgacaggcatgggggatttctagtacatggctgttatccacagtaccacaatgaacattttttttttctttttttgagacagagtgtcactctggcccggagtacagaggcgtgatctcggcccactgcaacctctgcctcccagcttcaagcagttctcttgcctcagcctcccaagtagctgggattacaggcacatgccagcatgcccagctaatctttatattttctgtagagatggggttttgccatgttggccaggctggtctcgaactgacctcaagtggtctgcctacctctgtcggcctcccaaagtgctaggattataggtgggtgccatcacgcctggccgaacatttttttttttttttttttgagacggagtctcactctgtcgcccaggctggaattccgtggcgtgatctcagctcactgcaacctccacctcctgggttcaagcgattctcctgcctcagcctcctgagtagctgggattacaggcacatgccaccgcacccagctaattttcgtatttttagtagagacggggtttcaccatgttggtcagactagtctcaaactcctgacctcgtgatccgcccacctcggtctccaaaagtgctgggattacaggcgtgagctactgtgcctggcctgaacatctttttaaaaaagatttattgcttatttatttttgtagcgatggggtctcactaagttgcccagtccagtctcaaactcctgggctaaattgatcctcctacctcaacctcctaagtagttgggattacaggcatgagcccttgacccaaactgaacatctttgttctcttttttttttttttgagaccagctctcactttgtcacccaggctggaatacagtggcatgatgatctcggttcactgcagcctcgacccagtctcaagtgaccctcctgcctcacccctccaagtagatgggactacaggcctgcaccaccacacccggctaatttttgtatttttttttgtagagatggggtctcaccatgttaccgaggctggttttgaactcctgagcttaagtaatctgcccgcctgggcctcccaaagtgctgggattacaggcatgagccatcatgcccaaccttattcttatttttgagcgttggtgaaaatcacttcaggatattattcctggaagtagaattgttgggtcaaagagtagggacatttaaaattttaattcattgtcatttacacttgccaaaggtttttaccaatttatgttactgtgatacaaaaattacgtgcttgccaacagtattatcaatgtttaaaactttgccagtctaagtggcaaaaacagattatgtcattgtttgattttgatttagtgaggcttggcaaacattaagtttcttagaaaatcttttctgttggggagctgcccattcttgtctcactacattattattattattattgagatggaattttgctcttgttgcccgggctggagtgcartggtacggttttggcttactgcaacctctgcctctccagctcaagcgattctcctgcstcagcctcccaagtgggattacaggcatttgccaccacactgggctaattttgtattttagtagagatggggtttctctatgttggtcagtctggtcttgaactcccaacctcaagcgaaccgcccaccttggcctcccaaagtgctgggattacaggcatgagccactgtgctgagccctggcctgtatcctactctttgaaaggaagtcattatgtacatgcagcccacacctcaaggaagttacatgctctccttaagggcagagtagctacctacattaattattcaactcctctgcaagggagaattctctcttctcccccactgattaatttattcaatcatgtacagagtttttattagtattagactggtgatgtaccttgatcatttggttaaggtgactgataaaaaaatttttttttgttttttgttttgagatggagtctcgctctgttgccccggctggactccagtggcttgatctcgactcactgcaacctctgcctcctgagttcaagtgattctcctgcctcagcctcttgagtagctgggactacaggcacctgccaccacacccagctgattttttgtatttttagtggagacagggtttcaccatgttgaccaggctggtctcaaactcctgacctcatgacccacccaccttggcctcccaaagtgctggggttacaggtgtgagccaccttgcccggcctaagtgtactcaagccttagttaaggtttatttatttctatttatagcaaagacagctgagatgtcaaactcttccctttcatggtctccagtgcggtgcccgtggtaacagcgtttcacaggaagcaccgtggagacgcagcccaggggactgccatggccctgcgaaggggcagcgtctcttccctctgtggtcccctttacccattccatgacaaatggtaggcaaaaaaagatatcgcaggaaggccctccgtgattcacttcatatgtttatgtattggttgaattatttttgtaattttaaaaaaggaaaggcaaagtcattttatagcaaggccggatggaactgggcgccctgagtgcagatgccatatgtttcttctgcttcacaggcttccctctggagagaaccaggctgccagagagtctgtgctgttctcagcagcacaaacagttgctagaggaaaggtgttaattccacactctgaggaccaggctggcccagatacatactgctcctcaagcctcacagaggcgggagagggggacctcctcttggattttgtgggttggttgttacccaggcatagacttgctgcaggagctgtgatttttttcacaaaagtagtgagaaggggcattgattcctaattcacactcaaaagggaatacttttatttttaaaaatatagtttcagtattttaccttccctgatgcctctgaccttgccagacagtcacagaaggtacttccttgtctgctgcctgtggatgggtaaaatacttttttttttttgagacggagtcttactctgtcgctcaggctggagtgcagtggctcaatctcggctcaccacaacttccacctcccaggttcaagcaattctctgcctcggtctcccgagtagctgggatcacagccgtctgccactaagcctggccaattttttgtatttttagtagagacggggtttcaccatcttggccaggctggtcttgaactcctgacctcgtgattcacctgcctcagcctcccaaaatgctgggattataggcatgagccaccgtgcctggccataaaatgtttttaaaaaattttttagctaggctctagctgctctggaggctgaggtgggaggatcacttgaatccaggagtttttgaggctgcagtgagctctgcaccagtctgggcgacaggagaccctgtctcttaaaaaaaaaaaaaaaaaaaaaaaaagggtctggtggctcacgcctgtaatcctaccatttgggaggccaaggcaggcggatcacctgacgtcaggagttcaagaccagcctgaccaacatggagaaaccccgtctctactaaaaatacaaaattagccgggcgtggtagtgcatgcctgtaatcccagctactcaggaggctgagacaggagaatggtgtgaacccgggaggcggagcttgcagtgagcggacatagcaccactgcattccagcctgggcaatggagagagactccatctgaaaaaaaaaaaaaaaaaagagaaaagcctccatcgtgacaaaggggttaaataagcaaccagaggccgggcacggtggctcacacctgtaatgccagcaccttgggaggccaaggtgggcagatcacgaggtcaggagttcaagaccagcctggccaacatggtgaaaccccgtctctactaaaaatacaaaaattagctgggcatggtggtgcgcatctgtaatcccagctatttgggtggctgaggcaggagaatcgcttgaacccaggaggcacaggttgcagtgagccgagatcatgccactgcactccagcctggtcaacagagcaaaactccatctcaaaaataaaaaaatataagcaaccaggagtgaaacacacctgtggaggcagggaactcaggaaatcaaggaagaaaaaggtgtctagtaagtacaagatgaaacatcacttacctaacttcccttcccacaacgtcactaaagctatgggaaaggaatgaaaaaggtatcaactcacatgggcaaataaatggaaacaataacagcaatagacgggaaatttaacaaaatatttggaacacacccaaaaaactggatgaaaaagctcccattttagcaataaagggaagtagaatgatatttataggagttttaaaaatctattatgggctgggtgtggtcaaacattgggaggccaaagggggtggatgacctgtggtcaggagttcgagaccagcctggccaacatggtgaaaccccgtctctactaaaaatacaaaaattagctgggtgtggtggcacacccctgtaattccagctactcgggaggttgaggtgggtgaacttgggaggcggaggttgcagtgagccaagatcgcgccactgcactccagcctgggtgacagagcaagactccatctcaaaaaaaaaaaaaaaaaaaagccaggcgcggtggctcacgcctgtaatcccagcactttgggaggctgaggcggggagatcacgaggtcaggagatggagaccatcctggctaacagtgaaaccccgtctctactaaaaatacaaaaaaactgccgggcatcgtggcggtcacctgtagtctcagctactcgggagactgaggcaggagaatggcgtgaacccgggaggcggagcttgcaatgagccgagatcccaccactgcactccagcctgggcgagagtgagaatcagtctcaaaaaaaaaaaatcggccaggcacactggctcacgcctgtaatcccagcactttgggaggccgaggcgggcagatcacctgaggtctggagttcaagactagcctgaccaacatggagaaaacccgtctctactaaaaatataaaattatccgggagtggtggtgcatgcctgtaatcccagctactccctactctcctgaggcagaagaatcgcttgaacccaggaggtggaggttgggatgagccgacatcgggccattgcactccagcctgggtaacagaacaagactctgtctcaataaataaataaattaaataaataaaaatgcgggttgcctgtggcatggtggaaattgggctgtggaggcagggctgtgccagaggggaaaacctgacttagatgcacttccctgagaggtggggacagcccagcctgtggccacccaaatgtatcggagcctgatggatacctggagacatcatgttgacagaggccaaagtggttacaggacagccactgcgaggagctgctaccaggaatcctctccaatgaactcctctcctggaggaaactcaagaggcgacaacgagctgatttttaaccaaaatgcttgtacccgctcagatttcagtgtcttggagcgcagagtccaggaatgaggtgcctcctgtataggtgggggagggtatctgggagtcatctcgcccctcccatatcccccaacgttctcagccattatcagtcacagctatcctaccagacccgccttcttccatcatgcccatttcagaacaatgaaggactagacagttttttgttccttttaattcagaaagggaaggaaataaaaaagtgtgtttaaattactattgcagaaaatctggctggatgctgggacctacctcttccaggatggggattcatgatttaatttttttgagacagggtcttgctctgtcgcccaggctggagtgcagtggcacaatctcggctcactgcaaccttcgcctcctcggttcaagggattctcctgcctcagcct

SEQ ID NO: 94832 - DNA, 28430 bp, Homo sapiens
  misc_feature (1)...(28430): n = A,T,C or G
gggaggctgaggcaggagaattgcttgaatctgggaggtggaggttgcagtgagctgagattgcaccactgcacttcagcctgggcaacagagtgagactgtatctcaaaaaaaaaaaaaaaaaagtcatttgttaattcctgaaatgctgggctatataattttggtagcctgtttgggtgggagaaacaagaggatcagacatcaagacacagcacccaccagaggtaggaagactagtaagacaccctcccaatattaagttgggactccaaagatctattcccctaaggtaagggcaaataagaagtacacctatgtctgttctcctacttctagtaattgttgtggagctcagcagaaaaaaattgagcttagcaaaggaaaatagaaagtgtgaggagtttttctgagaagctgggaccacaggtcagcattctgatttgcaccttgggtttacgtatcttggagatccagagaatgcctggccattaactttgtttaggatcttcttgggctgatagagtgccaagtgcctgggagaaaaaaaagtcatatatatatttttaaaagaagataaccttcatcttgtcctcaaaaactcactgcatgtaattttgcaaagacactgagcagtacacattcaaagatgaccaagttttacaagaaaacaaaacaacatgagttgacaaaacaacggcataaaattcagatattaggattatcagttatatatattaaaacaactgtaattactgtgcttaaggaaataagaaacaagctggaaaatatctgcaaaaaacaggaaataaaaaaattcggcctagtagttttgaaaaacaatcaactagaacttctagaatgggaaattacattttaaccaaaataaatgacttaatgggcatatctaacagctgattaaacagagctatagagagaattactgattagtattaaaggtaagaaaatgttatccagaatgcaacatagaaaaaaagaccaaatatatatatatgtatatatatgtgtgtatatatatgtatatatgtgtgtatatatgtatatatatgtgtatatatgtgtgtatatatatgtatatatatgtgtatatatatgtatatgtatatggaagagaggttaaaataaatggaaaacaaggtaggaagctctaatagatgtttaatttcagttccaaaaagagagaaaaaaatagagtaaaaacaatataggaggctggctggtctgagtgcagtggtgtttacaactaattgatcacaagcagttacaggtctctttgttccttctccactcccactgcttcacttgactagcctaaaaaaaaaaattaaaaaaatatataaaaaaataggagaagataatggctactattagttaaaatgtatctcccccaaatttatatgttgaagccctaatccctagtatcccagaatgtaactgtatttggagatagggcgtttaaagagatgattaagttaaaatgaggccattaaggtgggccctaatccaacctggtgtccctgtaaggggagtaaatttagacacaaagagaggagctaagggtgtggacccacagaaggacagctatgtgaggcggcagcaagaggccagccatctctaagtgaaggagagaggcctcagaaggaaccaaacctgccaacaccttggtcttggatttttgacctccaggactgtgagaaaatgaatttcagttgtttaagtcacccagtctgtggtattttattatggaagccctagcaaactaacacaatgactgagagttttccagaactaaagaaagacagcagtatatggatttaagaaaacccatacccaaaaacttgacactgataccatatttggaaaaacatgggttttccttatggtatcctgtactcctgttttatgtttctaaatggaaagcttcctgggcgatgcatctgattggtggagcccaggtcacatgcccattctcagctgtaagctgggaaagcaagtgttctaggacagacttacttataatatgtgaaatatccacatgtaaggagaatttttaaaagatgttggacacacactaacataacatatgcctataacagggctattcaaaacttatgttctagtctcagctgttttctctgtattcttttccttcaagagtgcataactcgtagagtctctaactcaatggatgacttatgtaatttgattaattcatttatcaattcatgaaactctagacacgagactattctggctatcatgcaattcccatgaactgctccaccttcacttcatattcagcttacctaaatcctagcgtcacccctccgccctctccagatacgctgaagaagtaggcttccttttttctgcaggtgttatcttgcctcttcaagacacctttgagagtcccctctctttcctcttgatttcacttcatacctaggttcagcagaatcgccctgccctgtaacgctctcactcatcccttcctttccagtcccataacgattacctttttgcagctttatgtttgagcatcttcaccatggccagtcactggtgtttctgactctggttgctcgtcccttcaattaattccgcaaactcatcaatgtttggtgaatttctattttcttctactaatcttctcacctgctgccccagccagtgttcccttgaatgtctcagtctttctctcggactttgctcgtaattttattctaccagggaccaccctgctcccatttttgtctaagtcttaacctcccttcatagtgcagctcaggccaatgccctcttgaagacacccccggatggttcactttgtaaatgtgtggaccttggcatggccaacgccccttcacacctggcacagctacttttcattgttttccttcatgaaaactaaagttcttttgttccacaaaactgtgacagtgacttcaggataaagatcatatctggatccctaattcttagtgcagagcctagtacagaactggaatgcagtgtttgttgaatgaaggaatgaattaaactgcaaattaacgaatgcctgctctggcactgagactcgcagctgtgagaaaggtctctggaggcagacagttgctggtacgaagtcctgagtcaagcaggaaacaaaatgcggatgtcagcagtttcaagtgagacctgtggtgagctccttcctctgccggttttcccttcttaattttcagtctgaagtgagggagtggagaatctttctgtgttagactgtgtcgcgttgggcagatttctccaatcttaggatagtagtggtccctctcactggccttcactttgtaccatccccagcaagaacactgagtctgtgaaccgaattctagtagtcgggaaatggattgaaaggacatccaggttttacttagtttctatgctcagatgctggcagaagccctgcaaatcttttccttttctgtgaaaggaagaggcggtttctgcgtgaggccctatagctcaggggttagagcactggtcttgtaaaccaggggtcgcgagttcaaatctcgctggggccttgcgaaactactttcttgattcaggtgttttttgaaaaactccccttctagtctttctgaactaagtcacagaaaatgtggcaaattagagcttctttcctctgttcagagcttccaaacactagctcagcagaacgtttcctttaggttccagtagtaatgctgctttagctcctggaatgcggcggaatccattacacaggcggtggaaatcaccgtcagcctctgcccacgccctggcttgcggactggcggcgagagccctgctgactgccgggcgggaaatggggacagctaggcgagacaatagccctttaagctattctcaagccccgggtctgggcatatttggagtagagatcaaggttccacttctgaaacgggaagagccagcaatggccgctccggccaggcgtccagaagagagatgcacgttgtgaggcaaggtttcatgtgccagtggggttttgggaaattaagggcccgactttaggggcgagacttgggtcactaaatttgattttaacgcagagaaatgtggccttccttttgaatgagctgcaaatattatctccaaaagcgaattcacacagaaacattgggtttgcccagatgtcctctatttcaggggttcccaacccttgggccgcgcacctgtccatggcctgttagggacccggctgtacagcaggaggtgaactccgggctagctaccagtaccgcctgagctccgcctcctgtgagatcagtggtggcattagaatctcacaggagcgcgaaccctattgggaactgcgcatgccagggatctaaactgcactccttatgagaatctaagtgatgcctgatgatctgaggtggaacagtttcatcccgaaaccatcccccaactcttccccccgcccccgcggtccgtggaaaaactgtcttccacgaaaccggtccctagtgccaaaaatgttggggaccactgctccattccacaccctctccctcccgtgtctgtggacgtgtaagcggaagagccgagattgggagggaagcgcaggaagtgaggacatcagggagcccgggcctaagcctggaggcccgccctctccggcgttcacagttgcgcagtcagaattgtgtgcgtcccaccgcctcagcccccagttctccgacgcccaggtgccggtccccaccctacacacaaacacacgcatccacgctcgcgaggcccctgggtccgcgcccagtgaggccaacagccctcgggcgcccagaggatgagcagcctcggtatgcccgagtttcaggggcgcctgctctgcttgggagcccctcagtgaggcaggggaatccagatttagaaaggttgtcctcagaacctcggacgcaggactgtcttacaagctggctttgtgactctgcagtaattactttccgggtataaagagatttctttctttcccgtctctggttaaggatgtctcgagtagggatttttaggagagttgtttccgtgcttccttcgatagctcagctggtagagcggaggactgtagtacttaatgtgtggtcatccttaggtcgctggttcgattccggctcgaaggagacgctgctgttttggggtttacggttgctcttcgtttgtgcaaaaaatctctgtatcttgacgtgatcaaatctgtttctgtctctcacccttgtccgaaggaaacagcttagccgcgaggtgggctgcgttaatcgcgtcttgaaaagttggttacctttctgaaagatagtagacccgaatcgtcccaccgttgggggaaggcactgttgtcttaccgaagtgtgttatattttggcttctacgttaagtccaaaggccggcagatatatacgtatcgcgcgtctgtcctggggctcagtaccctacagccttgcaaccgagctcagctctggccctcgatctctatttcagccccctccaggttccctccaggccctagcgggcttaaatcgctccccgggctcagtgagacacaagcatgtgacctaaagtctaaaaagctgccttccttcaccccatcctgcatctggatcgaggagaataagccagagaataagccacacttgaaacttggtgaagatggaaggaataactaaataaggcctaagggaaatgtcacaacagaggaaaagaaacaaaacaaaaaaccttcagaacagcaggcggaaaagagaaattcagagtgataggaagcaccactcagctacagtggctcgttggtctaggggtatgattctcgctttgggtgcgagaggtcccgggttcaaatcccggacgagccctcgtggctactgtttttccacccccttttgtcaactactgaaaaaaagtctccgttaaatttgaaacacaaactgtctcgcgatgggctgtcctgccaaagaaagcagcagcgaataagtacgtggcagatggtgctgtcgaccagtgtcaagaccaagtttcatgggttcctggacgctcagccaggggtagtctctgaagggccgcctggcaattgggagcagaagccagtttcccgccatctgctctccgtggaggcagtgctctcgcggctgctgcccgttggggtccagctgaggaaggagcgcggatcccaggctcgttctttgcctgggctgcccctgcggcccctggggcgggtgctgctgcggcgccagctccaagggcggatccaggcgggaggggcctcctcggagaagcggggcgcggtcccaactacgcagaggctggcacgccgaccctccacacctcaccacgcccccatctccgtccgtgtacacacactcacacaaggacgccaaccccacctagatgcaaagcaggattcaaaagaacatctttgcgttttctaccggctccccatcatcgtactagggaggaagaagcgggtgagaaacaaaacttctttccattgtcctgcccgtttctgcggacttgttctgaggccgaggtaggttcacactcctgctcctcctcytcctctctggtagcttcataaggggcgtttaggccggggagtcctttcctagtagaggcagcttgggactccttggggaggagtttgcgggacggggctggagagggaggaatggggagggacgtgaaagtcccgtatttgtatgagttaacgactttacattcccactcaggtttactttgcgcagctgggcacagatgccagcttctattgattagtaggcttggagggggaccacagaatcgccgaacctaagggaagccctaggaggcctgcacttgcccacaactaagaaagctttgctagttattcaggctaatcaccagctttttgaagcaggccttagttttttgcaagcgtaactaacatttggggatcggtgttttctgtttactctcctctgcctcctcacccttaacccaccctcagccagtgttgtgcaattcttagagacacttgccaacagcctcttctctaagccttcctactggaaggttgggatcctccgttttctcgctctgagacagcacgtcaaatgctaatagcagcacatgagtaaagcgcaacatctttattaaaacaatttcagcaccactcagggggctagggaaatctcagatgagccaagaccctccctcgtgacagtaaaaatcttataatcaagtcataatrtaatcartagaaacccaagggacatcattatctgtggcacaggaccaccttcccagaagcagcctcaggtattcaagacttacttaaccacagagccactaacaagttttgcaagaggataggtttattacatacgcttcaattcaagcaattcttttactgatgacaagcmgagtaaaataatttttgaatttatggtaatagtcaatgtaggtttccttcgaacagcaactttcagtggcccctttaaagttagctctgattgtctagaaagtactagtatggaatataaaagttgtgtgggcccggcacggtggctcatgcctgtaatcccagcactttgggaggccgaggtgggtgcatcacaagatcaggagttcgagaccagcctggccaagatggtgaaacctcgtctctactaaaaatacaaaaattagccgggcacggtggtgagcacctgtaaycccagctactcgggaggctgagacaggagactckcttgaacctgggaggcggaggttacagtgaacagagattgcgtcactgcactctagcctgggtgacagagcaagactccgtcttaaaaaaaaaaaaaaaaaaaattgtgtggtgcattggaaagcttccaggccsgcgaatgcaatgagttccttgggcaatacatgtctctttctctgttcctcagttggctcttctttaatatgaggggtggacagagtctcagaggcccctcccactcttgttctatgactccatggagtggtacsatgttagtaacaggacatgaggcactctagtaatgtggagatgaactatcgtttggcagagaggatggaaaaaatcattccaggaaaagaggaatggctttagctattgttsaaaacagataatcaggttataagcaggcaagagtaagaggtttgtcaagttattgttggaagcattggtcactgtgactcaaattaaagtagctggataaaaaagtggaccaatgaaggtcagtgaaacctttctttaggagtttttattgaatctgtatttaagcagattctctgtaattctctgtaaacagttattcccggaagaatgccatgaaatacttgggaaagagggaatgggaacaaagagtgagtgggcacaaagcccagagttggttgaaaagcaaatgtttaatttttgtctttgtttggaaatacaggcatgtcagcaggactttgtccccactgtccttcaatcagtagtgttgcctcttcctggagacgtggttcttcttgccacgtgtgcttttccttctttacctgttacttccgttattgaataagttcatgcttatagacctaaagtgttagaataataaagaaatatagaaattatttagtccattcttcccatcatctaattttataattagtcctaagacagaatgatacatatatactctgtatgaaggaggaaagtgctctaacactagggtccttggaaacaggacccgtgcatcccgtgtctgtgtgcagggacattattggcttgagggagagagagaaaaaaatctccaggaaaggggaatgactttcaagttaaagctgtctgaacatttaaaaaatatatgaggttttttgcaattggcgattccttcatttgtattaaaattactgacaaagatgtgatgttccttaatcatagaatataattccttgttgtattttaaacacaaatgactaagtgcttagatgcattctaatgaaatagtaatttttcccccaaaccctacttttcrtttcaacaaaacttccttgtgccaagtttaaaagaaaaacataaaactgtctttttgcattgtgggcagattgtgtatcctccaaaggttgtccagtgaaggcccagaggcagagaagggacctaactatattcagaggctgctggttgccccacctcagcactactgcagaactctaaaatcagaggctgctctgtttgtgtgagtcggtgcttgaattggtgcttcaggccatggggctgtgtgtgtgcaggcgcatatgggttgtatgctgtggcagggtaccgcttttcgggactcagaggtggtgttgcttgagctaagcctggaaagacaggtcagttttctccttgcttatgaagggttcaaagtctgactccaccattcatctgctgtttgttcttggagtttcctcatgagcagagcatatttacataatgcctacctcacacagtcctggtgttggttgaatgtagtcatgtatgtgagagcttcacaaaatgaaagattgcactgaatattataattattgtgatttcaagtgcatttgttttactagcaggcagcctgtcttttcttgacaccttctcaagtgcagccagactgaatacttggcagctaggtgggtgacaacagaggattgaggatttttaaaaagataacactgtcctagatccaacaccactgtgggcaaatgctgggggtctgtgaaacagttggtaccctgctgctgtctgatattggaaactatgagatctataaggtgatcctggtgacctttggcccactgtttttacrcaagcaatggatctacagccctgctttgatgatggagataagcaattttgcaactacattacaaggatcagaagattgaatgttcagggttagtctcttgtggacaggtaaagatggaagaaggagaaacccaggaaacatggcaagcctgcttctgggggttagaagctgagaagttgagtgtagggggaggggcagtgtactaatagctgtcacacaaccttctctggaagtgctttcctggctgtatgaaatcgatggaataacgtgcttagcatccrttcatgaaaccaaatgatgtgatacgataaataggatgtgatatgataaatgataaatagtacagtggaaaagcatcctactggaagaccatatcttactctgtgacatcttccaaggcagttcttggagttggcccagggagatcagagatgctatcttatggatccagactattatgtgtgaatagggaaacctcagtcctgccatgaacaagagtaagcaccacagacagcagaaaagggcaacttttggacagaaggccatgtttctcaaactttgtcttccagaacaaatctctaatccattcaggtgggttaatatctaacccaatcatgcccagcgaaaaggtgaatgaccctcctygtttgttcaagagcagtgtccttggttttcatgtccctgccaggactgggacactatatattaggaacactatataatcagaacctggagaggcctccaggttcacacaactggaacccatctccaggaacaaacagctggaacccatctcccgttgaagggaaactgccagatttttgtaagattcttcctcctgggtaaactattgttcaatttgttttatatattatttctagccatccatccattttaatgaaaccattttcctccctttaaagcctccaggctcaagctcatgaattaaaaagaaaatggatcagattctaaagtttaaaatgaaaacaggtttcttttgggatggcctatgtgtggataaagagaaattagtgagactgggaggaagtggaagtttaggagggatttctaaattgtgataaaatccccaaaggcctgggggagccatttgctgaaggccatcgggagtcctcccccgtcgtccacccctgttacaggcattacacgtggcttaacaaggaaagaaacagtatgtttttagcattgtttccttctaaccttccctgctaatttctcttcttagaaaagttttggatgctctttcaaacaaagtggaacacatcccaagatcaaaagaaggctcactggcaggttgaagggaagaaggaaggaaaagcaataaagggatgaatatgccttgggtgttaggctcttactttgggggattttgccctaggatgtataaaagtgtgaagccacattgatgaaaatgataactatagttactcatcataaactgtcaagttaactccctggtgtgtaaaatttgatgaatcttttgaatactgaacattgcctgtggggagagggagagaataattcttgtgaatactaacagattcatttgatacagaagataaagttactctaaagaacagttggggccaggtgtggtggctcacacctgtaatccccgcactttgggaagccgaggtagccggatcaactgaggtcaggagttcgagaccagcctggccgacatggcgaaaccccgtctctaccaaatacacaaaattagccaagcgtggtggtggccgcctgtaatcccagctacttgggaggctgaggcaggagaattgcctgaacctgggaggtggaggttgcagtgagccaagatagcaccactgygatctagcctgggcgatagaacaagactctgtctcaaaaaaaaaaaaaaaacaggccgggcgcggtggctcacgcctgtaatcccagcactttgggaggccgaggcgggtggatcatgaggtcaggagatcgagaccatcctggctaacaaggtgaaaccccgtctctactaaaaatacaaaaaattagccgggcgcggtggcgggcgcctgtagtcccagctactcgggaggctgaggcaggagaatggcgtgaacccgggargcggagcttgcagtgagccgagattgcgccactgcagtccgcagtccggcctgggcgacagagcgagactccgtctcaaaaaaaaaaaaaaaaaaaaaaaaaaagaaaagaaaagaaaaaaaggacagagaacagctgggactaattccactgacaaaaagctgacagacagttacgtgtttgggtacagaaggatatatctataggacttttgccaccagatgtgaggctttgcacccttggcttaggcagattcacttttacaccacaaacratctgtctcttactggttttctcccaattccattttaccttgctttttgaggaatttagagttgaatatattgagaaagttttgagtgagggagcagatgttagatattggtggttttggtgtacgcttgctgagatttggttcctggatgtcttagggaatcaagattacaggcccccaactaaacttatacaaaatttgtctctgtaactgagggtcactggacctttgctattgaaactagcaaagcctctattatgtttaatgagaaccatgaaacttcagatttttagagctagcaactcttttattttcttgatgaacaaacctaggcctggagagaaaaatgaagtcaattacttaaaaaatattaagggttataataaggcaagcatgttgattcaaggtgaataatatgagttctgtggaatatacaccagtaagaaacactaacaagtaaatacttcattgttcatccacgatcacgtgggtaatggcatgtttggaaatggcacccgtgaaacctgacaacaggtcggtctttattttgtgatatccttatgggtagattctgaactttgtggcttttactttggcacttatatctaatgaggtgtccttggtcttaatatctaatgcagagcgagtttggacagagattctaaacaggttcaccagctcatactccyttctgtgaacagcaatatccccacaagttatacagcattggcacctcctgcaagtacggtatttcctagagaagacattagtaacattcctatccaccactgccacctaacgactcttttaggtactagcagctctggttccgtttcctgatttctgatttctgggattctggcaccaggcagaagaatgttgactgtgtaaggcagacctttgacattagaagtcagtatttgttcattacagagcaagagacttaattgattacaaatcaataaaactttaataagatcttccaaaaaactagaaacaggaaacacacccaggagactgaaaagcatgatgtaaatgtgaagaacgtggcaagtgggtggcttggcagcccagcagctatactggagcagctgcatgagtgaatacttgttactcctttagggctggctctccattctacaatcatgtacctctttcttgataaactcccaagaacacactttcagcatggaatttcagacttttagagatagcaactctctcaagtatggacaaatgtcggtgcggacaaatttgatgcactgctgaagaataccaaataatatgctaaggaattttttcattccacaataatggagtaaatagcagctggaaatgtttgcattaagttcatagattataatttgtaatggaatcaacaccaaatgcaaattagaaagagagcccactttgctcacccagtcacgtcttcccatgtaaccatagaacattggggtcctgtgtctttctagatccacagtcttgctctcagaacaggctagccacaccacaggcctagtgccaggacccatggcctttttttaagctcagactcccttctgtgaacagcaatatccccacaacttgtacaacattggtgcttcctgcaagggctacagaactatttgatacgaaaatgttcattgacttacacacaagagaagcacaaaataaaaaattaataattaatttaatgtctttgaaaatgtaccatttatttttacatttggggtcataagaattgtattacacttaagaatgcaatacaatttgaagatcagatttttctccctttgtgagaatttctcagtatgtgtgatgactaccaagaaatcatagccagtcataaattcagtgagttactcataaacgaacaagaaccacctacttcttggggaggtaggtctgcttcccttcaactcaggatacaactgctttcaactgctttcttcacattagctgactaattagctagaagcctgtcgtaaacaattttatggttgactccttccctgggctcagggttccctagaacagaggtccccaaatcccggtctgtggcctgtccgcctaagctctgcctcctgccagatcagcaggcagcattagattctcataggagctggacgcctattgtgaactgcgcatgtgcgggatccagattgtgcactctttatgagaatctaactaatgcttgatgatctatctgaaccagaacaatttcatcctgaaaccatcccccaccaatccatagaaatactgtcttccacaaaaatgatccctggtgccaaaaatgttagagaccactcccctaaaactctcttcttagctctcacctcctgtattactatctcatctcagtacattgaagcccccatcttttccccatggatgcctcatttcctattagggaggcatttttttattttttgtttttatttttttccgagacggagtctcgctctgtcgccmaggctggagtgcagtggcgcgatctcggctcactgcaagctccgcctcccgggttcacgccattctcctgcctcagcctcccaagtagctgggactacaggcgcccgccactacgcccggctaattttttgtatttttagtagagacggggtttcaccgtgktagccaggatggtctysatctcctgacctcgtrrtccgcccgcctyrgcctcccaaagtgctgggattacaggcgtgagccaccgcgcccggccgtcatttggtatgtcttaatgtgcctcaggacctagcacagtccctggtacccagtagagacctatgtaatgttcnttaktcaattaataaatacatgaattaaagagtgagagtggattttgtaatgttacgactgayagagaaatactcagtgattctaagggatggggaagaacggttggagctagaggttgtgctcaggaaactattaaatagacgttccgcaggaagggattgacgaagtgtgaggttaatgaggaagggaaaatagaatataaaatttggtggtggaaaagatctgattcatgatgccgtgtcagagagcaaagctcctgtccttttggcctaatttggtgatgctgttcttgggtctaccacacctccttttgccctccgcaggagcctgtgttggaagagatggtgatgggcctgggcgttttgttgttggtcttcgtgctgggtctgggtctgaccccaccgaccctggctcaggataactccaggtacacacacttcctgacccagcactatgatgccaaaccacagggccgggatgacagatactgtgaaagcatcatgaggagacggggcctgacctcaccctgcaaagacatcaacacatttattcatggcaacaagcgcagcatcaaggccatctgtgaaaacnagaatggaaaccctcacagagaaaacctaagaataagcaagtcttctttccaggtcaccacttgcaagctacatggaggntccccctggcctccatgccagtaccgagccacwgcggggttcagaaacgttgttgttgcttgtgaaaatggcttacctgtccacttggatcagtcaattttccgtcgtccgtaaccagcgggcccctggtcaagtgctggctctgctgtccttgccttccatttcccctctgcacccagaacagtggtggcaacattcattgccaagggcccaaagaaagagctacctggaccttttgttttctgtttgacaacatgtttaataaataaaaatgtcttgatatcagtaagaatcagagtcttctcactgattctgggcatattgatctttcccccattttctctacttggctgctccctgagaggactgcataggatagaaatgcctttttcttttcttttcgtttttttttttttttttttttgagatggagtctyactctgtcgcccaggcttaagtgcaatggcacaatctcggctcactgcaacctctctctcctgggttcaagtgattctcctgcctcagcctcccaaatagctgagattacaggcatgcaccaccacacctggctaatttttgtgtttttagtagagacagggtttcaccgttttggccaggttggtcttgaactcctgacctcgggagatccgcccaccttggcctcycaaagtgctgggattacaggcatgagccactgagccgggccactttttccttatcagtcagtttttacaagtcattagggaggtagactttacctctctgtgaaggaaagtatggtatgttgatctacagagagagatggaaaaattccagggctcgtagctactaagcagaatttccaagataggcaaattgttttttctgtcaaataataagctaatattacttctacaaatatgagaccttggagagaagtttccaaggaccaagtaccaacataccaacagattattatagtttctctcactcttacacacacacacacacatatacacatatgtaatccagcatgaataccaaaattcattcagggtagccaccttttgtcttaagcgagagataattttgatgtttgaatggaatgctcccaggatattctcttgtcatggttattttatataaaattcaaaaaccaattacattatttcctctgtaatcttttactttatcaactaatgtctggcaagtgtgatgttttggggaagttatagaagattccggccaggcgctgtggctcacgcctgtaatccagcactttgggaagctgaggcggacagatcacgaggtcaagagatcaagaccatcctggacaacatggtgaaaccttgtctctactaaaaatgtgaaaattagctgggcgtggtggcacacacctatagtcccagctactcgggaggctgaggcaggagaatcgcttgaacctaggaggcggaggttgcactgagccgagatcacgccactgcactccagcctgggcgacagagcgagactccatctcaaaaaaaaaaaaaaaaagaaagatcccagtttatcccagtttatcccttattcttcctcaattctcaagatttgtttttaagttaacataacttaggttaacacactctttgtaaaatacactgttcaatctacagactcagtggttagcttcctgttaactaatttctgttgacaggtacttggatattttatttagaaagtggttgccaataaattagttataagtcgccagtttcactgccttgtgaacacataattattgtggtctcagtattccctatggtggcttctcctgctcctggtattgccctgaaatgggccaaaagccgtggctccccaatactcaggttatagaacattgtccaggtaccacctaggagagcccagcctcactgaaagtattcaaatttaggaatgggtttgagaagtaggtagctggtatgtgcttagcacaagaatctctcttccttgggttagtctgtttcaaaactgaaaacactgtcattccttaagaaaataggaaaaagtattccaaacctctgtcactagaaaatttgccatattaccaaatctcaaaaacctctcaggaaatgagaaagtcccagtttctggtaaactatttgggcccttttctcaagttctccaaccagtgctatttccttgaggtgaggcaaagttactcaagatcatygctgccactcaaggccttgatagggcaagtgaaaggcatggaccattattatattgatcacagcataagctgtgaaaacccacatcttctccaaacatctgcttggagcattatcatcgcatagtttgctctggtgttcagggaaatcgctgtttcataggaaatcacatggcagtgggatgggagtgtttcctgacctgccgatggtactggcacctgagcaagcattcctagtcctttttggtctgggcctcttgttctaycacaaccacaagctgtttaaaataaaaygtcaagtcacaggcaggtcattttatcctgcgtgaatcaattgaagaattgaagtcctggtcagctgtgattgttggctttgcaaggaaaragaaggaacactccaaaatgctaaatgctttgaagaatagtgacatgcaaggaagaaaattccatgcaatttggagaagaaacatttttctaggaatctagtagctgagatattttatagtttaaaaacagacttccaatatcttgagaatacagttagctctacgaaataaagaggagtcaataatatatgcaactctgtagtcattcattattttatccagattgacagaagcagaggaaaccaagaaaaatggaagtggtaaaaaaaaaaaaatgcagtaattgccaatatttactgagcatttaccctgtgctaggccttgttataggcgcttagattgattttcttttcataacatccctaagaggtaggtattacatgctcattttgcttatgaggaaatctgctgagagagattaagtaattttctcatggtcacagcctcagtcttttagaccacggtgtcaaaagaagttcttactgtgagtcagggtggtgcagtggagaaagcgtttggggaaaatcctgacccaaaagtgtgcgttgggatgatgtggagatcattcaattttctcttgtagctacagctttgagatgcacccattggtatccacactggcctgctgtcctcaaatatttctctatgtcttgtttacttgagtagtgcagaaaagctgacgtcctgggtctgctctcgcatgcataggtgaggttttctctgtagctagtcatcttgctaaaccatatttttggtcacaaagaatcaggatgagagaaagtagataaaaccatggaaactcgaggtgccaccggaagagcaaaccaaagtatattgatctgctgaagctrtaatccaagtactaagtataccttcagaagttgtatgcattgttcttggggcaaaaaggaaatcaaacatctgcccttcctcccacaacctctttacttccctctcttcctaacactgtatctcacatctacagctgcaggcacacagatatgacatacagcttgatatctttatgtgcaaaggcaaaagatggctatggatataggaggtggcatttaaaagaacaatatccatgtttgatactgctttcattatcaataatgaaaaggtagcctttcagcagaacaaagtaaggtacaggtcgtttggaagccatttcagtcattcacacagtgtgatccaccattacgaagcagaatttgaaatcaaaagacaatagtacccatatacatcaaactaggagttcaactggggtcagtccttggactgcacatacagagttgggctgcctgactctcaaaacattgcccttgctaatttgcgttgctcacttcctattgaatcagggatgatttttctttgctgtagtgaatcagccctgctacactgcaagaatcaagccgattcacaattcacatcaattccaggagtgacggccagatggcagcatctggctagtcagttggtgagtgagtccacctccartcttgattaaactctgctgctgggaagtagcaattctgagcataaatgtctttgatatcctgaatattttgggtgtgggatgagagaggcagtagatagtggaaagagcacagggtgtagactaagataggcctggattcctttctttaatctgtcaatgaaagcaatgaatgttctgaaactacatggcaatgctttttttgttgccactctggcttttttttttaatgctataaaatatatgcctatttttcactgccaagaggtgacaacacaatgatgctgcaaccagagaagacagacagctaccaacaactattgacaagacagaaggaacatcaagaatagatgcaagacaaagcaatgtatctccatggcctagattttttaggttatgcatagaaacagcaaggagaagaagacacaatccaagttttcttttgagaatattgtgctgtttaaatttattttttaaacatttcttagcttttcttattagtcaatttcataagcctgggaaacatctttactctatccatttaattgcatttgttcattagcttactcatttcacttattagttcattcaaacagtagctattatcaactgtcttctaagaactgtatctgggtattctggttttgcttttttttaaaaaatagaattaaaaggatttccaaaaggacctgattttacattagaattagaataatacattttaaattaatgtataacatatattattctagaattagaatagattttaaatcacattagaataatagccacatgacaaaaaagaaaagaaaaataataaaattaatgacaaagaaaaacaatagtcatgtgagaggaaaggcaaagcctaaatattcctctgtcctcttcctccacctagattcccagatgtaaggtattaaaagtagtttgtaaactttctgtgacgtatgctgagtctatccaaactgtcgggaattggagcctcccgggaaccaaacactccccaaagatcatacacctacrgagttcccccaagagacacacaactgcagtttcatgtaggttcaccttttctctctttttatactctgtccacacaaacctggcagccacgcagtcagtccctgccctgtgtcattgtactggccacagcaacttctctctgtaaatgagaaaggtcttgctttcagaaaagatcatgtttgcaaactactcactcttgaggaagaagggtgggaaaagtagcagagatgagtggggagatggtgcatataagaaggaggaaagaggagactatggagtcaggatgccggcttgctattctcaacacctttttccagtgcccagttcttaccttatttctcctgccccttgctttcttttctaggcacctctaagatactgatggctctgcagaggacccattcattgcttctgcttttgctgctgwccctgctggggctggggctggtccagccctcctatggccaggatggcatgtaccagcgattcctgcggcaacacgtgcaccctsaggagacaggtggcagtgatcgctactgcaacttgatgatgcaaagacggaagatgactttgtatcactgcaagcgcttcaacaccttcatccatgaagatatctggaacattcgtagtatctgcagcaccaccaatatccaatgcaagaacggcaagatgaactgccatgagggtgtagtgaaggtcacagattgcagggacacaggaagttcyagggcacccaactgcagatatcgggccatagcgagcactagacgtgttgtcattgcctgtgagggtaacccacaggtgcctgtgcactttgacggttagatgccaccatgtagggattatcgcgagtggttgaccttacacttactccttaaatagcagtgagtaatgcatttgagctgycccaggctctgtctcctcagctcatttcytactctttttctctatataactcattctattaaatacattgcaccaaagagatatggagacataaacctgtaatgaatgaggctgggcttttctgtaataagcttccttttataatactggtcagcttagctctctcagatcctatcctgtggaatttagttattatgtgtatttatgtagtatttcaaacatttcaaaatgctttcatctatgtttatcacattttaataccacagcacttataatgatgtcactacatatagaagctcaaagttaagggatttgctgaagactgtaaagttaatggaagaattgagacaaaaatccagtgtagctggccacttatccagggctttttctacttcatcacaaggaatgttttgaaagtgtctgctttttttatccttaaaattcacctgtcagggaggcattaaaaatttggaaatgtatgccagcaaaatgtgagctctgtattttttggcattcttatgtttgggtttaataagattaagaaaatgatactgggaattttctttttcctgaaactttgaatcaccctagtaagtcaaagtactaaaaaatgtactagatcattaagacttatgtgctcttactgattgaaagattttttatgttttccttgtaataaaggacctaaaccgaaggtacctgagaagactgtgctatggtattattttttttctctgacttttaaattcttgtttagtttataaacatgcatgcaccttaataacctcataaactctggtcaaagactaatgcctatcagatccatgaccacaacacagaagatttgtctcatttactccagagagaatgattcctctcaaagacaattctcacagctcttccttctcccttagaatatttagaagcaaattagggagctgtcaggtctctgagcccaagcctgcacgtatacatccagatggcctgaagcaactgaagaaccacaaaagaagtgaaaataaccaattcctgccttaactgatgacattccaccactgtgatttgttcctgccccaccttaactgatcaattagccttgtgacattccttctcctggacaattagactcaggagctccccaccagagcaccttgtgacccccgcccctgcccgctagagaataacccactttgaccgtaatttcccactaccaacccaaatcctataaaactgccccaccccatctccctttgctgactccttttttggactcagtctgcctgcacccaggtgattaaaaagctttattgctcacacaaagcctgtttggtggtctcttcacatggacgcgtgtgacatttagtgccgaagacccagaacagggggactccttcaggagactggtcccctgtcctcgccttcactccatgaggaggtccacctatgacctcaggtcctcagaccaaccagcccaaggaacatctcacccatttcaaattgggtaagcggtcttttcactgtcttctccagcctctcttgctacccttcaatctccctgtccttccaattccagttctctttcctctctagtagagacaaaggagacgcattttatccatggacccaaaactcagacaccagtcacggactcgggaagatagtcttcccttggcgtctgatcattgtggggatgcctgccctgatcattcacccacattccattggtgtctgatcactgtggggacacctgccatggtcattcacccacattcccttgatggcaagtcaatcgcgggatgcctgctttggctgatcgtccacgttatagcccagggctgctcaccaccccctttgctgtgtctctacctttctctttaaacttacttcttcactgtgggcaaccttccaccctgcattcccccttcttctcccttagcctgtgttctcaagaacttaaaacctcttcaactcacacctgacctaaaacctaaatgccttattttcttctgcaataccgtttggccctaatacaaacccaacaatggttccaaatggccagaaaacggcacttttgatttctccatcttacaagatctagatgatttttgtcgaaaaatggggaaatagtctgaggtgcctgacatccaggcattcttttacacatcagtccctccctagtctctgctcccaatgtgacttgtcccaaatctttcttctttctctcctgtctgtttcttcagtctccaccccaagctctgagtcctttgaattctccttttctacagacccatctgacctcttccctcctccccaggctgctgctcaccagccaggccaagccaggtcctgattcttcctcaccctctgctcccccaccctataatccttttatcacctcccctcctcacacctggtccagcttacagtttcattccatgactagctctccccaacctgcccaaaaatttcctcttaaagaggtggctggagctgaaggtacagtcaaggttaatgctcctttttctttatccaacctctcccaaatgagttagcatttaggcttttttttttttttttttatcaaatataaaaacccagcccagttcatggcccatttggcaacaacccttagacactttactgtcctagacccagagaggccagaaggccgtcttattctcaatatgcattttattagtcaatccactcctgacattaacaaagctccaaaaattagattctggccctcaaaccccacaacaggacttaattaacctcgccttcaaggtgtacaataatagagaagaggcagccaagtggcaacatatttctgagttgcaattacttgcctccactatgagagaagccccagccacatctccagcacacaagaacttcaaaatgcctgaactgcagtggccaggtgttcctccaggacctcctcccccaggatcttgcttcaagtgctagaaatctggccactgggccaaggaatgcctgcagcccgggattcctcctaagccatgtcccatctgtgcgggaccccactggaaaccggactgtccaactcgcccagcagccactcccagagcccctggaattctggcccaaggctctctgactgactccttcccagatcttcttggcttagtggctgaagactgacgtggctcaattatctcagaagcctcctggaccatcacagatgctttcggtaactcttacagtggagggtaagtccatccccttcttgatcaatatggaggccacccactccacattaccttcttttcaagggcctgtttctcttgcctccataactgttgtgcatattgatggccaggcttttaaaactccccaactctggtgccaacttggacaacattttttatgcactcctttttagttatccccacctgcccacctcccttattaggttgagacattttaactaaattatctgcttccctgactattcctgggctacagtcacacctattcccacccttttccccagttcacatactcctcttctgtctccctaccttaatccacaagtataggatacctgtgctccttccttggtgaccgatcatgcaccccttaccatccctttaaaacctaatcacccttactcctctcaatgccagtatgccatcccacaacaggctttgaggggactaaagcctgttatcacttgcctgttacagcatggccttttaaagcctacaagctctccttacaattctcccattttacttgtccaaaaactggacaagtcttacaggttagttcaggatctgcaccttatcaaccaaattgttttgcctatccactctgtggtgcccaacccgtacacccttttgtcctcaataaattcctccacagctcactattctgttcttgatcttaaagatgcttttttcactattcccctgcacctgtcatcccagcctctctttgcttttacctggactgatcctgacacccatcagcctcagcaacttacctgggctgtactgccacaaggcttcagggacagcccccattacttcagtcaagccctttctcatgatctactttctttctgtccatctgcttctcaccttattcaatattttgatgaccttctactttatagcccctcctacaaatcttctcaacgggacaccctcctgttcctccaatatctgttctcaaaaggatatcatgtatccccctccaaagcccaaatttcttcctcatctgttacctatctcagcataattcttcatgaaaacacacgtgctctccttgctgattgtgtccagctgatctctcaaaccccagtccccaccaccaaacaacaactcctttccttcttaggcactgttggatatttccgattctggatatcaggcgtcgctatcctgacgaaaccactttacaagctcagaaagggcaacttaactgatcccatagaccctaagtcttttccccattcttcttttcactctctcaaaaacgccctggagaccgcttccacactagcactccccgactcgtcccattctttttccttacacacagctgaaatacaaggctgtgctgccagagtcctcacacaggagccaggcccgtgacctgctgcctttctatcaaaacaacttgacctcccaattctggggtggccctcatgtgtgcatgcagcagcagccacagctttaatacttctggaagccctcaaaattacaagctatgctccacttactctctactgttcctgtaactttccaaatctattctcctcctcacgcttgacacgtatactttctgtgccccagctccttcaactgtactcactatttgttgagtctcccacaattaccattgttcctagtccagacttcaatccagcctctcatcttattcctgatactgcatctgagccccatgactgtatccctctaatccacgtggcattctccccttttccccatattttcctctttcctgttccctacccagaccacacttggtttattgatggtagttcttccaggtccaatcgccaatcactggcaaaggcaggctatgctatagtatcttccacatctatcattgaggctacaggcctgcccccttctgctacctctcaacaagctgaaatcattgccttaactcgagccctcattcttgcaaaggaactacgtgtcaatatctataccaattccaggtatgccttccacatccttcaccaccatgctgttatatgggcagaaagaagtttcctcactacacaagggtcctccatcattaatgcctccttaataaaacctcttcttaaagctgctctacttccaagaaaactgaggccattcactgtaaaggccaacaaaaggcatcagatcccatcactcagggcaatgcttatgctaataaggtagctaaacaagcagctggcgtttcaacttctgtccctcatggccagtttttctccttctcatcttttcactttacatttccagtttcgccttacacaaggtctcttcttcccctgtggctcctcccctacatgtgtctacctgttaattagacaggcacatgcacactagttttccttacccccaaaaatcaacttgcaaatgggacccaagagcttcctgttcccctcatgacaccaacacttcactactattttgttttgtttttcttattattaatataagaagacaggaatatgcccttgacttactcactgctgaaaaagggggactctgtatatttttaaatgaagagtgttgtttctaccaaaatcactctggcctagtatatgacaacataaaaaaaactcaaggatagcgcccaaaaactcaccaaccaagcaaataattatgctgaacccccttaggcactctctaattggatgtcctgagccctcccaatttttagtcctttaatacatgcttttctccttctcttatttagaccttgtgtcttctgatcagtttctcaattcatacaaaactgcattcaggccatcatcaatcattctgtatgacaaatgctccttctaacaaccccacaatatcacccttgatgcccaaatctttcttcagtttaatctctcccactctaggttcccatgctgcccctaatcccacttgaagcagccctgagaaacattgcccattatctctccataccaccccccaaaatttttgccgctccaacacctcaccactattttgttttgtttttcttattaatataagaagacaggaaatgtcagacctctgagcccaagcctgcaagtatacatccagatggcctgaagcaactgaagaaccacaaaagaagtgaaaatagccagttcctgccttaactgatgacattccaccattgtgatttgttcctgccccaccttaactgatcaattaaccttgtgacattccttctcctagacaatgagtctcagaacctccccactgagcaccttgtaacccctgcccctgcctgcaagagaataacccactttgactgtaattttccactacctacccaaatcttataaaactgccccaccccatctccctttgctgactcctttttcggactcagtctgcctgcacccaggtgattaaaaagctttattgctcacacaaagcctgtttggtggtctcttcacatggacgcacatgacaggagcagagatatatgaagatgct

SEQ ID NO: 94833 - DNA, 26755 bp, Homo sapiens
  misc_feature (1)...(26755): n = A,T,C or G
ttttttttttttttttttttgagacagagttttactctcgttgcccaggctggagtgcaatggcataatcttggctcactgcaacctccaccttcagggttcaagcgattctcctgtctcagcctcctgagtagctgggactacaggcatgcgccaccacgcccggctaattttgtagttttagtagaggcgaggtttctccatgttgctcaggctggtcttgaactcgtgagctcaggtgatccaccctcctccacctcccaaagtgctgggattacaggtatgagccaccgtacccggcctttttgttttgttttgtttttgtttttgtttttgtcttgagacggtgttttactctgttgcccaggctggagtgcaatggcatgatcactgctcactgcaacctccgcctcccaggttcaagcaattctctggcctcatccttctgagtagcggcgattacaggcgcccagaaccactctctgctaatttctgtattttttagtagagatggggtttcaccatgttggccaggctggtctcgaactcctgactgcccacctcggcctcccaaagtgctgggattaaaggcatgagccagggcacttggccacccttctccttgatggacccccgccaagtgaatttgtgcccacactagaggtctcgtttaaattaatcatcttggccgggcgtggtggctcacgcctgtaatcctcccactttgggaggctgaggctggcagatcacttgaggtcaggagttggaaatatgcctggtcaacatggtgaaaccccgtctctactaaaaatacaaaaaaattagcagggcgtggtagtggatgccagtaataccagctactcgggaggctgaggcaggagaatcgctggaacccgggaggcagaggttgcagtgagctgagatcgtgccattgcactccagcctggaagacacagtgacgctgcatctcaaaaaaaaaaaaaattaattaattagttaatcatctgttggctgggtgcggtggctcacgcctgtaatcccagcactttgggaggctgaggtggcggagttggaggtcagcctggccaacatggtgaaaacccacctctactgaaagtgcaaaaagtagctgggcatggtagtgggcacctgtaatcccagctactcgggaggctgaggcttgaatcacttgaaccagggaggcagagtttgcagtgagccgacacggtgccactgcactgcagcttgggcgacagagtgagactccatctccaaaaaaattaattaattaattaactaatcatctgttgaaaaggacctgtctccaaatacaaccacacattgaggtagaggggttagggcttcagtatattgatttttgggagaaacagggcaacatggcaacaagccacagtcactgtgggcgggcctgagtggggagtgcaggggttcctgtcctgtgtgtctgtctcacaggggagtcctgacctgaccctcacagcccctccacccagaccttcctgcatgttccacccagcccaccctcctgcacccaagagcacccagccctcccttctgctcatgcccctcccttctcaaatccctcccagcagtgcagctctgggctaggacacagcctagggaacgtgactgagaaagagccaagaaaacttgatcagtgatcaagttggtgtttaagtaagattttcaataaaaagtagaattgggtactacatggaggcttgagatgctcagagcttttcgagaaagcagaacagaaagtagaagggcaaccaggaaccagaggtgccagagaactggaagcgcgggccctccgaggagacagggagtgggcacctgggtcttgggcctgtcgacaaaaagagtcaaactctgtaaaatatttgaagagacgtattctgagccaaatacgagtgaccatggcccgtaacacagggctcaggaggtcctgagaatgtgtgtgtgctcaaggtggtgtgggtgcggcatgactccccagaccccttagataggaatttggttttatatattttagagaagcatcagctatcaatcaaacacatttaagaaatacagaagctgagcgtggtggctcacgcctgtaatcccagcattctgggagactgaggcagatggatcatgaggtcgggaattctagaccagcctggccaacatggtgaaaccccgtctctactaaaaatacaaaaaattagccaggtgtggtgctgggcacctgtaatcacagctactcgggagactgaggcaggagaatcacttgaacccaggaggcagaggttgcagtgagccaagatcacgccactgcactccagtctgggcgacacagcaagactccgtctcaaaaaaaagaaaagaaatacttcggattgctccagaaaggtcggacggctcaaagtgagggcaggagtgctggggggcttccaggctacaggtaaatttaaacattttctggttgacaattggttgagtttgtctagagacctggcatccatagaaaggaaacgttcaggttaagataaaagattgtggagatcaaggttcttttgaagtctcatagtggctgcccttagagacaatagatgacaaatgtttcccattcaggcctttaaaaggtgcaattagttcatctgtttaggaccgggagggcctagaagaaaaagatccagctatgttaatagagattctttacagatacaaattttgccccacaaaggacaactttgcagggccatttcaagatatggcaaagaaacatgttttggggtaaaatattttgtctttttactttgtcacataatgttgtgcctgagtcagattggaaagtaactcacaatatatagggttaaataaaacccatgtgggccgggcgcagtggctcatgtctgtaatcccagcactttgagaggcctaggtgggtggatcacctgaggtcagcagttcaagaccagcctggccaacatggtgaaaccctgtctctactaaaaatacaaaaattatccaggtgtggtggcgggcacctataatcccagctacttgggaggctgagacaggagaatcgcttgaacccgggaggcgaaggttgcagtgagccgagaccacaccattgcactccagcctgggcaagaagagtgaaactcggcctccattaaaatacaataggaaaaaaaaaaaaaaaaatagaacccctctgatgaggatgtacgggttgtaaggcatgactccccagaccccttagataggattttgggcaagattaaataaaaacaaatcagagcttagtccaaaggcctatgaactaaaaataaagtctttagcccccaccgatcccccccaactttggcccccagtggccaggggtatctcagaaaaaccttaaaactgagttcccagccatgatgggaggggaggtcaggcacgcctcattatcaccccgcccttttgcagtttagacacaactgaccagcagtaatgttaaaacagaatcataagatgggcagaaccagaacagactcttcatggcaatcagataccaaatcacaaccaggacctcaggccgtgccaggcaagggtgagatcacacaccccacacttaaacagtcaactctgttctgcctgccccaaggttttttttttttttttttttttgctctagcagctaaacaagcactgcctccagataaagatgaaaacaatcacagctcacccagcgcccggacgcggagcaacagagcccctgctccacagccctaattccaggtttccctggacaagagactgatttcagtaactttctccagatcggaagaccacggaccacggactagttctgaatggtttacagacctggcaaattttggtgccttcatgtcctgaaaggaccttttgacatacaggcttaattgtggtacatttaaatgttgtctccaccgcaatgtgaggacggattatacggttgctttttttttttttagatttttgtttgtttgttttttgttttgagatggagtctcactctgtctcccaggctggagggcagtggcgcgatctcggcccactgcaacctctgccttctgggttcaactgattctcctgcctcagcctcccgagtagctgggatttcaggcacgtgccaccacacccggctaatttttgtagttttagtagagaccaggtctcaccatgttggccaggttggtctcgaactcctcactgtcatgcgtgtctgtacagaaaaccacctaaacaggctttgtgtaagcaataacgccatttattcacttgggtgcaagtgggctgagtctgaaaagagagtcagcgaagggagataagagaggggcagctttataggacttgggtaggtggtggaaagttacagtcgaaggtggtcatctgttgtcagcaggggagggggtcaccaggtgcatggtgggagaccatgagacccattgtccagaagaagaatgtcataaggtcgattgatcagttagggtagggcaggaacaagtcctaatggtggaatgtcttaaggttggttaatcagttaagggagaaactggctgtttcacttcttttgtgtttttttggctgctccagacttcttggctgctgcaggccatctggatgtatatgtgcagttcacaggggtcacaatggcttagctccggctcagaggcctgacactgacctcagatgatccacctgcctcggcctcccaaaatgctgggattacaggcgtgagccactgtgcctgcctgggatcatatgttacacgcatgtttgttcaataagcatggagtgcagccacccacatgaatattcatagctcctcctatagcctgttgaatatgtatgtttagccaaccccttcagcataaagctcctgccccaacccctcctgcttctaaatgtctgtctctggtgtttcccagaggctgctcttcccaggctgcgggatggctaccttgctgcctgtcacccttaacaagaaataaaatctcctttccaaatttatacattgtggccaggcgcggtggctcacacctgtaatcccggcactttggtacgccaaggcgggcggatctcctcagatcgggagttcgagatcagctgaccaacatggagaaaccctgtctctactaaaaatacaaaaattagccaggcatagtggtgggcggctgtaagcctgaccaacatggagaaacactgtctctactaagaatacaaaaattagcctaggcgtaggggtgggtgcctgtaatcgcagttacatgggaggctgaggcaggagaatcttttgaacctgggaggcaaaggttgcggtgagctgagattacgccactgtactccagcctgggtaacagagcaagtctccgtctcaaaacaaacaaacaaacaaaaaaacacaaaaaaacaaaagcaaacaaaaaaaccaaatgcatcccttgtgtaatttttaggtcaccgcgccatgggaacacgctaccaggggaagggagctgtgagacgcgcagggaggctccagacaggctggcctgggacaccagccactgctcttccatgacatggggacaagaggaggcgagagctcagcccaccagggaggaactccgggcaggagatggggaagaaggagaagcaggaaggaaagagctcagtgtgggggcgcgcatggcatcccggtgggacatctgaggcccacacccacctgctgtccctccctcccacggtggcctccgagggtgaaggcctggggagaggcagacacctggccctttactctccctccctgtccccatggccgctgggtgggggccgtctctgggatgatccccgagggcaggatccgggagtccctgcggaggcatcagcctgtctgtcttgatggtggagaggaggctccagctgggcgggaccaccaggggaggggcttgtgctctgctggctcagcctggtgtggacccacctcccgggcgctggctgcaatgactttctctttccctttgcaattgccttgggtcctgccgcacagagcggcctgtctttatcagaggtccctctgccagggggagggccccagagaaaaccagaaagagggtgagagactgaggaagataaagcgtcccagggcctcctacaccagcgcctgagcaggaagggggaggggccatgactacgaggccctgggaggtcactttagggagggctgtcctgaaacctggagcctggagcagaaagtgaaaccctggtgctccagacaaagatcttagtcgggactagccggccaaggatgaagcctcacttcaggtaccgctgcccgctctacccgctgggcccctctgctgccccttcctgcctggtggctctgctgggcgtcagccctggcctccccctgccccagccccagccctgggctccctcccctctggctcccctgcccccgccactcccagccaggctctttttcctgctctgtggttgccccactgctgcttctgaataggccgcttccccacctgccccagcccaggtgccctgctgagactctcccccgccaccgaaagtcatggcagggctggtgctcccggccctgggagggtgctccctctgtgttctttccgccattcctgaactctggaactgggagaattgaaccaaaggatgattagagcaatgtggaattttgttcacagtgctttgatggattttctgtaacatttactttgcttaaatascaagtcttaggagagggtgtggggagggaatggtctctgaagcacaagataaatcgtatcttccaaggatgtctccactgtgggcagaggaggatgcagatgaccccaaacacacgctcctcctccactatcagcattcactgtttataaatgacacgagtaacatggaatatagtggcckggtgcggtggctcacacctgtcatcccagcactttggtaggctgaggtgggtggattgcctgaggtcgggagttcgagaccatcctgatcaacatggataaaccctgtctctactaaaaatacaaaattagccgggtgtggtggcgggcgcctataatccagctactccacaggctgagacaggagaatcgcttgaacccaggaggcggaggttgcagtgagccgagatcgccccatcgcactccagcctgggcaacaagagccaaatttcgtctcaaaagaaaaaaaaacaaaaacaaaaaacatggaatatatgggaaaaaaactcaatgatcaggagaaatgctattattttaaaatttagtaagaagagagtctggtccccaatggctccctcctgcaaggctggtgacacagagactggacagggctggtctggtaagaggccccagccccatccgtccccagctctgtggcctgggcaggttaccccatctctctgcgcctctggcacctcctctgtaagatgggaatggcccgtgcgggcctagggcagcctcacatgagctcacatccgcgcagcacttagaagagtggcctgggcctcagaattcggttctaccatgatttaacaatagtaatatacagaggtgaaatgtcagaaggaactggctgaaaggttaaaatctattattttggggtgaatagttttattctctctctcttttttttttttttttttgagatggagtttcgctcttgtagcccaggctggagtgcagtggcacgatctcggctcactacaacctccgcctcccaggttcaagcgattctcctgcctcagcctccacagtggctgggattacaggcacccactaccacgcttggctwwtttttatatttttagtagagactgggttkcaccatgttggtgagactggtctcaaactcctgacctcaagtgatgggcctacctcggcctcccaaagtgctgggattacaggcatgagccataatgtccagccaagaactttgttctcttttgcattttactaatgcgttggagartgggtgggagaaatactgggaaggtggggaatgtactcctggaacgaccagagctggaccctgagctggaagaggtcagcctgcccctgctgcccatgccagcatccccttttcttgctctctccccggtcttcctgcctgggaaggaagcaaaaattctcagggctgtggaggggttggggaggcccagagccatgcagggggctgtgtttagtggacatcagccctgagggctcccrggagcgctctctacattggctggtttctctcttgtgtcttcagaaacacagtggagcgaatgtatcgagacacattctcctacaacttttataatagacccatcctttctcgtcggaataccgtctggctgtgctacgaagtgaaaacaaagggtccctcaaggccccstttggacgcaaagatctttcgaggccaggtaccacccggacttcaatcactttgcaggcaggagctaagccagctgggaaagcaaaccacgcactgataagtgaagtgcccggcggcgggctatccagtgtgtccttctctcccacactttccaagtccgtggccctgaccttcctgctggaccgtcctgggatcggatcgtggagggggtttgcctttgcacaaaaggccttgtgtttttttttttttttttttgagacagagtttcactcttgttgctcaggctggagtgcaatgacgcgatctcggctcacagcaacctctgcctcctgggttcaagcgatgctgtcgcctaagactcccgagtagctgggattacaggtgcccaccaccacgcccagctaattttttttttttttgtatttttagtagagacaggattttaccatattcaccaggctggtctcgaacttctgacctcaggtgatccacctgcctcggcctcccaaagtgttgggattacaggtgtgagccacagcgccggcctaattttaatatttaattaatccaatgtggctaacatattacttcaacattaattaacataaaattcttgacaagataatgaagtttctttttgtcacactgagtctttgaaatgagctgtgtaggccacgcttggtgggtggctcgcgcctgtaatcccagcactttgggaggccgaggtgggtggatcacctgaggttagatgtttgaaaaccagcttggccaacatggtgaaatcccgtctctactaaaaatacaaaaaaaaaattagcccggtgtggtggcagtcgcctgtaatcccagctacttgggaggctgaggcaggagaaccgcttgaacccatgaggcagaggttgtagtgagccgagattgcatcattgcactccagcctgggcaacaagagtgaaactacgtctcaaaacaaaaacaaaaaacaaaaaaagataaatgagcggtgtatggtgtatttttcaggtgcccaggtctttcatcagagccccatttcaagtgctcagtagcccctttggccagtgcgccccaccacatgggacagcgcaggtccagtggcctccccagctgaccgcaggcagggaacaaggcagaccctagagggccaggccacagcaggggctgaggatgcctggtgaatggatgcctgggagaatggatgccagaattcacgcatgaggctctgaacagggctgggaaaacttccaaacgaagggaagctcatgtcttggtgcactttgtgatgatgcttcaacagcaggactgagatggggacatttacaataaacagaaatgtatgggctcgagttctggcctctgggaagtccactgtcaatgcaccagcaactttccagggcctgcgagctgcacagtcacgtgggggtaaaggttgttgccagaagttcaggggatgctccagacagagtggcctgggatgtcgagtcactgctgctccatgccacggggacaagaggaagcagtttagtctgacatactgcccccccagctagagggcaagagacagaaagaggggctgaagtcgcccttgaataaacacgccagtagcacccacaaaggtgcagcccccacagcctcatagcctcttctaggtgccacctcttaaggccattacaatagccattaacactgaacgtgagctttggagcagacaatcactcaaactaaacaggggggatggaggaaaggagcttcaatggcaagatcccctgggctcctgtcctggcccctcctctccctgccccacccctgcactcctcctgctccccctctcagagcatcccctgccccctgctcctctcccaggtgtattcccagcctgagcaccacgcagaaatgtgcttcctctcttggttctgtggcaaccagctgcctgcttacaagtgtttccagatcacctggtttgtatcctggaccccctgcccggactgtgtggcgaagctggccgaattcctgkctgagcaccccaatgtcaccctgaccatctccgccgcccgcctctactactactgggaaagagattaccgaagggcgctctgcaggctgagtcaggcaggggcccgygtgaagattatggacgatgaaggtgagaggtggaggggtcaggggagcgtgagcgggaggaacagcatgaaagatggatggatctgcaatgccatggctgggggtgtcccagggcagcctgcaggggcggggccagcactgacagcaactgacagccaggagaccaggcctgggagcgcgggcccagggtcagggcagagcctgactgcttcctgcctcttcgtctcagaatttgcatactgctgggaaaactttgtgtacagtgaaggtcagccattcatgccttggtacaaattcgatgacaattatgcattcctgcaccgcacgctaaaggagattctcaggtgagggtctccctctggcctcatcgtctgtctcctctcgcctcctgctcatcctcctgaggcctcccctggccaggccctcctgccctccgtcctgccccctgcctgccctcatggttacacccctcacccacactccttgtgctccttccccttcttgcctcctccctctttcctgggcccctcctatgagtgagaggccccttctgcctccagagcaacctccatccaccttcgaggccgccctccccacagcctgggatccccaacctggctccttccatctccctggcataatcgaatttgtcataaaactggacgtaagtgggcatgaatattcacaaggccgacagccagaagctttgagcaacatccttcaaggccgacctgagtccctgagaaggagcagcctctgtggaaacttcaggcttcgactgccatagaagatgcccccgggccgggtgcccacagggcaggcatttattttctcacagatctggaggctgcaagtccaaggtggaggggtgggcggggttgtgtcttctgcagctgctcctcttggctggcagggggtcccttccagccctgtcctctctggcctttcctctgtgcacctgcacccctggggtctctctgcctctaaatgtcctcctcgtttatggaccccagtcagacaggattagggcccaccctaagggccatgagttaatttaatcaccactttagtggacctgtctccaaatacagttatcctgtgaggaggtggggatgagggtttcaacatatcaatgtggggaagatacaatttagtccatgacaatgggtcaagcttgsgtggggcatgcaggggtccctgttctgtgtgtctgtctcccaggcgagtcctgccctgactctcacagcccctccctccagaccttgctgcaccctgggccccaccccatggcttccccacccaacagcacccagcccggcctctgctcacgcctgtcccttctcaaatctgcccccaacagggatggagatgcagaaagagccaaacaaacactcagtgatcaaggtcccaattgaataagattttttttttttttttgagacactgtctccctctgtcgcccaggctggagtgctatggtgcgatctcggctcactgcaatctctacctcctggttctagcaattctcttgtctcagcctcccaagtacctgggattacaggctcatgccaccacactggctaatttttgtatttttagtagagacggggttttgcaatgttggccaggtgttgagtaagattttgcaaaagagtaggcttggataatgggaggcttgagatgccaggagctctccaggaagcacaatagaaaaaggcaaccagagaccagagaggccatagaaagggatctaaggccctcgggagagacgggaactgagcacctgggtcttagaccggaggagcaaactgcmagacagggtggccggggacaccagcctccacccttctgtgacatagggacaagagctcagcctgccagggaacaactctgggcaggagatgtggaaggaaggagctcagtgtgggggcacgcatggcatcctggggggacatctgagggcacccccacccgctattcctccctccaatggtggcctttgaatgtgaaggcaagggggaagcagacacctgcccctcactctccctccctaccacatagctaccgggtggggggcgtccctgggatgattcctgagggcaggatccaggagtccctctggaggtcctcccatccaggtgagaaagcagcataaagtgagacctgcactcagatgggcctgtgaggtcactcacagcgcaggtgtctcctggaacaagggccctggaagataaaatagaacccaagcccaggactaccatcagggccaggacaagcctgccagggagggtgcacatgaagccccagatcagggaccactgcccgctctgcccacggggcctctgctgccccttcctgcctggtggccctgctgggcctcagcctggcctccccctgcccctgccccagcgctagtctctctcccctctggttcctctgctgctcccactaccagccaggctctttgccctgctatgtggtcgcccctttacagcttctgaatgggccatctcccccacctgccccagcccaggccccctgctgagactctcccccgaaagtcacccctttgctattgctccccgccctgggatggtgctccctctctgtgcttctcgccattcctgagctcaggaactgagaaaattgaaccaaaggatgattggagcaatcaggcattttgttctcagcacttccatggaatttctgcaagatttactttgtttcaacacaaagtcttaggagaggatgtgggggagggaatggtctctgtaccagaaaataagtcacttcttccaaagatgcctccactgtgaacagaggaggatgcacatgactccagacacaggctcctcctccgtgagcaccattcaccttttagaatgaaacctgcaacatggagtgtaggaaaaaatatgatgatcaggagaaatgctcttattttaaagtttagtaagaagagagtccggttcccaacagctccctsctgcagggcctgtgatgcagaggctggacagggctggcccggaaaggggccccagctccatccatccccatctctgtggcctgggcaggttaccccgcctctctgtgcctctggcacctcgtctgtaaaatagtgatggccccctgcaggcctcaggcacataccatgagctcagaccctcacagcacttaggagagtggcctaggctggccgggcacagtgactcacgcctgtcatcccagcactttgggaggctgagtcgggcagatcacaaggtcaggagttcaagaccagcctggccaacatggtgaaacccagtctctactaaaaatacaaaaactaggtctggccgcgatggctcacacctgtaatcccagcactttgggaggcaggcgggcagatcacaaggtcaggagttcaagaccatcctggctaacatgatgaaaccccatctctactaaaaatacaaaaaattagccgggtgttgtggcacgtgcctgcagtcccagctagttgggaggctgaggcaggagaatcgcttgaaaccaagaggcagaggttgcagtgagccgagattgtgccactgcactccagcctggcgacagactgagaccccgtataaaaataaataaataaataaaagtacaaaaatcagccggacgtggtgacacaagctcgtaatcccagctactcaggaggctgaggcaggagaatcacttcaacccgggaggtgcaggttgcagtaagctgagatcgcgccactgcactccagcctgggcagcagagggagactatgtcccaaacaaaaacaaaaacaaaaaaaaaaagagtagcctgggcctgggaattcggtgtgataccaacgtaaaaagaatcatcatcatcggacaggtgaaatgtgaggaaggaattgagctgaaatgttcaagcaattattttagggcgaagagttttattgtctgttgcatyttcctaatgggttgggagacgtgtggcagaaaaactgggaggttgagggtgtcccattggtaggcccagagctgtggttccagctgggagaggtcaccccggcccttctgcccctgccagcatcccctcctctttctctctcccagtctttctrcctgggaaagcagcagacattcccagggctgtccagtgagtggtgttcagtgggcatcagctccnaggaatccaggggggtctctgcattggggtttctctattgtgccttcagaaacccratggaggcaatgtatccacacatattctacttccactttaaaaacctacgcaaagcctatggtcggaacgaaagctggctgtgcttcaccatggaagttgtaaagcaccactcacctrtctcctggaagaggggcgtcttccgaaaccaggtagcaccaaagtcctatttacaccccaaataggagctaagcagctaggaatgcagaaaacacaataagtgacgtgcctggcgtgggctttcctgtgtgtactttcctcttacatttcttttttttttttttttttgagacagagtctcactcagtcacccaggctggagtgcaatggcgtgatctctgctcactgcaacctctgcctcctgggttcaagcaattcttctgtctcagcctcctgagtagctgggattacaggtgcccaccaccacacccagctaatttttattccatttttagtagagacggggtttcaccgtggtgaccaggctggtttcgaattcctgacctcaagygatccgccccsctyggcctcccaamgtkctaggattacaggcatgagccaccacgcccaacttcctcccacattttttaagtccgtggcccagatcttcctccctaactttcctgggatcagattgtcgaggggttttgcctcttaccaaaaggccttgtttagcgcccagcgccctcactcttgactttgtttcccaaaatcttgtcatggagctgtgcgtccggcagtcctcgggaaacagcagctgtgggaagcggtgggtctggtgtccagcactgtgcctgggccagtcactgtgggctggtggggccgcccccgccactgccctgattcctcgatgtcaaggacacatcctcacagggtggtgaaccctcgctcctcaccctgccgcccccacagcagccactgacctcccacccaccctgycgtgtcccacccaaccctgcggccccctcctcccaggcaggagattttttcagagtgtgtttggggagggagccgtctgtgtgctgggcaggcctggcctacagcagtgctggcctcggaaacacccaggactcaggatggaagcgcaagtgtttccagtccccacacgctaaaaaggcgacaagaacttgtggaagaaattttagtgtctgcattagctcaattatctcacataggatttcaacatatacttaatataaaatgcctcatgagagagttaaagtttgtctattctcacaatgagattttgaaatgcgctgtgtattttacacgtgccaacgtttctaatcagagccccatttcaagtgctcagtagcccctttggccaaccttcaactccatgggacaatgtgggtccaatgaccttcccagcagaaggcagacrggggacaaggcagaccccataggaccaggccacagcaggggctgaggatgcccggttaacggatgcctggggaacaggatgccagaaatcacacatgacctatgatgagacaggaaaagactcaataaaataaagaaggaaggggccgagtgcagtggctcacgcctgtaatcccagcacttagcgaggctgaggcgggcggatcatgaggtcaggagtttgacaccagcctgcctaacatggtgaaatcccatcactactaaaactacaaaaattagccaggcgtgggggtgtgcccctgtagtcccagctacttgggtggcttaggcaggaaaatcgcctgaacccaggaggcagaggttgcagtgagccgagatcttgccactgccccccagcctgggtgacagagcaagactctgtcactcaaaaagataaagaggaacggccaggygcagtggttcacgcctgtaatctcagcactttgggaggccaaggcgggggatcacgaggtcaggagcttgaaaccatgctcgctaactcggtgaaaccccatctctactaaaaatacaaaaaattagccaggcgtggtggcgggcgccygtagtcccagctacttgggaggctgaggcaggagaatggcgtgaaccccggaggcggagcttgcagtgagcggagatcgcgccactgcactacagcatgggtgacagagcgagactcagtatcaaaaaaaaaaaaaaagaaagaaaaagaaaagaaaaaataaagagcaaggagaaggatggaagaagggaaattcaatgagtaaaaagccctggggcctagtatgtacccaaaaaaatgagaagtaaagaaaataaggccatgcatgtggtttatgctcatagtcgcagagttttgggagggtgaggcaggaggatggcttgagcccaagagttcgagatcagcctgagcaacatggtgaaacccastctctacaaaaattacaaaaaaattaggcaggcgtggtggcacgcacctgcagtcccagctaatcaggaggctgaggtgggaagattccttgagcctgggaggtcaaggctgcagtcagccccagatcgcaccactgcaccccagcctgggcaacaggagagaccctgtctcaaaaataaataaggaaacgccctggggctccaggcccgccctctgctcccatcgccccacccctgcactcctcctgctcctagtctgagctcccctgccctcctcctcctccttccccaggtggatcctgagacccattgtcatgcagaaaggtgcttcctctcttggttctgtgacgacatactgtctcctaacacaaactacgaggtcacctggtacacatcttggagcccttgcccagagtgtgcaggggaggtggccgagttcctggccaggcacagcaacgtgaatctcaccatcttcaccgcccgcctctactacttctgggatacagattaccaggaggggctccgcagcctgagtcaggaaggggcctcygtggagatcatgggctacaaaggtgagacgttggggggctgaggagagtgggtgcgggagggacagcatgaggggcaggtgtgtctgcaatgccgtggggcggggcagtgtcccgggaagcctgcaggratggcgccagtgtccactgcaactggcagtcaggagacctgggcttggaggggagggcccagggctgggagagaagcctgctgggccctcactgctttctccttgttttttctcagattttaaatattgttgggaaaactttgtgtacartgatgatgagccattcaagccttggaaaggactaaaatacaactttctattcctggacagcaagctgcaggagattctcgagtgaggggtctcccmgggcctcatggtctgtctcctctagcctcctgctcatgytgtgcaggcctcccctccatcctggaccagctgtgcttttgcctggtcatcctgagcccctcctggcctcagggccattccatagtgctcccctgcctcaccacctcctctccgctctcccaggctcttcctgcagaggcctctttctgcctccatggctatccatccacccaccaagaccctgttccctgagcctgcatgcccctaacctgccttttcccatctccccagcataacctaattttttttttttttttttgagacggaatttcgctctgtcacccagactggagtgcaatggcttgatcttggctcactgcaaactctgcctaccaggttcaagcgattctcctgcctccgcctcccgagtagctggaattacagacgcctgccaccacgcacagctaactttttttttttttgtatttttagtagtgactgggtttcaccatgttggccaggctggtcttgaactcctgacctcaggtgatccgcctatctcagcctcccaaagtgctgggattacaggcgtgagccactggcccggcggcacaaccaaatcttattaaactcaccctaggctggccgcggtgactcatgcctataatcccccagcaatttgggaggcagaggtgagagaatcgcttgagcccaggaattcgagaccagcctgggccacatgacaaagccccatctctacaaaaaaattacaaaaaaaaaaaaaacaggtgtggtggcatgcacctgtagttkaagctacttggaaggatgaagtgggaggattgcttgagccggggaggtggaggctgcagtgaactgagatcacgtcactgaactccagtctgagcaacagatcgagaccctgcctgaaaataaatcaataaataaactcaaccgaaatgggyatgaaagttgaaatgggtatgtaagttgaaaaccagaagttttgagaaacatcctttgttaactttcatcctacaaattgggtcattcatgtcctacgcagctaaaacagagcccaggagccagggaggaaaagcagtcaggccacacaccattgctcccaaaatggacttctctgcaagcctgactcctgaaactgtgcattgtaccctgaaaccagctttatccatagcttctgcaataaatggctgtaagtcttggactccttgctataatcgcagctattcagcaatggaacctcccagttcccaacccttcctagtgcccatgggctttcccataggacaagagaacatttctccttttctttttttttttctttgaaatggagtctcgccctgtcacccaggctggagtgcaatggtgcggtctcggctcactgcaacctctgcctcccttgttcaagtgattctcctgtctcagcctcccgagtagctgggattacaggcgtccaccaccaaaccaggctaatttttgtatttttcataaaaacgggtttcatcatgtttcccaggctggtcttatttttattttattttttgagatggagtcttgctctgttgcccaggctggggtgcagtggtgcaatctgggttcactgcagcctctgccgcctgagttcaagctattttcctacctaagcctcccaagtagctgggattacatgcgcgtgccaccacgcctagctaatttttgtgtttttagtagagacggggtttcaacatcttgaccaggctggtcttgaactcctgacctcgtgatccacccgtctcggcctcccaaagtgctgggattacaggcgtgagccacctggscaggcttaggctggtcttaaactcctgacctcaagtgatccaacctccttggcctcccaaattgctgggattgctggtgtgagccacagcgcctagcccatttctccttttaataggacctgttgctgtctctgttctcccaacatggtraacaccacccggactgcgtgtatgtcccaaattacaattctttctttgcaaatgaaatgtgaaatttagaggcccttctccacactttaaatttgacttgacattttctaggcagatataagttattagagaatgagattctctataaaaatgatcccttcatgctgtggcctccacagaagatgccctgggccaggtgcccacatgaataatgcgggccacaggcaggcatttattttctcacagatatggaggctacaagtccaaggtggaggggtcggcggggttgtttgctctgaggccgctcctcctggatggcagggatcccttctggctgtgtcctctgtggcctttcctctatgaacctgtactgtacctctggggtctctctgcttccaaatatcttttttttttttttcagacagttttgctcttgttttctaggctggagtgcaatggcacaatctcagctcactgcaacctctgccttccgagttcaagcgattctcgtgcctcagcctcctgagtagctgggactacaggcgtgtgccaccacgcctggctaattttgtagttttagtagagacggggtttctccatgttgctcaggctggtcttgaactcatgagctcaggcgatccactctcctcagcctcccaaagtgctgggattacagatataagccaccatacacaacttttttttttttttgagatggagtttcactctgttgcccaggctggagtgctaaatagcagaatcactgctcactgcaacctctgcctgctgggttcaagcaattctcccacctcagcctcctgagtagctgggattacagatgcccagaaccaatctctgctaatttttctattttttagtagagatggggtttcactgaggaaggagaccacctctctcattgtctcctatttcagaaggaagcaaaaagttagaaagatgcagaagtaagatcaatggccagactgtttggcgctgctacctgggcctggtagttaaagatcaactcctgacctgaccgcttgttttatctaaagattccagacattgtatgaggaagcattgtgaaactttctggtctgttctgctagcccccaccactgatgcatgtagccccccagtcacgtagcccacgcttgcacaatctatcacgaccctttcacgtggaccccttagaattgtaagcccttaaaagggccagggacttcttcagggagctccaatcttcagatgcaagtctgtcaacgctcccagctgattaaagcctcttccttcctaaaactggtgtctgagaggttttgtctgcaaccgttcctgctacatcaccatgtacattccaggcgaggctggtctcgaattcctgacgcccacctctgcctcctaaagtgctgggattaaaggcatgagccatggcacctggtcgaccttctcctttatggaccccagacaaattaatttgtgcccacactagaggtctcatttaaattaatcatcttggtcgggcgtggtggctcacgcctgtaatcctagcactttgggaggctaaggcaggcagatcacttgaggtcagtgtcacacgtgtccatgtgaagagaccaccaacaggttttgtgtgagcaacaaggctgtttatttcacctgggtgcaggtgggctgaaccagaaaaaggagtcagcaaagggtggtgggattatcattagttcttacaggtttgggataaacctatcccaaacctataagtgtacattcttaaaggcatacaaagtacattcttaagtgtgggggagaatattacaaagtaccttcttaagggcaggggagactatatggtatcagttggggtggggcaggaacaaatcacaatggtggaatgtcatcagttaaggctattttcgcttttttttgtggatcttcagttgtttcaggccatctggatgtatacatgcaggtcacaggggatatgatggcttagcttgggctcagaggccagacattcctgtcttcttatatgaataagaaaaaacaaaatagtggtgaagtgttggggtggcgaaaattttggggggtggtatggagagataatgggcgatgtttctcatggctgcttcaagcgggattaggggcagcgtgggaacctgtggtgggagagattaagctgaagaaagattttggggtaaggtgatattttggagttgttagaaggagcatttgtcgtatagaattattggtgatggcctggatgcggttttgtatgaattaagaaactaaacggaagacacaaggtctgaataaaagaaggagaaaaataggttggtttttttttttttttttttttttttgagacagagtctcgctctgttgcccaggctggagtgcagtggcacgatctcggctcactgcaacctctgcctccctggttcagacgattctcctgcctcagcttcctgagtagctgggactacaggtgcacgccaccacgcccgactaatttttttgtatttttagtagagaagggggtttcaccatgttagccagatggtctcaatctcatgacctcgtgatccgtccacctcagcctcccaaagtgctgggattacaggcatgagccaccacacccagccagaaaaataggtattaaaggactaagaattgggagtacccagaacatctaattagacagtgtccaagggggttcaacataattatttgcttggttggtgagtttttggcctctatccttgaatttttttatgttgtcatatacctgtccagattgatttaggtaaaaacaacactcttcgtttaaaaatatacagagtcctcttttttttagcagtgagtaagtcgatgcctcggcaattttggaggaaagagaaatgcaaagccagcaattgttcatttaagaaggattagaaatggctaagagagagtttgatagtgtggtggagatagctggggagaggtagagggtagcataagaacggaaccagaataagagtgagtataaaagtaaagaataggacttcatcagggtgaaagtactggagggtaccttgccactgaagatcttctatcgacttcaagagcgacttaagggtggtgatttgaagtaaaaccaggagcctccaaataccaagagcctgagaaccttcttgggtgatttgactaataaaggccggtgcgttatcagactgtatagaggtgggaaggacaaacccaggaattctgtctaaaagaaaggaagaaatgatcacggtggacttctcagaccctgtgggaaaggcctctacccatccagtgaaagtgtctacacagaccaagaggtattttagtttcctgactcagggcatgtgagtagtcaatttgccagtcctgggcagggccaaatcccagagcttgatgtgtagggaagggagggggcctgaacaatccctgaggagtaatagaatagcagatggaacactgagaagtgatttccttgaggatagatttccacaatggaaaggaaatgagaggttctaagaggcaggctagtggcatgtaacctacatggaagaggttatgaaaggacgacagaatagactgggcctgtgaggctggaaggagatatttttcttggtccaagaaccatttgccttgtgtgggaagagattgataggtggaagtttcggtgggggagtaggtgggagtgactgatgagaaggagaaaaaccggccatgagggacagaagttggaatgctagctgcttctttagcattgccctgagcgatgggatccgatgccttttgatggcccttgcagtgaatgactccagcttcctttggaagtaaagcagctttaagaagactttttattaaggaggcattgatgatggaggacccttgcgtagtgaggaaacctctttctgcccatataacagcatggtggtacaggatatggaaggcatatttagagtcagtataaatattgatgtgtagtccctttgcaagagtgagggcctgagttaaggcaatgagtttggcttgctgagaagtagtggagtggggcagagtggtagcctcaaggataaatatggaagatactatagcatagcctgcctttgctggtgagtggcaattaggcctgatggaactgccatcaataaaccaagtgtgatcagggtgaggaacaggaaagaaggaaatatggggaaatggagtgaatgccaggtgtatcagagagatacagtcatgggtgtcaagtgtggtatcaggaataatgtgggaggccagattgaagtctgggccaggaacaatggtaattttgggagactcaacaaagagtgagtatagctgaaggagccggagagcagaaagtatatgcatcaggtgtgaggaagaaaatagattttggaagttataagaactgtagagagtgagttgagcacagtttgtgatttcaagggcctctaaaagtattaaggcagtggcagctgctgcacagagacatgatggccagcctaaaacagtaaggtcaagttgtttggacaaaaaggctacagggcacagtagccttgtgtaggaatcctggtccttgtgtaaaaattccgactgcacagccctgtactttggctgtgtgtaatgaaaagggttgggatgagtcagggagagctagtgtgggagcagtctctaaagctgtcttcaaggaacggaaagaggagtagggaaaggatttaggatctatggggtcagctaggtttccctttatgagtttacattaggttttgttagtacggcaaaaccaggtatccaaagatgaaagtatccaaccatgcccaggaaggaaagaagttgtttttttgtagaaggggttggagtttgagagattagccagacatgattggcagggagaacatgcatgttttcatgaagaattatgctgaggtaggtaacggatggggaagaaatttgagctttggaggggggatacctgatatcctctggagaataaatgttgaaggagcaggagggtatcttactgagaagactcaaaggagggactacaaagtaaaaggtcatccatgtattgaataaggtgggaagcagaggggtggaaagaaagtaaatcacgagaaagggcttggctgaagtaatgagggctgtccctgaagccttgtggcactatagcccaggtaagctgctgggactgacgtgtgtcagggtcagtccaggtaaaagcaaagagaggctgggatgaagggtgcaaaggaatagtaaagaaaccatgtttgagatccaggacagaataatgggttgtggagggaggtattgaggataggagagtatatggatttggcaccatagggtggataggcaagacaatgtggttgataaggcacagatcctgaactaacctataaggcttgtccagtttttgcacaggtaaaaggggggaattgtaaggagagtttataggctttaaaaggccatgctgtaacgggtgagtgataacaggctttaatccttttaaagtgtgctgtgggataggatattggcattgagcagggtaagggtgattaggttttaatgggatggtaaggggtgcatgatcagtcactaaggagggagtagaggtgtcccatacttgtggattaaggtaggaagacacaaggggaggacgtgaaggaggctctgaactggggaaaagggcggcaatgaggtgtggctgtagcccaggagtagtcagggaagaagaaaatttggttaaagtgtcctgacctaataagggagctgggcaggtggggataaataaaaaaagagtgcataaaagaatgttgtccaagttggcgccagagttggggagttaagaatgttgtcccagttggcgccagagttggggagttttaagaggtttagaagcctggctgtcaatacccacaacagttatggaggcaagggaaacaggcctttgaaaagaaggtaatgtggagtgggtagcctccgtattgatcaagaaggggacagacttaccctccactgtaagagttactcaaagcgtccgtgatggtccaggaggcttctgaggcaatcggacagcgtcagtcttcagccactaagccgagaagatccgggaaggagtcagtcagagaaccttgagccagagttcgaggggctctgggactgtctgctgggcgagttggacagtccgatttccagtggggtcctgcacaggtggggcatggcttaggaggaatcctgggctgtgggcattccttgccccagtggccagatttctggcacttgaagcaagatcctggggaaggcagtcctggaggaatgcctgacccttgcagtttaggcgttctgaagttcttgtgtgctggagatgtggctggggtttctctcacagaagaggcaagtaatcgcaactcttctctattattgtacaccttgaaggtgaggttaattaagtcctgttgtggggttgagggccagaatccaatttttggagctttttctaatgtcaggagcggattgggtaataaaatgcatattgagaatatgacggccttctggcccctctgggtctagggcggtaaagcatctaagggttgttgccaaacgggccatggactgagcggggttttcatatttgatgaaaaagagcctaaacactaactgatttgggagaggttgggtaaagaaaaaggagcattaaccttg

SEQ ID NO: 94834 - DNA, 24532 bp, Homo sapiens
  misc_feature (1)...(24532): n = A,T,C or G
acacctggctaatttttgtatttttagtggagacacaaggtttcaccatgttggccaggctagtcttgaactcctgacctcaagtgatctgccagtctgcctcccaaagtgctgggattacaggcgtgagccacagcacctggcaagaccaactgatttttaataaaaaataatatgaaacaggacttatactgaagtaccctctaaagttatgacttttattaactttcttcccagtttttattttgtgctaagtggaagcttcagatgactccaagggagtatgaaaattgggaaactttttttttttttttttttgagacggagtctcgctctgtcgcccaggctggagtacagtggcctcatctcggctcattgcaagctccgcctcccgggtgcacgccattctcctgcctcagcctccggagtagctgggactacaggcacctgccaccatgcccggctaattttttgtatttttagtagagacggggtttcaccgtgttagccaggatggtctcgatctcctaacctcgtgatccgcctgtctcggcctcccaaggtgctgggattaaaggcgtgagccaccgcgcccggcgggaaatgtatttttttaatactcagtatctttatatgagaagaaaataattttggatatgaaggcaacttctaatagcactattaagctatcatgaaaagacaacttagaatgtttttcagagggaatattaatctgagaagttctaatttcccataaactatttctgttaaccttcaaaagcgatagtgaggcatttgaacttagttcagaaagaatgtgtcgaaaatcctaggcagtatcgtgaaacacctaataaagaccaaaagaggcaataggccccttttggttggacacagcctacttgccccttgcattaaagttctagctctcaatacaacattgagaataaataaaatacaacaaacttaaagatgctataaaaacaatcaatgagagtcaagtaaatctaactcagattagaaagttaatcaattacccagctagtaggtacctgggacaacttgtggaggtaaagaaaacactggcgagcatcgaataatgagtgttcatttggaaggggaacttaatgaaaaaaaatatgtactaacaaagtgtgtaagtgcttaaagctagaagatatctcgacttaaacacctagtaaaaaaaaaaacgagccatatttaataagaaaaatctgaaacaaatagcaaaaggttcagaaatatttgtctaataaaatttctccccgactccagttgtgaggcacagggattattcagagcgaaagatttgcaaagcctattttgggaaataattgtattcactgatatcaggatttaaaatgtcattrgcactaaaattcattttccaatggaaaacgtaaaagtcaatttttatatctaaaaagaggtaatggatatataaacatgtttatgtgttttagaaataaaaatacttcattaatagaaaaaaattaaatacatttctagtatacttaaatatttagctattcacaagtctttactgctttactccaagaactctagctgaaaagagactaatacagaaatatcaagacatgctgaccacctcagaaagaagcatgcagtggtggttttttcttttttcttcattaaggcatttaattcaatgttcaacatacaacaggtgcttaacaaatatttggtgatatcagtaggtctctttttaaagaaaactgaataaaaaatgatttttttaattattaacccgccttattattactagtaacctgcctttacagaagtttttcttctatacataatccagtatcacacacaaaaaaaactgtaagttaagtctactctataaatacctataacttacattacaggaactcaaaaataacagaaatagacatatgcacacactaacaccgaatgaaggaaaagtgagtctatgccaccatctagtggctgcagaataataaagcacccaaacaagaaagtacccagggatgtagtaccagaatataagcatctagaatttacatgtagagctactgccctcctattcagttgggccagcactggcattacctggcctattcagttgggccagaattgggtctacctgctcgcttctgcataagtctgaccttcgaaaaaaaccaagcgggaacaccatcaagtttcctttgctcacctcatacaattcccaccacatttcaacggatacctatttgttatgaaaggtataaaaatgcatcttcacattcgtcagaccagatgggcaataataaaaaattggtcaggaaaacctcatacattgctattaaacagtctggcactacttagtaaagatgaatatgtacataacttatgaccsagcaattccactcctgggtatgtaatccagagtagtggtttgtaatttccagtacacagatcctgagtgaatctatagatagaattcagagggtctgataagttggatgaataacaattccatctttattggcaacaacttctaactaaaattaaccatttcctttatgaaggtaggcaacaaaccacaatattagcaggacctgtgacttygtaaccaataaatattatagacaatgtcaaattccatttatagttgttgtaaatacataaaaatttcttccacacttatcactacttcaaaattacatcttttacacccactattagatattgttttttagtgccctaataaagaagcatctctatttctttttaaaaagttttttatatttcattattctagttcatttttttcatatttgattttgtattttgattattctagttcacttttttcactgtatttgttttctttgcaaccctatgtatttgttatacatttaaaaacatttgggatccacaggctcacaagattttgaaaggattttaagacacaaaaaaaggttagtaatacctgccctagagaaattcttctggcggaaccaggagacatctacaaataaattcaaacagctttgtttataatagtcagatggacaaaaaaacaaggtattttcatgtaatagaatagcatactaaagggatgtgaattaattattacaactgcattaatgtggttgatttgcaaaagcctaaagttatagctaacagttatgtaacaaaataataaaattagttaataaacaatctaaaacaggcaaaccaaagcaatatactctttagagttatatacaaatgtagttgaattatttcagaaaaatcaatgtaataacacaaaatttgggatcatggttacttgagggaattggaggagagggttgtaagaagaatgtgaccaggaatgaacatgtattgagcttctgagttgctggcaatacccttttgcttaagccttgtggcaagagcacagacattcactttattattcttctttaaagtgtacagatatctcatatacactttcatacctataataaatgtttgatattaccttcttagataggtcatctctgtctatccaatccaaaataactacccagttactctatatcatacgagcctattttaataatctagttttttgataggatttttctagctttgaactgtctatcctttggactatttgtcagaatttcaggatatgcaacaataattttcaaaatatttatcctatacattttccaggcagtttagggatatgctttttaaaatagccacagaacaatattacattttaaattctgtctaaaagctactttccactgcaaatctaaaattaccttaataatcacatatcttttaaaaataaatggtaaactgaactggttttacaattgggcttcaaagtctgtgccacttcgtagcaatgaaactgagaaaattctcttttcagacttcacctttctcacttaaaaaacggagataaagcttaactcacagtatttgaggatatttaaaacctgtgagaaagagaataggagaatattttagctacttagaagcacttaacaatgtttagccatctctcaattgtagccatgaattttgcccctatctgtattttcctcttggaaattcctcttggaagttccctgtatctttctgctggatggatgcagttaatgatgagactagggaatggcaaagccaccgggtagaagcctggctccctaattcactaagtatagaagagctacctgccaactagaaaaacccactttgtattcttataaaaaataaactcctatagtgtttgagtaataatacacttttttgagtgttgatttacaagagctatttaatctaccctaattaatatattattgaaagatactaccaaatgctgagtgttctggccttcttccctcctcagcctcaggaaactggcagcaaggcttttctcacacagataagatactggaagtttcccttccctaacactgactacacagataaataacttgcagataacagtttggggggaggggatacagccttcagtgaaatacccaggtcagatcacctcacagtgaagcccactatttgaagagattcacctgtgcttacagtgcttttaacatgtttttctcactccaaaatatatttttaatgtaaacatcaataaacgcaggaaggaaagtgtattttgagggagtggtatgaagaaacctaaatcctaaatatccaagtcaatagctagaatcctgaccacttttagaattccactagcacctttattcgtatcttactttatttttctttatattatttgacaatccctgatatatttactcttcctttttttatctgtttcctccatcctggatgttccaagaggacgggactttgaattttgctcaattctgtaccccagtttctggaaaagtgcctggaacatggaaggaatttagtaaatatctgttgaataagtaaatggattggcaattacagggtttaaaaaaaaaggtctaagaaaataatttactcatatagatccagtcctgatacagatgatttttttagtcttgcatggttacaaatagatgtctctcttctagaaaaactgaggcaacccttccgaaataactaattttaaaaagtctcccttcctttgaacagacaattccaaagctcttccacaaggcacaaccaatacaacccaggtcatggccctgcaatccctccctagtcctcatgatgtaagcaatattacattaatgtttacaataatgtaattattagcaagaataatgtaaacattaatatagattactgtaaattaatagtgtaattaattactgtaaattaacataagcattattagatgcaggaagacaagtgaatttgggggcagtggcatctatgagacataaatcctcatctgccacagaaggaagtcaacacatactatccataactgaaaatgcaataaacagcagaaaacactacttacttaaaaatacagaaacaagcattaaatgaaacagcttgaaatgttgaaggtggttactctgggaaccaacactcccggactgggaggactagaccagggtatgtttaactttgactttttcatttcaggctcgatgctgccatttctctgagctcgtggaaaatttaatctaaatcttaattaggagccttctaagatggagaacacattcattgcagagaggtcaggctcaaatacacgtctatcacaacatctaaaacttaactcggaaaaaacctccacgattttaaatacaaagcactgcacatgcacgcrctcaacacctctccttctttccccatggtcaacacacccacaacccctgcacatttaccaatctacacaactgagcactggagcgaatgaggtgagtgagggcccagaaagttgaagcaggaacgatccgagccttcagttaatcctaacgtcacctctaacgtttggggtaagaacgtttcaggaaaccaagggggaaccaacgctcagcacagcagagaaagacaccaagctacgggacccgccgcgcctcccgcgccggggtggagctgaccccgccgagccccgccccagcctgcgtctgccaatgatccaggagccgctcctttmcactcgggaaaccttcagaggagtctcagaaaggacacggctggctgcttttctcagcgccgaagccgcgccatgctcgtcctcagaagcgccctgactcgggcgctggcctcacggacgctggcgcctcaggtaccggccacsggggtacccaagccttcacccgacgggaggggaggggcggggcggggagtgttccgggtacgtgcgagcaatgcgcatgcgctctccgccacgcgcgcccagacctggggccccggtgaggttctagcgtgagccccggaaccccaagacaggggtacccggaacgcgcgtgaggaggaggccgctgctakgggaatacccccagccggggtcgtctcgcgggcagtggtggtcagaaggcttttctagcctggatgccacacccaccgggacactcccatggcgccggctgtttsgtttttgctgcccagctatgtcgcggctgcggcccagcgagcgctcccatgttgtcacctggcgctgtggagccgcgggtggagtcgtagctttccaagccaccgccctctctagacatcaggttgaaggagggaattgtcaaccagccgcttgccacggaaccggcctcccccttttaaatgaagcacacaacttccgagcatttcgcggagacccttgaagaggaggcccagggtcccggtggggctggaccctgcccgccacccgcgcttcgtgtggtcgctcccccaaccaggcgggaccggagcctcctatcaaaccggacgatgacagacagactcttttaaccttagatgagaaatggacaaaatggagcttgtgattctgccctaactttcgggagtggcctattctgtggcttcaacctagaaatttcttttccttttcatgtttaggactttactcctttctgaaggggcaggatgggaaggggattaacctgtcctagagacagactgaggagcactaaagaagagcagctcatgtccattcaccccgggttaacaatgcagtttttaccctaatgattctccagtggggcagggccaggaatgacgtccttatggcatgattccaaactttaagtttttagaaatgtccatcagttgttctcttttaagtgaagtggaggtcgttgctggtgggaatgatccctaacttggagataagggaggatggacgactcatgatttctgccctagcagctaaaartcatccctgcaacaaaattcttaactcccatccggctcccccaccatacccggctcccctgcagtcttccttctctggcaccacctgtccacatctctctccctctctcactgtaggttccctactgtatattaatactgcccaaaattgtaaaaatgtgtacctttgatcaactattttatcctccaaatacaaattcctcgaatcaacctgaaatccatttgtcacaaatgccccattggcctatctcctgatatattttattataataattttgaaattatggatactaggcacttgcttcttgaccaacattgttactagagtttggtttaaaagcacaaaaagagtgtccacaaaaggcaggggcagctgcagctgtttttgttggtaggcttagtcatttgagcaataagaatataagtcacacacgaatagaattaactctagataattatcattaagccttatcatacacagttacataattttgtattttgtaaacaaaaatatgtcggagcaaaagcctactgctttcagacagacatactggctagtcagtataagccctaatttgtccatagctttgtaggtatcaaaactgtcttcacagattattctggtgtaatcaacttaaggaaatggcacatgctattcaaacttaagtaagatggatttataagaatatcacgaatgcctgtgtgtataccatgagtgcatrtatatatgtgtgtgtgcgtatgtgtgtgtgtatgtgtatacatatatacacatagatacctacatagaggataatcttaggcgaggtatttcttacagaaagttcaaccagaacacaaattagaaatttacagtgcgtgtatgactattacaaaaggaattaatggttcttaagtgatattttcatcaatgtggtataagtggattcattaaatgttgttcacattgcatctgtaattagaaactaataagaaaattttgactctgaattttcttttctcagcattcatgttctaccattatattacaatgcaattggataggtcagagctttttattgcattagttacattccagtcctaattttggtcagtggtttacttcattgaattaggaaatactttgacctgaactgtaatttccatttttttcaagaacctaaaagagttttcttctagtaaacatttttttcattatgcctgccaaaagttacgtgcrtagttaataaagttctttgatgtgcataactgtaacacgtatgctcttgactaaagatgcaatattggctaataggaaaacttttgtaaatttgttagaatcctaattgtagttcttggataaagaagtatcattaagatctcagcgccttcttatgagcaatttctgaaaaagtggctaaaggtgacagtgaacccccactaggaaacagtaactacacactcagcatatttaagagtagttgtctttattgacacctctatgtaaacaaatgtrtatgtgaagcaggagaatagggtcttgaggcagggaacctaaggacttcctagaactaaatcaaacccttcagctatgacaagaaataccctcttcatttacatagggtgtacacagagtaaatgactttgcaactttacttcatcctcttcatttatatacggcttacaccacatagccmatgggacacctctagagggtactgaaaccctagaaaattctgtaaccagggcccttgagccacttgctcaggcccactcctaccctgtggagtgtgctttcattttcaatagatctctgcttttgttacttcattctttccttgctttgtgcattttgtccagttctttgttcaaacaccaagaacctggacaccctccatcagtaacatattgagaattgacaacagaagtacaaacatgagtaatgagtctatgagtgtcccttgtaccagattcagattaggttttaacacaatataatgaatcctgtcttctcaagatatttacatttgtcttatcttcttcagatgtgctcatcttttgctacgggacccagacaatacgatggaatattctatgaatttcgttcttattaccttaagccctcaaagatgaatgagttcctggaaaattttgagaaaaacgctcatcttcggacagctcactctgaattggttggatactggagtgtagaatttggaggcagaatgaatacagtgtttcatatttggaagtatggtaaagagtcatccaattttggctttcagtatagattttcatttttcagtatagattttcattctgttaaatgtaacataaaacttagttcttggatgyatattattttagatacatacaggttaactaagacttttgaaaagcaataccaaaaaaataaattcagttcttattcttcccagtggtacacctctaaccccttgcttaaacattacattatattacattataaattggaagacatggcatctcatatatcaagcgataaaattgtgaactagactttaaacctcagaaaaatattaaaatggtttgctgtaaagatagttcatgaaaaatttaaagcagcaattgtaaaagtccaagtggattaagatcacaaaaggaaaggagaagtatcttttctctttttgaagctagggggctggatatcagtattttagcagaaataattcaaccatttaagggacttyacaatatggaggtttataggggatgatggttaactttcaatcctcactgaactctgagatttaataattctgttatgtttagagaccacatttgtttcatatctgtacccccagagttttgaggaattcactgtcatactactctagggaggtaaaagaaaaggaatgaaagagagttcttcccgtgttgaaactaacctacgcctggtttagtagaggaaggagaataagttacaagaatgcccagaatgcttgttactccagtgtctacatcaggacttgatgatacctaaagaatttttaataatttcatttagtgtttggtttagggtttttccctgttaatagaaaaagccccattaaaatacattttatgctttagatgtggtacaagttgtatcacagcccattaaaaaaactaagttctgatatacctcacttaagttgtaagataggtattcttccttatcccaatgtaaaccatatgaacctctcttgccattagtcttatgaggtcctaatggtaattatagtactaggcccatatgttggcaaatgtatataactgtttgggtaacttaaatagaagagaaataagtgctggggagaaagaatggatgacaataagagaatcagcattatttctttgaaatctgtttgttcaaaggagaagaggcttaaaaagtacggtttaacttcactcatgttaaatttgattcaagatgttttaacttcactcatgttaaatttgattcagggtgtatctgaacttgactacccaccaccaccaaagaaaaacagtctttctctaaactagcactataagttaaatgcctcaatcaagtaagaatagttcacatatactgagtattaactagtgccaaccgctatattctaaactcttttcatgtgttaatttaatcctcatacaaccctggaggtagatgtcttattatctcaatttcacagaaagtgaggcacagaaagattcaataacttacctaattcacaaaactgcctactatatggttgagcctataaagcctattatgtggcattacagttagtttgcatttctactgccctttttgtccttgagcaacttcagggcagatggtcacatctgtttacgttggtgtctccaaaggcctaacacaaggttcttatatggcatcaatgaccattgctgatgtgaatgaaacccagaaaagtacaggtgatttaaaattgaattttttatttttcttaattcttttcttcccacagataattttgctcatygaactgaagttcrgaaagccttggccaaagataaggaatggcaagaacaattcctcattccaaatttggctctcattgataaacaagagagtgagattacttatctggtaccatggtgcaaattagaaaaacctccaaaagaaggtaagtccttccttcttagtcactgagttttgatgaataaaatactaaagaacttaagtgatcaaaactgaagttcctttggaaaaaaataaaattaattctttgttttatatagaaacatwcagtgattgttgtggtaaaaataaatgggagctcttaccccatccttwaaaaaaatgagcataaaataatgagatatttttcaaattgagaccttgcagatttgtaaagcttaactgtgttatagagaaagctgacatggtcagtagaggttgagaatttgtgcattgggagcagagaacgtgttgataggtaagggatagcataagaagttttgccataattttaaaataatatgatctttaaaatgtaaaagtatttccataaattataactaatcttaaatcattaaatacagctttgcttataaaactgagtatttgggggaaacagattaagtgaaactgcyaagctatattactttaatctaacttttgtgtcttctttcttgtttctcagtttgaaagtaattgcttaagatttgtcttcttgctgatttcacttcttgctgacttaaagaaactattacctcaatccagttttaaataaaggtcagattagaaaagcataaacttatttaaatgttattttacttcccccattattcccaactttgtagtgtatttaggttacaaaaaatttacaaagtcttccttggatctttacctacttaggtgtcccctcagctctcagcactatctaaataaaayagttcacttctctgacagtgtcaaatcttggttctcctcctctgtgtacatcaytgcttggaaatttttacatgcttttcctacttgtcccagagtttctttctctccaccagccctatacttctgtccaaagtgtacaatacttttcaagtatttacctggatatttaggaaaaataaaaccatctctttaggtttgtcttttttcctccaaaattcaaagatatcacttcaggtccactctttgctttgctgttcctgttaaaaatggaaacttatagggagaaattatatgaagaaaaacatagtggaaattggaaagaatgaaaatatagattggaaaattcttcttttattcttttattttctaaaagcatagacttttgcagctcaaaattctatatcattatacattctcaacagttttttaacaaatgttatagattaaaaatatttcagataatagttataatagcttccagttctttttctttgtcatctgtatgattaagcataacaactcactcttaaacatgggcaaggactttctaagcataaaagcagagagtgcaaatataataaacatgtctacataatatgtatgcatgtctgatcctccaaatctgtgtgtgtagatagtgaaagactattcactgagaaacgtgattggatattgcttgaatgttttctgaaaaattctttttctccctattccaggagtctatgaactggccacttttcagatgaaacctggtgggccagctctgtggggtgatgcatttaaaagggcagttcatgctcatgtcaatctaggctacacaaaactagttggagtgttccacacagagtacggagcactcaacagaggtacaattgtccatttcttcttatmtgaaattgtaatatatattgtgacctaagttccttgggtcaggttctttctcattatagagtatgttttattatttattgccaaatgtttagttttttgtaatttttaaaattgagaaaatctgttttacatcttatttatttagaatgttaacttatgaaaccttcaaatgctgaatagctgttttccctgatacatcaaaatgattaaattttttaaactgaasgaacctcggctgggcacggtagctcaggcctgtaatcccagcacttttggaggctgagggggtggatcacctgaggtcaggagttcgagaccagcctggcaaacatggtgaaaccccgtctctagtaaaaatagaacaaattagccaggcatggtggtgggggcctgtaatcccagctattctggaggctgaggcaggagaatcacttgaatccaggaagcggaggttgcaatgagccaaaatcgtgccatcgcactccagcctgggtgacaagagcaaaactccatctcaaaaaaaaaaaaatgaaggaacctcaagaaatagtctgttactttcatcatttctttttcctctgaatgtacttttattgattttttaaaaataatattatttggggtagggagattatctctaagcaaaaaagtaatatatgttttgtataaatatkaaaacccccctcataaaaatttacccattttccaccagttttatatatatctatatagggagatatagtaaatatgtatatatattgaggtaaatttatatatggatataaatttatttaataaaacacatacttggggtatttaacttgtaatgttgaaaaacatttcaatcagaatttcaagattttttgtggcaaattcagaaaaacatttgtaaagtttatctgaaaggataaaagagctgatgaggtagctcatacctgtaattccagcgcttttgggaggctgaggctggtggattgcttaagcccaggagttcacgactagcctgggcaacacagcttgtctctacaaaaaaaattttaagaattagttgggcatggtggcaaacacctgtagtcctagctacttgggaggctgaggtgggaggattgcttgagccaggagttcaaggctacagtaagctatgawtgcaccactgcactccaacccctgaacgacatagtgagaccctgtctcttaaaaaaaaaaagtaacgaagaaaggataaatgtctaagaatagctaacaaatatttgaaagactcatcataatatcctgttgcctttctattatctctttatgtccaatggacatctcaaacctaatatacccatctttatgcagaaattcaacttcttgtaataatctatcataagaaaatagaatatataaaaacagatgtatattcaggttggaaaatacatggaggagaaactgttatgaaaattattagatgcctatctcacaccatatgcgaaaataaagtcaagctggattgtatattttaatgaaaaaaatttaattcataaaattggtaaaacaaaatgtagatgaatttatttaataatgtggattgggactatatttgtaagccaaaagcaaatgaagaaactatgaagaaaaaaaaatcaacttatgattttattatacaaaggctcaaactatctggatgcctgaaaatcaccataaatgaaattcaaaagcaaaaataaaaataaaaatttatgcaaaagtagacatgcacatggctactaaatatatattaaagaaaatgcatattaaaacaataatgagatgccatttctttaccttataaaaggtatacttacatggatatagtattaggtcaggaaaaaataagtactcagatactgtgtagggttcatattagcttaatcttcccccaaaatttgagaataaaaataaaagccttatttttattgtttttgccagtattacttctagaaaatatgcctgggtgtgtatgtgtataggtgtgctaaattatacagaaaagaaatttgaaagtatataacatacatagtagtcatatttcagtgagataaatggttaagtctctatgttaatattctttttttttttttttttttgagatggagcctcgctctgtggagtgcaggtacgatctcagctccctgcaacctccgcctccttggttcaggcggttctcctgcctcagcctcccaagtagctgggattacagctgtgtgccaccatgcccagctaatttttgtatttttagtagagacaggatttcaccaggctggtctcaaactcctgaccacaggtgatccgcccgcctcggcctcccaaagtggtgggataagaggcctgagccactacacctagcctctaccttaattttctatactgcacatattaagttttatttttttaaaaactacagaaaatgtgtgttcatacactttttaatcttaaattcattctcagtgttaggagaattggtaatcagtacatcatttctggaggacagtgtatactatatacactatatgtaagtacatatatataagacatgctctttggttctgtcaacttaaattctactttatattaaggaaataatcagattcagactgcctgggtttgaatcccaggtacactacttactttttgactttgggtaagtaaacctcaccataccttagttttttcatctataaaatgatagattattatgaggacctagattattatgaggattaaatgagttaatacattaaaatgcttaaaactaggcctgacacatagttatcattcaataaatgtcagtagttgtcatcgaaagtattattataaacacatagttgtgctcaaatgaagtttatgttaatattgtttacattaaagaaacattggaaatgtagtatgaccttctttatgtaatacatacgtaatacagaaatcgatatacatgtacgtcatatcgtgtatttacataagcataagcaaatatgcttatatatgtttatttgtatacatatacaactatatataaaaatacaggccaggcgtggtggttcatgcctgtaatcccaacactttgggatgccaaggcagtaggattgcttgaggctaggagttcgagaccagcctgggcaacaaagtgggaacctgtctctacaaaaataaaaataaaattaaaattaaaaaataaaaatacatatatacacaaatatagaaagagatacaccaaatataaaagagatacaccaaaaataaaatgattagtttgtttttaatctgcattttcctatacatctaacatgtatatattacaattataaaaacttcataagcaattttgtacaagaacaacatttattccagtattttatagaatactgaaatattggaaatagtctaaatagtcaacaataaggggttgacataataagttgctgtatctgtaaggaggaatttatataaccattaaaaattaatattgccatagaaaatactgtttttaaaaacttgttactaagctaaatctgttattataatatacaataagaccctgatttggttttactcatattttctaaaggaartacaataaatttccatagaggttttctctatactgttaacattataccactttcaattttcttctttgtataatgtaaaattttaataataagcacaatttgctcataattttgcttttttaaaaatcaagggaaaatatagtaggaaatcataaaatttgggtcttgtcttgattgtgcctctagctgttttacttcagtacttccgttttccagccttctatttcttcatctataaaaccaatttgattaatttatcaatttctctagcaagtctctgacccctctgaaatcttatcagtaacatatttagttttacctttttgatatcactatttcgatttaaagaataggatggttttggccaagcgcggtggctcacgcctgtaatctcagcactttgggaggctaaggtgggcggatcacctgaggtcaggagttcgagaccagcctgcccaacatggcaaaaccccatctctactaaaaatacaaaaaaaaaaaaaaattagccggacgtggtggtgggcgcctgtaattccagctactcaggaggctgaggcaggagaatcgcttgaacccaggaggcagatgttgcagtgagccgagatcgtgccactgcactccagcctaggtgacaagagtgaaactcttgtttcaaaaaaaaaaaaaaaaaaaaaaaaagaataggatgggtttgattcatttttctgttatttcttatttgttaaggccatattttttagaagctacttgtggtttatttctgcagttcatgttctttggtggaatgagagtgcagatagtcgtgcagctgggagacataagtcccatgaggatcccagagttgtggcagctggtaagctgtttgactaggcatgaattatttttagaacaaatgtntttcagtcagtaactctatatgcctttctatgaaatgtttttccagttcgggaaagtgtcaactacctagtatctcagcagaatatgcttctgattcctacatcgttttcaccactgaaatagttttctactgaaatacaaaacatttcattaactgctataggatctgtctgctaatggtgcttaaattctcccaagaggttctcacttttatttgaaggaggtgktaagttaatttgctatgtttcttgcattatgaaggctacatctgtgctttgtaagtaccacttcaaaaaatagttctgtttactttctgcrtggtatttcagtgtctgtcatacattaaaaatacttgtcactgttttaagatcttgactcttcatttgtttcagaatagctcttctactgtattctgacaactctttgctttatagcattttgttgtattcaaatgataatggtagcatttccatgcttgtgacagcatttttaagttattaatatattttatcaacctttccatcatgtctgttttcctggttttttttggttgttttttgaccagtaaaatttattttgtaataccaaataggatttaagaaaattaacgtatttctttactatggaaaaccacattgtcatttgtgacatcatctatattaaatatggttttcacattagttatttgtcacttacttggaaaatgatgctgttaggtcctggtattaaaaatctagaaaagacttgttggtttatgtgctgaaatgtctttatttataattaattttaactactatttacttcatttcggatcctgtttaacaaagatacttgagacatccatttgttttaatgaaatctgtatggatatggaaatgcttgccctaataaaagcctacatataccttctggttctttttgttgagttttatatatttatcttttctgaagctattgctgtattgctataaggtaatgagacaataccaatttaccgtctttactgtaaatattaagttacctcaagaaaattgtatcccactaaccccagaatcagagtttctttagtactgtcacagatgtggtagtgttttcctacaaacaactttaatttttaattgagtgcttcctattaaagtagatttggtacttccaagactatgaaatctatatttacagctatgttatttttacatttctatgttattttatatttttattttacactgctattacatatagcaaagatagtaaattatgaattagccatctgagggaaattggaaaagcagaaagtatagtaacccctcatttatctagctcccagggattcaaaggacagatgagtttcctactaaggcaaagaagacccaacactggaggtaaaaacttatcacggaagttagaggcattggctctgagttttgtctaagagtcttccatctcaatgtttatttggaaagttttcactcaggaaatttaagcatctagagtttacatgtacaactgctgtcctcctacccagttgggccagcactggatacacctctcctgcttttgcatgagcctgacctttaaaaaaaaaaaaaaacatgcaagaacatcatcaagtagattgttccctttgcccacttcttgtaattcccaccatccttcagctaatacttatttgttatgagaggtgtaaaaatgcatcttcacactcatcagatcagatgggcaataataagaaattggtcaggaaaacctcatacactgctattaagaatatacatttatagaacagtttggcacgatttaataaagatgaatatatacataacttatgacccagcaattccattcctaattatatactctagagtagtggtttgtaacctctagtacacaaatcctgaaggatagaattcagagtctgataacttggataggtaaaagttccatctttattggcaccaacttctaagcatttcctttgtttgtgaaggtaggcaacaaaccacaatattattagcaggacctgcaactttttagtcagtaaaaatcacagatactgtcaaattctatttatagttgttgcaaatacagaaaatttattttaccttcatcactacttcaaaattattatacctcttacacctaccattagatattgttatttaatatcttataaagaataggtctatttctttatcaagaatttgcttttagcagtcctaagcaaaaagaacaaagctagaggcatcacactaccagccttcaaaatatactataagctatagtaaccaaaacaacatggtactgggatagaaacagaaacagaccaatggaacagaatatataacccagaaattaatccatacatctacagccaactggtttttgacaaaggtgccaagaacatacactggggaaaagacagtctcttcaataaatagtgccaggaaaactggatatcaatatgcagaagagtgaaactagacccccacctctcactctatacaaaaattcagttcaatgggtcaaagagctaagtgtaagacctgaaactaaaagtactagaagaaaatataagggaaatgcttccggacattgtctgggaaaaagttttatgaataagatttcaaaagcacagacaacaaaagcaaaaatagattatgtcaaactaaaaagcttctgcacagcaaatgaaaaaatcaacagagtgaaaaaaccacctatagaatgggaaaaaataattgcaaactattcatctgacagggattcatatccagaatatacaagaaactcaaacatctcaccagcaataaaaaccaaacaaatcaatttaagaatgggcaaatgatctgaacagacatttctccaaaggagacatacaaatagctcacaaatacatgaaaaatgttcaacatcactcatcatcagggaagtgaggtattatctcaccccagttaggctattatcaaaaagtcaaaaaacaaagctgatgaggatgcagagaaaaggaaaatcgtatacactgttgggaatgtaaactcttagaactactatggagaacactatggagtttcctcaagaaactacaaataacccactactgagcattatccaaaggaaaagaaatcagtatatcagaaagacatcttccctcccccatgtttattgcagcactgttcacaatagccaagatacagaatcagcctaggtgtccagcaagattaatggataaagaaagtatgttatatatacacaatggaatactattcagcagtaaaaaggaatgaaatcctgtccttcacagcaacatggctggaactggtggatattatgttaagtgaaatatgccaacaagagaaagttgcacaccacatgttctcattaatgtataagctttaaaaaaagttgatttcagaaataaaaagtataacaggattctagaggatgggaaagattaggaggaagacaaggatgggagagatttgttaaacaaaattatagctagataggaggaataagttctagtgctctataccacttcaggataactatagttaataatatatagtttcaaattgctaggaggatattgaatgttctcaacacaaatgataagcccccgggggagtggcttctgtgagacctaaatcctcatctgccacagaaggaaggcaacacatactctccataactgaaaatgcaagaaatagcagaaaatgactattatttaaaaatacgggccaggcgcagtggctcgtgcctgtaatcccagcacttagggaggctgagccgagaggatcacctgaggtcaggagttcaagaccagcctgcccaacatggtgaaacgccgtctctactaaaaatagaaaaattagccaggtgtcgtggcgtgcgcctgtaattccagctactcaggaggctgaggcaggagaatctcttgaaaccgggaggcggaggttgcagtgagccaagatcatgccactgcaccccagcctgagcgacagagcaagactctgtctcaaaaaaataaaaaacatacggaaacaggtattagaagaacagcttaaaatgttgaaggtggttagtctggggaccagtactctgggactgggaggactagaccagaggtcggctgttttgctcttaaggcttacagaacgatctagtttcaaactatctatgtttaacttcgactttttcctatcaggctcggtgctgctattccactgagctcatggaaaattaaatctttattaggagccttccaagatcacagtggggtggcaatggggacagataatgcagaaaagcgaaggctcactggtctacaaatacacgtctatcacaacctgtaaaagttaaccctgtcccagcctggccaatatggtgaaactccgtctctactaaaaaatacaaaaattagcggggcgtggtggcgggcgcctgtagtcccagctactggggaggctgaagcaggagaatggcgtgaacccgggaggcggagcttgcagtgaggcgacatcgcgccagtgcactccagcctgggcgacagagcaagactacgtctcaaacaaagaaacaagttaaccctgtcaacatctcgactttaaatgcaaagcactgcacatgcacacgctgaacacctccccttccttctccaggggcaacacaagcacaaccgccgcacatttacgaatctacacaactgcgcatcggagcgaatgaggtcagggcccagaaaggtggggcaggaacgatcccagccttcagctaattctgtcacctctaacgtctggggcaagaacgtttcaggaaaccaagggggaccgaggctcagcgccgaagagaaagacgccaactgcgggacctgtcgcgcctcccgcgccggggtggagctgaccccgccgagtcccgcccctgcctgagttcgccagtggtccaggagccgcttttttccactcgggaagacttcagagaagtctcacaaaggactcggctggctgcttttctcagtgccgaagccgcgccatgctcgttctcagaagcggcctgaccaaggcgcttgcctcacggacgctcgcgcctcaggtactggccgcgggggcgcgcccgagccctggccggaggggaggggaggggcggggggtatttctgaagcgtgcgagccacgctcaggcgctcccagacctggggccccgcgccgccgccgaagttctaacgcggtctctggagccgtctggcgcgcaaggaggaggctacaggccggggtcgtctcgctggcagtcgctgtcagaggggttttctaactggatgccagtgtttttgtgatttttgtttttgtttttgagacggagtctcgctctgtcgcccaggctggagtgcagtggcgtagtctcggctcagtgcaacctccgcctcccgggttcaagcgattctcctgcctcatcctccggagtaggtggaattacaggcgccagccaccacgcccggctaattttttttgtgtttactatttagtagagtcgggggtttcaccatgttggtcaggctggtctcgaactcctgacctcgtgatccgcccaccttggcctcccaaagtgctggattgcaggcatgagccactgtgcccagcctgatgccagctgtttctagcctaaatgccacaactcccgggacacccccgtggcgccagctgttgcgtttttttaggataacatctccagatacaaatctccgaaaatcaactttaaaagcagttattagaaatacctcattggcccattttccgagataataatatttttaaactgtagatactaagcagttttttattttcagaatttgattaaactgacccaaaaagaatggccatcaaaagaaaggatagttgcaggtattttttggtatgaagaagggttttctaagaaaactaagacacttgggcaataagggcataactcatactggagatgaatgaactcaagatagacaattataattaagacgttatgcacacaaactacatagacatttgcatgttgtaaccaaaaatatgtcagtgaaagatgcctactgaaactgttgcgatagattattctgggtagtgagcctcaggaaattgtcacatgctaaccatgcctaaatgaatggatttgtaaactagaatgccacgggagtggtctgtgtatacacgtgtgtttacataaatatttgcatgtacgtacatacagacagactggataatttctgacagggcatttgctactgaacattaagctcactcaggctcagagggccagattaggacagaaaatttacccattgggcatatgactattacaaagggtggttcttaaaggatagttccataaacttggtataattgagtgcactaaatgtacatacttcttgatattgcatctgtaattagaaacaatgatggagacaattctcatttgttgagtttttttccttttcagcctttatgcagtatacacccatagtacaatgcaattggataagttatagcttccttttatattagttacattccagtcctgtttttgaccggtagtcttcatcagtagattcaggaaatactttgacctgaatagcccttcctgtttttttaggaaccttttaaaaacaagagttttttgttagtaaacgtatttttgggcctgccaaaaggcatgtgtacttaataaatttttttcaatgtgtggaactaatacatatggtattgagtaagatggaatattggctaaacaggggaaaaccctttgtaaattaaagagactaagtcttaaatgtagttcttcggtaaaggagtatcattatgatcccacagccttcttgtgagcaaattctcgtgaaaaaatggctagaggtagacccctgctaggaaaca

SEQ ID NO: 94835 - DNA, 26609 bp, Homo sapiens
  misc_feature (1)...(26609): n = A,T,C or G
gtaatttgttaagtacattgagttctgagatcctctccaaagaaccaatgtatcagtatgttcagctcacctgttctttgttcttcattttaacttttaatttcctcattctttatgtctccttgcccctagtttcagtaaacaatcccctcctagcctctgtcacctgctctgacctgagtcacctttagtcacctggtccgtaaccatctttcctgtctaaacttctcaccccaccactctggcttatacccctgctctctttaaaatagccagtcagaattagcttagattgtgcggtccaaccctagcccataggggaacaacacagcagtagggggtacctgcatcagggataagaacccattcccctcccttgttccggtgtgctctcgccattgcaccatccatgagacgcactcttgtatagaagtaaaattgccttgctgagaaaatgtatgtttgagtgctatttcttttgtggcactgaaaatttatttctaacaaatttggggtctcatttgggattcccatcctcctctgaggagggtctagacctctcccatgaggaggcacgtcccactgccttgttgcggtggccacaggggtaaggaatcgagaccaaccagtgtgacgaataaacctatactctcagcaaggcagaaagaaacgggctggcgacctgggggaaaggatcctcatgtaccacagcgaccaagtaagtgtgcagagaccaagctaagaaacatcgcaggggtgacaaagtatttccttggtggtcaggatattctgggggttgaaagtgtgcatgaatgcaaggagcctccagcaggtggggctaaaggataggcgagacatctccaacaggggagattgagcttaaccaggacccaagatgggaaatgccccaagtaaggtaagagataaaaaggagaaagctagcaacagtaatattcccccaggcctaatgttaaaatgttagaaggataatgaaaggaccaaaaacaaaagcagctgctgtcccagacccttctcctatctctgatgtcccctttcttacaaccctgcctcttgagaatcgtcccaagagcccactcactaccgacctaagtacctttcccttaaaggacttcaacgtgagatagagcaatgtaaaaaagatattcagaatttccctttcccctcttctcgggggaagaaagagacatgatccatagagctgctatgggagcctaggaacacgaacaccctcctggccaaaacgttcctacagcagatcaaaaaactcccacccaagacccccagtgggacaataacaacgcagcccaccgagaaaatatgcaggaccttaaggaattgataataaaggggattaaagcatcagtaccccgaggctgggcgcagtggctcacgcctgtaatcccagcactttgggaggccgaggcaggcagatcacaaggtcaggagatcgagaccatcctggccaacacagtgaaaccccgtctctactaaaaaatacaaaaaaattagctgggcatagtggcaggcgcctttagtcccagctactcaggaggctgaggcaggagaatggcgtgaacccagaaggcggagcttgcagtgagccgagatcacgccactgcactccagcactctagcctgagcaacagagcaaggctccatctcaaaaaaaaaaaaaaattggtaccccgaactcagtatcttacccgaatatttgatatacagcaagggaaagatgaagggcctatagaatttttagatagattaaaggaacaaatgagaaaatacactggtctaggtctcaaggatcctcttgggcagggaatgttaaaacttcattttgtcactaacagttggccagatattaacaagaaattacaaaagatagagaactggaaagataaacctatagaagagcttctaagagaagcccaaaaggtatatataagaaaagatgatgaaaaacaaaagcagaaggcaaaaattctgctgtctaccatacaacaaagtacccagggggccagaacctataaagaacctagactgagggctgggcgcggcggctcacgcctgtaatcccagcactttgggaggccaaggcgagcggatcacgaggtcaggagaccaagaccatcctggctaacacggtgaaaccccgtctctactaaaaaaaagcagccgggcatggtggtgggcgcctgtagtcccagctactcgggaggctgaggcaggagaatggcgtgaacccaggaggcggaggttgcagtgagccaagatcgcgccactacactccagcctgggcgacagagcgagactccgtctcaaaaaaaaaaaaaaaaaaaaaaaaaagaacctagacccccactctccaggcaatatatagagtatgaaagagtaaagccaggagactcaaaagtaaagaaaaaaaaaacttagaggagagagaaagactgacagaacagacagagtcaaagagagagagacaggcaaaaagggaaagagagaggcagagagaaaggcaaagggagagagtcaaagaggaagagagaggcagagagagaggcaaagagaaagagtgagagagaaaaagaggcagagagggagaggcaaagggagagaaagaggacaaaataaatgtttcagattaaaaataggtcacttcaaaagaaaatgtcccaaatgggaaaaagaacaaaagtcatatataaaagcaaatcagctaatattaaatttctgtttattccagaggcaggaacaaacctattagagagatttaatgctaaaatttggcttaggcctctatattaatcagggaagattcctcccctccctaaacttgctccccaccacagacaaagaactcattcatcccaaggtatggtcaaaagacgagaatcgaggaaagttacagattactcagtttcatgttaaattacaaacccctggggaagtagtaaagagaaagcaatgtatcctattcctttcaaagccgaggtaaatttaaaacctataattgataattgaaggtcttctccgtgatggatttcttaaaccctgtatgtctccctataacattccaatactgcctgtaaagacgccagacaggtcataccggttagtgcaagaccttagagctatttttttttttttttttttttgagacagagtcttgctctttcgcccaggccagagtgcagtggcactatctcggctcactgcaagctccgcctcccgggttcacgccattctcctgcccagcctcccgagtagctggggctacaggcgtgtaccaccacgcttggctaatttttgtatttttagtagagatggggtttcaccatgttggccaggctggtctcgaactcctgacctcaagtgaactgcccgccttggcctcccaaagtgctgggattacaggtgtgagccaccacgcctggcaccatgtttgtttttttaaaaagcagatcaccacccactaaattaattttgcaaacccactgacgtccatatcctgcagtttgaaaaacactgcaataaatattggtaggaggtagaagttttacccttagcccaggctgccagtcctggcttccttccctttgcctctcagctgtgccctgagcctgcttgtgactaagccagacccaggccagctcagctctagctggacagaggagccaccatgtagctgagagcccttttgtagcgcgccgagagctcagccttctctgtgtctctcaggctttccctgcaggagtcatcaggcagcaatgatgtggattctgtctctactgcaaccctcagcccagctatgagaaaggcattcttcccattgctcagatgagaagcctgaggccgatcagggtgaagtgactatggcataaggacaaacaggactggtccgcctgtgaaattcagaatgtgaattaggcaggaaaattggctctctagaaaatactgtggaagtgctgaataggattgataggtggctgtggaaaagaaagtgctagagacacagaaaaccgatacaaaaatgggcagggcggccaggcgcggtggctcacgcctgttatcccagcactttgggaagccgaggcgagcgataacttaaggtcaggagttcgagaccagcctggccaacatggtgaaatataaaatttctgtaccaaaaatataaaaaattagccaggtgtggtggtgctcgcctgtaatcccaagtacttggggggctgaggcaggagaatcccttgaaccctggaggtggaggttgcggtgagccaagatcatgccactgcactccagcctagctacagagcaagactccgtctcaaaaaaaaaaaaaaaaaggctgggtgcagtggctcacgcctgtaattccagcactttgggaggcccaggtgggcagatcatgaggtcaatagatcgagaccatcctagccaacatggtgaaactccgtctctactaaaaatataaaaattagctaggcgtggtgaggcacgcctgtagtcccagctactggggaggcagagggagaagaatcccttgaacccaggaggcagaggttgcagtgagccgagatcgcgccactgcactccagcctgggcaacaagagcgagactctgtctcaaaaaaaaaaaaaaaaaaaaaaaactttgatcaacaatttggaaactgcctgttcttttaaaaacgctctttcagctgctgctaatccgagtgtatattcaggacaacttgaatctctgctccgagttgcagtcttcgaacttgacccaaaaaaactccctgcttaaattaggctcgcctcagttttcatttgttttcctttaggcggacacagacgagggccacttaaaggatggcccctaaactcccggttgagttcttttacatataaagggcatcatgcctttgaggagcttagctttacatattaaatggagaaacagaacctgtcaacatctgtaggaagtggacagcgccagttataaacaggaggccaggcaaggtggctcacgcctgtaatcccagcactttgggaggctgaagcgggcggatcacttgagctcaggagttccagaccagcctggccaacatggcgaaactccgtctctactaaaaatacaaaaatcagcccggcgtggtggcgcgcgcctgtaatcccagctacctgggaggctgaggcaggaaaatcacttgaacccgggatttggatgttgcagtgagcggagatcacgccactgcactgtagcctgggagacagagcgagactctgtcattaataaataaatatatgtaaataaaataaagcaacaagagtttgcaaaatccaaaaccacggggacttctcaactgccttttctcccttaagtaccctccattgctacccctgctccatcacctcctcttccggtccctcctctagggcccgcccaccccttccgtttccgccccgccccgcccccgccttcgcccagaccagggcccgcccgcctcttccaatccgttccccgacggcctgcccattgcttccggtccgtagctgaggccccgccccttcaactgtgcctcagcccgccattcccattggcggaaaatcccagacgcccctcaaattggagagggacagatgggcgctgtggctcacgcccgtaatcacaaccctctgagaagccgaggcgggcggatcacgaggtcaaaagatcgagaccgtcctggccaacgtggtgaaaccccgtctctactaaaaataaaaaaattagctgggcgtggtggcgcgcgcctctagtcgggaggctgaggcaggagaatcgcttgaacccggaaggcggaggttgcagtgagccgagatcgcgccactgcaccccagcctggcaacagagcgagactctggctcaaaaaaaaaaaaaaaaaaaaaaaaaattggagagggacgctcttccgcctgcctgtacccggaagtgacgttatgtacgtcccccccccgaggaagtgacgacaggcgtgcccttgacaggcagggagggctaggctgtgcatccctccgctcgcattgcagggaggtaggagccctgtgggggtggctcgaggtggtgtcgcggctgaggcatgccgcgagcgcgttcctgcgcaggctggcggccgggcgggcggggggatctagctcgccggagagccagggtccctggtgatgtccgatttttcccagttccctccacacatgtcccttctttattggttccctccagtacatgtctcttcgtttttggttcctctcacactcttagttcctccttgaattgttgcgtttcatcttttcagacgaccctgggttccagtgttggctgtcatttaatagcggggttactttgggcatgtcacttaacttacttgagcctcgtattccttcccttactcgcagtgtgggcagtacaatagcaacttcctggaagttgctgtaggaagaccaataatgtgtgtaaggtacttggtccttacatacattattaaatctgttggtttcttcctcccattcttccgttataatctaaatcccgatttctttttggttgtgaagccagttttcctgtccttctggtttgcctagctgttccttccctttgattctcattgcttcctcacttccacgctacaaatcttacatatgatttccttgcattttgcttccaactctgcctcttcctgagccctgagtactccccaaatctttttctagtgtgtcgacttccttttgtgtgccccagttcttctgcctctttccctcacagatggctcagcgacttcttctgaggaggttcctrgcctctgtcatctccaggaagccctctcagggtcagtggccacccctcacttccagagccctgcagaccccacaatgcagtcctggtggcctgactgtaacacccaacccagcccggacaatatacaccacsagratctccttgacaacctttaatatccaggatggacctgactttcaagaccgagtggtcaacagtgagacaccagtggttgtggatttccacgcacagtgagtattgggggtccacagaagactagggtcctacttgttcaagtatttattgaatgcctgctgtgtcccacggccatgttctatgctgctcatatgtagactcaatatacagactggtcaggcccagtccctgccctcaaggggaatgcagtctggtggaagacagacaagtgaacagtctgcaaagctgactgttagtgctgggaaacacatgttctgtttctcaatccccagaaagctcagcgtcatctttagcatggaccagagttggaaaaatatgactgtcaccttgcttttggtgtataccagttcctggccctgcagataagctgatgttaacatcctgccatgaaaaccgcaagaagggctggcaaaaagttatcagtgtcggccgggtgcggtggctcatgcctgtaatcccagcactttgggaggccaaggcgggcagatcacctgaggtcaggagttcaagaccagcctggccaacatggtgataccctgtctctattaaaaatacaaaattagctaggcgtggtggtgtgtgcctgtaatcccagctactcgggaggctgaggcaggagaatcacttgaacctaagaggtagtgtttgtagtgagctgaagatcgcgccattacactccagcctgggcaaaaagagtgaaattccatctcaaaaaaaaaaaaaaaaagttatcggtgtcactaccgtggtgcccaagcatacagggcataggaaggagtttcctttcagtgctatctgagtttgctttagagatatttaagtccctctggccttctgaattttagcctgggctttttcatttctagatctttggggcctggctagacacccaactacacaaaagctggacaaagccctctgaatgaggcatcctgggagaaaccagtgtagcataagttaaaaattcaggggccttcaggtcggacgcagtggctcacacctgtaatcccagcactttcagaggccgaggcaggtggattacctgaggtcaggagtttgagacctgcccagccaacatagtgaaaccccatctctaccaaaaatacaaaaattaatcgggcgtggtggcgggcacctgtaatcccagctacccaagaggctgaggcaggagaatcgcttgaacctgggaggtggaggttgcagtgagctgagatcgcgccattgcactccagcctgggtgacagagggaaactccatctcaaaaaaaaaaaaaaagaaaaagaaattgaagggccttctggtcaggtctctgacagattgtttcgctggctttccagttgtttctctgactcaccctgtggccttgggcaggccacttgatatctttgtgctccctttcttcacttgtaataggagataaggtcttgcacactgggtttttcagtgttatgagttgtttttgtttttcttcttttagagacaaggtctcactctgtcacccaggctagaatgtagagtgcagtggtgcgatcacggctcactgcagtctctacctcctgatctcaagcaatcctcccaccttggcctcccaaagtgctaggattacaggcatgaaccactgcgccaggcctgagggttttttttccttttttgtttttgagacagagtctcattctgtcacccaggctggactgcagtggttcagtcagctcactgcaacctccacctcccgagttaaaacaattttcctgcctcagcctcccaagtagttgggactaccacccagataatttttttgtatttttagtagagacggggtttcaccatattggccaggctagtctctcaaactcctgaccacaggtgattctctcccgccttggcctcccagagtgctaggattacaggtgtgagccattatgcccggcctatttttcagcatttaaaaccgtcaggcctggctgggtgcggtgtgcaccaccacacctgctactcaggaggctgaggcaggagaattgcttgaacccgggaggcggaagttgcagtgagccgagatcacgccattgcactccagcctgggcaacagagtgagactccatctcaaaaataaataagtaagtgctgagaataaaataggagttgtcagccaggggtttgtgaaaggtggaactgtcttggcctcctggtgtagtgagcattccagagaggccttccgaaatgaacaataaatgggataatgcctcattttgttcagtaaggaagtggggtggtgtgagttgttcattcagtgccaggcactttccttggtgccacatacatagagatgacagcaccaggcctgtcctggatgagcttccccagcgagaggggaatacctatgatcagggcagtgataatggtcaactcaggggctgtgggatcagagtagcctgtgggtgaaataaaacactttctcttttttttttttttttttttttgagacagagtctctgtcgcccaggctggagtgcagtggcacaatctcagctcacttcaacctctgcctcccaggttaaagtgattctcctgcctcagccttcctagaagctgggattacaggcgcacaccaccactcctggctaatctttgtatttttagtagagacgaggttttaccatgttggccaggctgatcttgaactcctgacctcaggtgatccgcctgcctcggcctcccaaagtgctggaattataggcgtgggtcaccgcacccggccaaagaaaacactttcaacacagctttgggttgtgatcgatcccagctgtgcttctctaatcttgcacaggtttcttaactcgtatgggcttcagtttctttggaaggtgtgttctctttgcagagttgaggggtgtgtttggtaaaagcagagaaagtgagccagggactggtgcgttgtagacgctccaggccattggttcccctccttttagttctgagtccacatggtgtttgaaatatccccacagcttccaatgcatgtttacccacattgccttagttgatctctcctaatagctttgagagccataatctctctttttcagatgaagaaactagggcccaggccgggcgcggtggctcatgcctgtaatcccagcactttgggaggccgagacaggcggatcacgaggtcaggagatcgagaccatcctggctaacacggtgaaaccccgtctctactaaaaaatacaaaaaattagctgggcgtgttggcaggcacctgtagtcccagctactgaggaagctgaggcaggagaatggcgtaaaccagggaggcggagcttgcagtgagccgagatcgcgccactgcactccagcctgggggatagagcgagactccgtctcaaaaaaagaaaaaaaggaaactagggccccagaataatcagctggttggtgagaagcctctgtttgaaccttttaacttccaatcccatatccttttatatgacagtatatttatctgagatatactgaaatgagtcacttttattatgagtcttctgatgaggcctgtgttttaaaagtctgggatctgtgaagatttcccatgtgcagaatctcctggcattaccatttggtgtgttaatttttaaacatggtaaacagagataataagggcaaaagattccttggaaagatgcaggtctgggaagccagtaggggatgctgagcgctcttttgactgactggatgcttcctttctcgccttttgaggtggtgtggaccctgcaagatcctggggccgaggttagagaagatggtggccaagcagcacgggaaggtggtgatggccaaggtggatattgatgaccacacagacctcgccattgagtatgaggtatggattgacagggagttgccacagggnagccagtataggaggtgtcaggcccagggatagctggtgtaggaggtatcttggggagcacaggtagccagtaagcaaggtgtcttggtttttccagagctttttttttttgagacggaatctctcactgtcacctgggctagagtgcaatggcatgatctcggctcattgcaacctctgcctcccgggttcacgcgattctcctgcctcagcctcccaagtagctgggactacaggcgcacaccaccacgcccagctaattttttgtatttttagtagagacagggtatcaccatgttggccagactggtctggaactcctgaccttatgatccacccaccttggcctcccaaagtgctgggattacaggcatgagccactgcgcccagccggtttttcgagagcttttaagagctcagagcactttgcagaggtggctcttgatcctctgagccacctgtctctcttcaccacctttaggaagtagatcgtatgacccaaaaacaccaggtcattcacttagtctcagacattggtacattcctttatccatctacccacatgttcagtgagcagtcatttgggagctcgatgtgccaagcatttgtgattctgacacaagatgagatcttgtytccaagcaagatctctcctagtctagcaggagagaacagcaggtagaaagatcatctcaatatagaagtgctaaaagaagaggcgcataaaggaagaagggactgtttgcttgtgggggagctggaggggacagggaatgcttcacgttagagagaacctctgagctgagccatgagggatgcgcagaggaggaggaagggctgaggaaacagcgtgcacaaagacatggagtcgtctcacttggttggttggtttgtctgtttattcagcagatatttgagagtccctcaagtgccaggtagtgttacttggtgttgaggataaggcagtgaacaaaactgacaaaatctctgcctccgtggagtctacattctagtattttaaatcaagggtcagcaaactttttctctaaaggactggttggtattggaagcattgcagggcagtggtcgctgctacaaccattcagctgggctcgtagccgaaagcagccatagacactatacaaacaaatgggcatggctgtgttacaataaaactttatttacaaaaacaagcagtaggctgtattgggcctgtgaactatagtttgctgacccctgttttagataataagttcaatggagaaaaatacatcaggaagagaggatgggagtactgcgtatgaggcagggtttttgttttttcgagacagagttttgctcttgttgcccaagctggagtgcagtggcacaatctcggctcactgcaacctctgcctcccgggttcaagcagttctcctgtcccagcctccggagtagctgagattacaggcacgcgccaccacgcccggctaattttttgtatttttagtagaaatgaggtttcaccatgttagccaggctggtcttgatctcctgacctcgggtgacccacctgccttggcctcccaaagtgctgggattacaggcgtaagccaccgcgcccagcgggtttcttttttaaagggtgggatagggtagatctccctgataagctgacctttgggcaaaaacaggaagggagtgactgaagcatgtgggtctttggaagaacaattcaggcaaagcaaaagccctgaggtctgatgagcctgggttgcttacagaccagcaggggccaggtgcctggaggtgtctgggttgggggcttcctctgggccttggagaccactacctggagaaaggggagaggcccactttgtctgggtggccagagtgaagggccgagtacggagctggggaaagcataatgcagccggattgggagggtctctgaatagccatgctgaaggtagcgctgttacagagccgagggcgctcctggcagcctctgggcccaacctggctcacagacacttttagtctggcactcgaagtattttaaagtaataggaagcagatgctgatatttgaaactcagatttcatgtgaaaatctcgatatctgattttcttgaaatatcttaacctggccggagtgagccttcacccctccctccttcctcctccaggtaacaagtgaatgaaagaggccgctttattcctcagagtatacaagtccaggtttcactcttactagaccagctcaaatagaggcacccatccctgaaccagtctcctgcrgcaagaaatgggtggttgggagcggggtgagaacaggctggccgccccttgagctacgcagggagtggggagtgattacccaaaggaacatcagtctgcaatgaccagaagcaggggagatggagaccaggcagacaaacgcggtggccactacaggtgaccactggagcaggcctgctttgggagttaggaactgagggctgtttacaggggctgggggaggggtgagtcactttttcaaaaagtttggccactgattgctcagtgagggaggcatctatctgcccatttggatgcccctggctttcccctgcctggctatgcctcgggtgagagcccgggctggggctcctagggcctcccacaggtcacgcgtgggcttcagatgtctcaggcctcctggctctgccagacactacagcttcagcttcagccaatgtattcataactcttcagcagacaccccctgagggccagccatgtgcagggactatggtaactactgcagatgcaaagaagcccacaggccctgctccagtgtctygtggggtggcgggaatgccgaggaccgtccccgggaggctgttgtgggagtgggcactgaaggcctgcggtgaagcctgggaagtgagaaggagatgcctcctgtggaatcctctcaatctccccccacacccaccgctcccgccctgtccactgcctggggactgtgctgtcacacagaaaggcctcaaggctgctaggcccacatcacttggtctcagccgtgttgtttagccaaaccctggtctgacatcattgcagggtttaggaagctccagccagggttcttcctgaccccctccctctctccctcccttccttctttccttccttcctcttttctttctgaagagagcctgaggaagaagtttcctctgagagaactacagtgccccccatgatggctttctttaaggcctaaaatcctttttcttttttgagatggagtctcgctctgtcgcccaggctggagtgcaatggcacgatctcggttcactgcaacctccgcttctcaggttcaagcgattctcctgcctcagcctcccgagtagctgggattacaggtgcccacgaccacgcccagctaatttttgtagttttaatagagacaaggttttaccatgtttgccaggctggtctcaaactcctgacatcaggtgatcagcccgcctcggcctcccaaagtgctaggattgcgggcgtgagccactacacctggcctaatttttgtatttttagtagagatggggtttcaccatgttgaccagattggtctcaaactcctcacctcaagtgattcgcccacctcggcctcccagagtgctggcattacaggcatgagccaccgcgcccggccaccaagactgcatttctaacaagctcccaggtratgccagggctgggtgtcctgagccracatggagagaagccaatgttctgaaggccccatactgactttttcattctgaaggccccagaytgactttctggttctgaaggccccggactgactttctgtggggaggaactgctctttggaaggccgtgtctcagctgccgctctcagcacagactgcttgccagtgagaaagttcatggacaaatgtataatggcatgtgtccaccattccagcgccatacagaaccgttccaccgccctcggttcccctgttttccagcagttcacctctccttcctgcccctcacccccttaaccccccagcagtcactgatctcattttttgttgttgttctttttgaggattttatgtttttagggcagttttaggttcrtggcaaaattgagaggaaggggaaggtacagagacttcccataagtcccctgtcctcccgcatgcccagcctcccacactatcaacagcccataccagggtggtccatttgtcacaacttatgaacctacacggacatcattatcccccaaagccaaaagtttacataggggatcactcttggtgttgtgcctgctgtgggtttggacaaatgtgtcatagccggtgtccacattctagcatcatccagagtcatttcactgcctccatgtcctctctcctctgcctgttcatctctccttcctcctccctccaggcctggcgactcttgatcttttcactgtctacctaattctgccagaatgttatgtagttsattttttcaataatcgtttttccaagaaccctctcatatctaaaagcttttacaaagcacttggcattttgcatttgaagcatgaaatcctttaatgcgtccccacgttcttccccctgctgggactcagtagatgtctctctctctttgctgctgggcagaagcacaacagagtttgatcccctggactgcaaagtcaaacagatcttgtttcagatcccagcttttttttttttytttttttagagggggtctcrctcttttcacccaggtggagtgaagtggcgcaatctcggctcactgcgacctccatctcccgcrttcaagcacttctcctgcctcagcctcccaaagtgctggaattacaggcgtgagccaccacgcccggcctaatttttgtatttttggtagagacaaggtttcaccacrttggccggccttgtctcgaattcctgacctcagatgattcaccttcctcagcctcccaaagtgctgggattacaggcaggagctgccgcgcctgkcctacaccacatcattttggaacagttgctcaccctttgagcctcagtattctcatcgttaaaatgatcctgcccacagccaggagagtgtgagatagtgtatagaggtgtttatatcattcctgacacgaaaaagcacccagcatgtgacagcgatcttttccttttaactctgcaatgagccgaggaggaggttgcaacatcccgcagcacccagcactgtgcctttcccttggtaggcccttagctgagttaacagatggatgccatcrgggtgggacaggagaagacataccaggacacggagctcagtggcggtgcaggcgagctacgggttagcagaaagagactgcgcacacgtacacactcccccactcctgccgagttcagagggtctttatccaaggataggaggttccaagtggcttcacggaacaggacaggcaacacgtcgtagcgtatcttttcctcagcccctcagttggctcagtcactgcctctttcacactcaaaacattccagaagaatgtgccaaggccctgtgcacttccatgtaaggcagtgtttacaggcaccggcacctcctgatgtgtgagccagacacaggagcagcagagcttcagccgcctcctcagggtcragggaagtcccattccagctcaggtttcctgtgagcccctagtgcgggtagtgtgtatgtgtgtgtgtgtatatatgtgtgtatgcgtgtgtgtgtttaagctcaacttcaaaatatccccttgatcagtagtgaccagacctccatygacagcacatctgctgtctacctgacaccagcagggtctgtgcgtgttcaagcatgtgtggaggtttacatgagtgagatcattatggccttcatctggagttcttttttttttttttttttaatatttttatggagacgacgtcttgctatgttgcccaggctggtcatgaattcctgacctcaagcagtcctcctgccttggcctcccaaagtactttggattacaggtgtgagccactgtccttgtgcctatctggagttcttaaggaacgctaagtccactctctgagcctcttcagtgaacttagagtcttgccgtgaaaaaagttaggccacttatacagtggcataaagcatatattttaattaaaggaataggacagtgtgcaggtgggagccggtggctgagctctctgcttctgccaagaggctccggctttgaggcactccagctgcctttgcagaccactagagggcaccaaagaatgcctgggaaggccctggtggcttcaggcgcttcctggagcaaactctttygggccctgctctgcctggagacagggtttgccacccacatcagcccagggacagcctttgaaggggcctgaggcactaacaaggacaargactgtgtcctgtgacctgctgtgtttgtccccaaagtgtccrtgaggagtggggtgcagggcctgccacgtaaagttagtgggtgagggcgggatggtctggcctgcgtgcctttcctaactaccatgtgcatggtttttgaacattctgaatcttactggcttccaagatgggccgtggcagggcagcactgggatatgtgaagacctggtatgtttgtgtgaatctctgctcttactttgtagtttaatttgtatgtaagaaaagtctgtgtttatcttgttctgtttatttttatttatttattttgagggggggaacagagtcttgctctgtcgcccaggctggaatgcaatggcacaatctcagctcagtgcaacctctgcctcccgggttcaagcgattctcctgcctcagcctcccgagtagctgggactataggcatgccccaccacgcccggctaatttttgtatttttagtagagacggggtttcaccatgttggtcaggctggtctcgaactcctgacctcaagtgatctgcccgctttggcttcccaaaatgctaggattacaggcgtgagccacagcgaccggcctatcttgttctgtttaaatggttttctcaaatgcccacgaatgccaggcagggatcccaggcagcagagacctcacratgccagtctggtgggccacarcctcatccrcgttccacrtaacctatgcaggtccctgagggaactgagtaaatgcttcacagaccaagaatgttgtccttgccatctgcctgcaacctgctaataagcgtcaggttgtgtatggccaagcctctcctctcatgctgtccagtagaagtccctgagtttctggaccctgtcactcatcacagcagcaagctaatgtgctctcgtggggcctgtgttggacttttccttgtgccctctgtagccactgttttttgaatgcccacagtatgccaggcacaatgccaggttcctaagcttatttgccgggcgctgtgctgagcctttacttgcgttatttcattcagctttcatgccctctaatggcagtgcccttagtatctccatcctgcatctkagaacactgaggcttagtgactgaggggcgtgccccagctcacctggctggtaggagccggattgcrtccgccagaacctgagctctgctttatttatktatttatttatttatttatttatttatttatgagatggagtctcactctgtcacccaggctggagtgcagtggtgcaatctccactgactccagcctccacctcccaggttcaagcaattctctcacctcagcctcccaagtaggtgggattacaggtgcctgccaccatgcccgactaatttttgtattttcagtagagacagggtttcaccatgttggccaggctggtctcgaactcctgacctcaaatgatctgcccacctcagcctcccaaaatgctgggattacaggtgtgagccaccgcgcccagcctgagctctgctttatactcaaatctttctctttttttttgaggcagggtctctgtcacccaggctggagtgcagtggcacaatcacagctcactgaagcctcagtctcccaggctcaagygatcctcctgcctcagcctcccgagtatgggagtacaggcatgtaccaccatgcctggctaatattttgggggggtttagtaaacaaagggtctcactatattgcccaagctggtctggaactcttgaactcaagcaatcctccagcctcagtctcccagaaggctgggattatagatataagccactgtgcccagcctatacttgmatctttaatgttcatcccaaaccctaaaggtagacattacccccattttatggaaaaggacactgaggctcagaaagrtgctgtgacccggccaaggcccccttgctagtgagtgcaaagccaggactcgaactgtcccccagcttctgtctcctcctgggccaggcttcccctgagctcctccctgcccccagccctggcctgcagctgcaagggttattttcatctctcctgtcattccagcaaaaccactgggccagtgagtcagtcttgtggttaagggaggaagggtactgttgggagcccgcaatggaagacgtttcttcagcgggtggcccccgggccctgcagtacccctgcaccgagagaagagccatgttcctctaggcctgcccatggctttgggaagtcastgccctggataagccaccagccttccccacaaaggctcaggagtggcagttgagaagtattcactcccaattcacttggacccccttgtcctctccacccaggtgtcagcggtgcccactgtgctggccatgaagaatggggacgtggtggacaagtttgtgggcatcaaggatgaggatcagttggaggccttcctgaagaagctgattggctgacaagcagggatgagtcctggttcccttgcccgcgtgggaccccaatagaactcagcccttccatgccagcccttcctgctgcctccctcctgtctggctcctggggcccatgcttagagcccagsctccagccctgagtgcttccgagctggcggactgcccaggggccatcagaggatggtggtgctgctgctgatccggggaccgctgtcttccctcccatacgcctttcatccctccttctagggcctatggcagttctcccaggatgtgtggcgagagcctgggccagcccacagcgttcctagtcaggcagccacaccttggtcctcatcttggtcccttccaatctgaaacctcgtgcctggctcgtctgccacctacatttctctttccagctgctgttttgtaaaaaraaaaagaaaaaagaagcccaaactagtgagagtaatatctaattatctcattttttgtakgtctgtgataaagaacttagtcatcccttccacctcctactgtgaagaacagaccctgggtcccacactgaaatcccctctagtcacccattcccaccccccagggagckgcctcccaggcagggggtgcagaaaatgattgatgggctggggaaccctggagagcctcgactccggaagtctcaaggtgcctcctcctctccttagctggcccgttggttttctgagcagggggctgaactgtgaacaagtcagacaaataaagcaagggtctgcaccatctgcaatgtcacatctgtgtgggctcagagcacttgtcaccctttcccagggggcttgtccactgtccccacatcctcccctaactccacaacactctctccaaccagcccttcctgttcactaacatgcttgtcagcagtggctgctattctaaggatgccatgtgccagtcctcgtgccctcctaaggcaagaggctgttgtccccattaccccgatgtagacactgtggctcatgggatgcagagctggggtttctatccagacgtggttgcctctgaaacctgggctcccacagctgatccccttgacccttctgaggcctccccaactgacagggctcctggctgccccagcaggtgcctggccctgtggggatcaggctatccttcccatgggtgcctgcaggaacttctgggccttgggaccagacaacccctcttggcccccagctccccttggccatagaggagtgtgccaagggagccaggcttgccagtcaagaaagccttccttccgtctgccttgctcctagggccaagctgtcattagggctcggttgcctggatgaggccccagcttcctgtgaatcaggtgcttggcggcagggggatcctgacaccctactccgtggccccagggatgccatggggctggtattgctctgttctcagaggctcaccctgttctattagaactgtctgcattctccaggggcccacccaaggactgccttgggaaggctgccgagaccgagggaggagaggggcccgtggcctctgaaggaccccagaccctggggtctgtcacaagcacatggaggggacaaaaccagcaactggcgtcagtggagacggaagctggtggagtgaacatcctgcaaaggccaaaagccctggttaagatgagcaggacctgcccagactcaggaggcacctcccaggtacctggcactgttttgagggtctcagctcagcacagccccgcgggaaggygttgcccttcagattccacctgagacctgccccgagaggttgaggagccttccccaggtcacaaagcccctgagtggctgagctgggattcaaggccaggcagccttccacacccacccccaggaaccaccctcgctgcctcctgtcatctgatagaaggtggcgtgtgtgtgatcttcatctcacaacaggcaacaaggcaagtggtgtcagctcatttgacacagtgggagcagagcagatcggaggttgagtaactctttcaaagacacccagtgagcccagggtggggccagagcacaatgctggggcgcctcgactcccgagccctggccctttccaccggaccccactgccgctccttaaaaggcaccgtttgccacgcaytttctaaacacattacctcatcgaattccactcttgtgaggcaagtattatttccatatcataagtgaaaaaaacagttcagagaaatcgacttgcccaaggtcatgtctgaaaagtggtgccaaatttgaacccagtgggggtctggcctctctgcccgggtgggcgtggagaagtgtggcagaggccttggccagaggcaggacccgggcgctgctccagctccctccttaaaaggtgcgttgccctgcaaggtgagccggtggctgtggccatcccaggttggcagcctctgcccgtgaggctgatcatggccgtgagtcatgctggctgtgctcacggaatcctcctggtgatcctgtttgaccaattccaggacactgacctcaccrgggatgccgctggctctgggctgtcagcccacggtcattctctgggtgccacattgggccccatgactgtggatggggttggcagacacctgctggaagcctttagccaccaggttgggaagccggggaaaggggacaaagtcgcaggcttcccgagcctgaagacaacccgggatatggcccctgtatattttttcttgacacccagtgcacgtggttgcctgcagagaggcggcaggggtggaagctcgagtttgctgggctggctgcttgacttccacgctcccttgtgcccctcagctccgccctaccagggagcaggtgccagcccacagaggagacggagcgccagggtgggcagtgagacaactgagacaccactctgggcaggcacgctcacctgcaggcagcgccagcatggttcagagtgaacgtttggtggccactcacacaggttccttctaaatatacagaacatggagccgggcgcggtggctcacgcctgtaatcccaggactttgggaagccgaggcgggtggatcacctgaggtcaggagttcgagaccagcctggccaacatggcgaaaccccttttctactaaaaatacaaaaatttgccgggcgtggcagtgcacgcctgtaatcgcagctacttgggaggctgaggcaggagaatcgcttgaacctgggaggcagaggttgcggtgagmtgagaacacaccattgcactctagtctgggcaacagagcaagactccatctcaaaaataataataataataaaaataaacttgcagaacacgggagagaaactgaccctgtcatcaaggagcttattatgcccagagacctcagagcacggggcgccggtcatccctgagctgatgtcagggcagcctaaggcacctcaggctacccagcatcccttgtgaggcagagggaaggggaggcttgcccaggtcacagcacctttgtagtagggctaggattttaacccgggctctcactccagcctaccctaaagtggaaatgaggtagggccttttctacgctggcctcaggagaggggagtgaggagggccgctgtgtttctgaggaggtagaactcgggtaaggacctgtcaggtcaagaggatgttgacggcgctgctgccactgccttccgagcagtgcctgcccctaccaggggccagggccagctcaacccccaccccggccgcctggggaaagctgctccaggaagcgaaggtagtgctggccaagctgcggaaatcccgaatgtgtgggctctgggcagggaacggcccagaaaacaatgttggggccgtgtccatggagggcaggatgctggcgacggtaaggctgccaggcctgcagccgcagttcctctccgatgcctggaacaccagctgcaggcgtgacccttaccctggccagggctggggtccccggctctgcaggaagcctgggccactggttgttccaaggaacctccctttccagccacctcctggctgcaggcccccccaggcccttccacggtgatagaagtagggcgggaagaatctgatctggattcagatcctgcctgtgccacctgcaagttgtgcgaccttgggcaggctgcttttccattctgaggctctgtgttcacggtggtgaaataggctggcagtgacagctggcacttactgagtgtgtgctacatgaatcctctcactgagtctccaccgcaaccccaacagcagggaccattgttaccgccattttacagacaaggaaactgaggcttggagggcttaagtaacttggcatgaatggagttcagagctcagatttgaactccgatgtggccggacacgatggctcacgcctgtaatcccagcactttgggaggccaaggcaggaggatcgtttgagcctaggagttcgggaccaacctgggcaacatagcaagaccctgtctttacacaaaattaaaaaaaaaattagcctggcatggcggtgtgcgcctgtagtcccagctacttgggagggtgaggtgggaggatcacttgagcccaggagtttgaggctatagtgagctgtgatctcaccactgcactccagcctgggtgacagagtgagatcttgttctaaaaaataaaaatataaaaaataaattttatttatttatttattttattgtttttgagatggaatcttgctctgttgcccaggctggagtggaatggcatgatctctgcccactgcaacctccttcgcctcctgagttcaagcagctctcctgcctcagcctcccgagtagctgggattacaggcatttgccaccatgcctggttaatttttgtatttttagtagaaacagggtttcaccatgttggccaggctggtctcaaactcctgacctcaaatgatccgcccacctcagcgtcccaaagtgctgggattacaggcgtgagccaccgtgcccggcccaaaaataaattttaaaaaaggggaaaagaatgaaccccaatgtctttaatttcaaattctctttgttcttgctcattagctatactgctttccttttgggacaaggttttcaccattttgagccccagttgcaccatctccaagttggggctcatgacagtccctgcaaatgaggtcacggctcagcaggtggaagcacgctggcaccgattggaagttccagaagtgttatctgtgtggctttctcctttcccctacccccagccacatcttaaacaggaaacaccgggcttcccaaggtaaggaccccagcaccatgggaggggcccgtcgctgtaccaggctgagggccttacattcagccctgtgmcctggccctggtccctgccaccacctcctcctgctctggagctggcttggtggtgcctgtgtctcaggcagccctagggagttggaggcagtgacctcacccttggagaatgcccactggaattcaccctgaacctgctcctctgttctccatgcctcccagccacttctgagcgcactctcacgcttacctctgtggcagccaacggagcgtctcctgggagcaagaacactcctgctagacagctgttaactaccaactggaggacaagccagttctccaccttcagccagcttgctgggtgagcttaggcaagtagctgtctgtctctggtctgccccctacctcagtgtcccagcaaagaagtcatccagtgtccagcctctgtgccgataccaccagaggtgccttcttcgacctaacacctgtggaaggagggactgattccatttcatacatgtggagacagaagcccagagaggtagtgaccgtgcctaaggccacaccctgggaaatggactgagggtggctgaccccatgccctgctcctcctcctctgccacactgctgctcccaggagtgtcaaaggatccctcctctcatgcccagagtagggaccttgatccgcttttttttttttttagatggaattttgctcttttcccccaggctggagtgcagtggcacaatcttggctcactgcaagctccacctcctggattcaagcgattgtccagcctcagcctcccgagtagctgggattacaggtgcccagctaatttttgtatttttagtagagatggggtttcaccatgttggccaggctggtctcaaactcctgacctcaggtgatctacccacctcggcctcccaaagtgctgggattatgggcacgagccaccrtgccaggtggagcctctcttttatccacctcccccaacccccaccccacaaggaggcaggagattccatttcctcatgatccactcctgaggcgggaatactctctccaggccaaactggctacctcagccagcaagcgtctgtgcggagcccctctgggcctgctgggtgataggaactagagcaagacacagcccctgccttccaggagttcacagcaaacacatggacacatctaaagtctaaatgctacaggagagatgacatttaccaccatggtgayagagtacagactggccgcaagccctgaaaagcagcacatctgcaaaaggagattgtcgggtaaagcatgggaaggaggtgatgcttgagaaaagttgttttttgtttttgttttgagacagtctaactctgttgcacaggctggagtgcagtggtgtgatcttggctcactgcaacctccacctcccaggttcaagcaattct

SEQ ID NO: 94836 - DNA, 22518 bp, Homo sapiens
  misc_feature (1)...(22518): n = A,T,C or G
tttattcattcatccaaaaataaaccacattaggatccaaataaagaaaacacttccttaagaaattcatactagtgggtgaaacagacatgtacacaaatgcttataacacacgataacaagtaccataataaagctcccactggagttcaggacaactaatcaatgggtttgaagaaaatcaattgtaaaaggaaaagggtaggggacactttaatttcattaccctaatcctactctgaaaatgacttttcctcatccttaagtcagaaatatataacaggcgagagaattgaggactcatggaagaccttgatctaagtctactgcaacccttaggtctgttcccaatcctacacctaggaattacagcttttctgtatcttagactgctcttaaggctattgcatggttttcctcacttggtaataccagaagttatttgtagacaatttataagtgttaacatgctgatttaatttgcaagaactcctggaacatttgctgcaggattagcacgttgctaagtattatatgagcatggcgataagatccaggttggttttccctaagctccatttctgcctcccatcttccaggtgtggttttcctggggtccatcttttctttcttctaatataatctctctctctgacccgtctcatccatacccagccatgatgatggttcccaaatctaaatttccagtctaaatggatctcctgagcaccataactacatatccagccactccctagtgtcgcaggtacttaaaatttaacatatccaggaaaaaatttcaactcctacctccctaccaccaaattgtttcccatcctggagatgaaagataccatggtccatctcgttacccaggctgagagagatcactgaggagatcccctgaaatactgttttaagtacctgaattttttacttcattccactgctaaagtaaggtttccaatttccattttggttaactttctcagaccttgagccaaatttttaactccccaaagtcatgacaagggcctgtgattctttttcttttctttttttttttttgagacagattctcactctgtcacccaggctggagtgcagtggcgcaatctcagctcaccgcaacctccacttcctgggttcaagtgattctcccacctcagcctcccaagtagctgggattataggcacgtgccaccacgcccaactaatttttctatttttagtagagacagggtttcaccacattggccaggctggtcttgaactcctgacctcaagtgatctgcccacttcggcctcccaaagtgctgggattacaggtgtctgccacagcacttttacagccgggcctgtaattcttctaaagtagttacaaaaagaataccttattccttttattccatatgtatttaggggctttaatattctgaaatatttcaaaaagagaatatttagatcctctctctaaattgctagaatctctgagtctaatcctgaaaagagacttgtgttaaactatcaagaacagcttttttgacattgtactcctgctgaaaactgccctcccttgggaagccagccttgagcaatcctccctaaatccttatacagcatttcccaggtatctgtgtgtgctatcttggtacttaatggtttgctgtttcacattttcttggcttcaccttggttttaagctgttcttcccacaatgcttaataagatgaataagcacacggtaggtgatcaacagatacttagtgaatgaatgagccacgtgtagaaaacatcttcttctgcatcctgaactaacttgaaaaagataccataatacaaacaccctttccaaacacttaaacccaattttcctcatgatgtaacctgatctatgaaagtaaggagtagtacaatgaaaacaccaccagtttataaattagaggactgggcttctcatctagatgccaccaccacctaaatatgaaatagtgagttaatcttcctgggtcttaagtttcttgatccataaaattatgaggtaagagtacaagctgtctaaagttgtgaaaactctaaaaatgtggataataaaaattttgcatcctaagcaaatgtctaagtgggaagatggagtacagaccacattaactataactgcactgctctcaagtacctgaaataaggcttgtcaggagacatggtaatttgtaggacttcactcgtcatatccaattcagaaaatgcttcacggagcccctctgactgcagaataattttattaataacattggtgctgcagaaatcaaagtccagggtctcctcaggttcctgtgtattgattttgcagactgtcaccactcctccttcttccaggaacagcatcaaagggtaaccataaccttggtaacacattcgaagtgcagttaaagtccctgcaatggaaagaagtcatacttggccttagctttatagttctgggttcagcttctcctcgaaatgatacataaaatttctcaagaataatttattccgcccaatttctcacatatatgtatctcctcataaaaagggatgacatcttccctgatgacagttgtgtgtagagaattccaaaactacaagaaaattgggaaccagaacaaaatgtaacataattctttggaatcattttcaggttgtcatacacacctcagaaatagcttgttgattttatatatgtacaatttcagggtagagaatctatatggatcaacacagcaagtaactaaattgctgcagaacagggtatgctattccttgaaggttcaatgtgtgtaacagtggattgctgtcatctgtactgtaacgtcagtgtactcactatgacaaggatccttccaacttttccaactgggagatattctttatatttcctcgaatttaaaaatcaaattgagagaaaaagagggttgttaatggtggtgtaaattttaactctgcaaaccactagagggaaggaggaatatgacaggatattcaaactccttctccttactggattgagagccacagtgaggaatggaagatgacagatgcttctgtgaaaaactagctggagaacactgtattagaaaatgtataattaataatagtggaattgtctgtggaaacgtaaaatacatttttctggagaactatattgaatttttcctagctaatctccaggttgctttcctatgaaataaaatcattcttctggggattccttagttttatacccacagcaattcaatttcaccattcttaaaaattcccttaacaaataaaaaaatatatattttaaagaaaatcattcggcaaccggttgcggtggcttatgcctgtaatcccagaacttagagagactgaggcgggcagatcacctgaggtcaggagtttgagaccagcctggctaatatggtgaaaccccatctctactaaaaatacaaaaaattagccgggcgtggtggcacgtgcctgtaatcccagctactcgggaggctgaggcagaagaatcacttgaacccgggaggcagaggttgcagtgagctgagactgtgccattgtactgcagcttgggcaacaagagagaaactctgtctcaaaaacaccacaaaatcatttggcaaaatagacataacttataaaatatggcttaaaagaaacaaattttgaacatagtaaactaggagtcagaactggcttttgtttttctctgccactaactagcggagtaattctggacaagttaggaaaaagaagcaattaaaacatttcacaatgctaaaaatatttaagacatgtccaaagtattcttttggccagttcgaatttacaatccctcaaagccttgtaaattaaaaaaaaaatgcaaatacttttacaaatatgaaaagaattataaacacacttgcaattaacattgtgaaatgttagaacccatgactgtggccactgaaaaatgaattggcattagctttctgaaccaatgtttatgttccaaataacttcctgtatttttctgaccactatgtataacacttttatgtctttatactgatcatagtttacctggcataggacttgatccaaaaatagataaacagtctaaaaggacagttaaattaattcgaaaagtaacagactcttcctgaactttaaactcctgaaatattccagcctatgaaaagagtaaaaatgaaaattgttacataaaagaataaaaactaataatataaggtcctagatttcactttatacgtttaaaaaatacaatactgtgctaatcccatgagaataatttctgattagcaatcaaaacatcttagagacatcctttgaagcatccttatctccattcctggatctaaaactatccctctgtgactctcccttgtctcgtttttgtgcctatcactactgctaaggtcacttggaaaatagacgaatgacttgataatgcatgagcaacattagtttcaacttttattatgattttttattgatacgggggtctcactatgattacccaggctggtctttaatgcctgagctcaagcgatcttcgtgcttcagcctcggtctcctgagcagctggaaatacaggtgtgagccaccataccatgcccctgcatgaggacaagaaccgtgtcttatttacctctctatccctgagatcatgctgtgcacttacgtgttaaaaaacgcttagttgaacttgcaatcctatctgaaccacacaaatattactttggaagaacaaaaattctattacaaccagtaaaggaaaaaaatactctttagtaatagcatatcgcagtggaaaaaagagcatatattctggaaacaaatattcagcgttcttatcccaattcagccacttaccagctgtgggactgttggcaaatcacttaaaattgtgcctcgtttccacatatataaaacgggaataataacagaacctaccttacaggactattgttaagattaaataagttaaacaataagaagactgtagcctagccaatagcctagtttaataaactttagtcattactaaccattatctctgtaaaacaagatgggaaaagaatttgttaccgggagagaaaaaaaattcaagtaatgacgttttgttctctaacttaagactattatttatttattaagttatttattatgactattgacaagttattatgactattaagttattttgtctactgaaaccttccgatttcattaaattacatttagagtatctatggcacaggcttaaaggcgcctacttccatacctgaataaaagcatttgcttgcacacactttgcattttccactgttactttgataccatttttagttgcgaaacacgtggcatgttctcggaaatgaatagctttcaagatagtggagagattcctaacgttgtcaaggctggccacaaggctgtactgatcatcctcgtcttggatctgttgggtcagaaggggcatcgtccactgcgcattcggccccgagggatgctcctggggccaacaacttctcggcggatcgccaaacacctgaagggattagacagtaaaactcccatcagtgctggcgaggtccggcgagctccacctgcgctgagaggtggaaaggggctgggaggctgaacacggctgaccaggccgaaccccacctatgtcacttaactatctttgtaattctggaggaaaattatctaagctacggtttcctcgtctccgtaagaggacaataacgtgaaaagttgtgaagaatgaagacacgcaactgacacggtatctcccggccaaacaggagctacaaatccgcggggagtcggttttgtgcagcccgcgccaccagccccgcctccaacaaaacaggcgatggcggggcgggcccggagtgtccagataatcctccaagagtcccagacaaccccattcaccagcccgcccgcgggacagcatcgcttactagtctcggggtccccgagtgcggaaaccctacctttgcggtggggtctggacgcccgagagcccttctcagcaaagtccctgaagaggagcgaggcggctccgaggaaccrcggaggaagtgaagccagtcccgccactcttcagaccggccctccacctcggccaccgtcaccacagagctgaaggaggcctagagagccgcgcgtgccgcgccaccgagaccggaaggaggcggcacagacctggaggacgaccgcgrrgctgagcgcttagagccgccgaaccatagagatcggaaataggagcgagcggcagcgccggaaaggaggccaagagcgcgggcggcgaggcaagatggcggcaaccaagaggaaacggcgtggaggctttgcagttcaggcgaagaagccaaaaagaaacgaaatagatgcggagccgccagctaagcggcacgccacrgcagaggaggtggaggaagaagagagggaccggatcccaggccccgtttgcaaggtaggaggggatgtccccgggctacacctgcggcggcggctctgtgcgccttttctkgggttacttacttgactacagccttgcttaatttcagagtagcccgggtgttaacggtaggtcggttttagcwattctcccggccagactgggcacggagtttgcagctaatccttgtgcacgtggccgtcttcctggaggcggcgggttttaaaacctttacccggcccacggggaagcgacttacagggtgctcagatccagcgttctttcttactagttgttcarttgttttttttttttaatgtttttggagagtagtgcttttccttggttatttctcgctattatttctccagtgattagtatgcccatatactgccatagtcagccactctcagtcagggatcctgaagtacgttaggggagcctttaaaaagttgttgcccttgggactgtgactctgacttgttaaccaggtcattaactcaagagatactgaaaaatagactaggtagtatgagctttacttgtattcaacagacattgaatgtgccatgcactgtaccaagttaggcttcctttgggtttgagattgcaaagatgactagaatgtgacctcttcctcctgaaatgttggagtttaggaggaaacttaagaattcaaataagttgatggtttttattcaaaagaagtgcacacaagttgttagaattagctttcattcaactaagaactcttcttaagctagacagaatactgtgaacaaggattatctttgacattaatttttgcgtcctccgcacttagcatagtactctagcgcggagtaggtgataagtaaatgaccccgtgtggtgtgatggcaagctctaagaaagaagtgagctctgtggaatgaaagataagtgtaaattctagccccgttattaacagcaacattctgtgctcttttctgacctgcagattggggggcagggggagggaatatttactttttatgaaaaataagctggacttgtacacttccagtaaatgttagtgttctcactcttcccttgagctaggtagtatctataatctgagccatacttcgatacattctatggaartgcaggagatatagattatttttaccctagtataataagataaagaatcatgaaggatttagcccgtaagctgcatatcagaggaagtgtagaattttgacattcaaaaaatgagagggaacactccaagggagaaaaaaaaaccgatgaaagactttgaagtagggaaatgctgaaaaatgtaaaaaatagagccagattggattgcattaggcttcatttggggcaataatgatgtagacgtgaaaatctattttaaaattcagtgtcaaagctatgtcatttgaactttgtttagaaaactctgggaagtaaggatgtgatggaagtattactttaaaaatggtccagcgtggtggctcacgcctgtaatcccagcactttgggaggccgaggcgggtggatcactaggtcaggagttcaagaccagcctggccaagatggtgaaaccccgtctctactaacactacaaaaaaaaaaaaatcagccaggtgcagtggcgggcacctgtaatcccagctactcgggagtctgaggcaggagaatcgcttgaacccgggaggtggaggttgcagtgagccgagatcgcgccactgcactccagcctgggtgacagagtgagactccatctcaaacaaacaaacaaaaaaagtaaactgttgaaaaagctagtcaaccatatctattggaggtgctcatgtctgggaaggttagccatttaggagttttgcagttaatataagactctaagtaagtgcagtgtgaataagaaaggattaagagttgtgggaaattattatgagacatctgtcatggagagcacagaaataagagggctaagaaagaacttttagggttggaaggaggaattggagagattgaagttgaaaaacaaagaaaccaaggagggcatttctgggtggcagatgtggtcagtgaatgttggtgagagatgaaattaaaggagtcaggatggtttgacttggttatgagctacttggaagctcataaaaaacaaacagggccaggtgcggtggttcttacctataatcccagcgctttgggaggccaagccacttgagcccaggtgttggagaccagcctgggcaacatagggagactcccatctctacaaaaaaaaaaaaaaaaaaaactagctggacatggtggcacatgcctgtagtctccagctactgtagatgctggggtgggaggatcacttacttgagcccaggaacttgaaactgcagtgagccgtgagcacttcagcctgggcaacagtgtgagaccctgtcacaaaacragatcagttcagtataagattttaaaatcttttaacattttctttttctttagggaaagtggaaaaataaggaacggattctcatcttttcttccagaggaataaattttagaacaagacatttaatgcaggacttgagaatgttgatgcctcattctaaagcaggtgcctttatatcatatactttagaaatttctatctataaacttacctatttttatgttttcacttattttatatattcttcatttgttcagtgttctcacgaaaaaaacacaatgccttttatcctttcaagtgccacaatttttccagttaacatttcgtaagaaattctttagatttcattaggtagattctttactttttaaaacaggtgtcctaatattattgaaacatttcttgaaggtccaggaatgccttcactgtaatgcttctgaaggtcctgagataggtgggatggtttgtcctaagtgctaaggactgccacatgttgctttttgggcctttttttttttttttttaactgtttttattgaaaaatggacctgggatagaattcaaagcactttttaagttggagtcagagcctatttctaaatgccaggttatttatttatttttaagcagtgggttattttacaggcaagaacagtatggccgggcatggtagctcatgcctgtaatcccagcactttgggaggccgaggtgggtggaacacttgagtccaggagttccagaccatcctgggcaacatggtgaaaccctgtctctacaaaataaaaaaaaaaaaaaatgaaaaaagtaaagtaaattagccaagtgagggggtcacttgcctgcagtcccagctactcaggagtctcaagcaggaggatggcttgagcccaggagttcaaggctgtcatgagccgtgattgcgccactacatttcagcctgggcaaggagcaagaccctgtctcaaaaaaaaaaaaaaaaaaaaaaaaaagtttggaacagtggagtggcagcgccatcatatggctgttgttgtgcttatgttgagaggtgctttggggtttttttgttttttgttttttatttttaaaattttaacttattttagattcaaggagtatatgtgcaggtttgttacacgggcataaagtcagttttctttgacacctaagattaaaaagtgaaagatattttcattgaaactggtttcctttaacacagtctttggtttgtgagaattttcccatttttgaaaaggattcctagaatacctaaatattgagaaacactgcttacactataatttctaattcttacagactatattttacttattttctttacatttacaaagagtcaagatttttgagcgattgtttccagctcttgttttgaaaattagtaataaaatctcctttaaactgaagagtgtaaaaacactttattttctggatagcatatgtggtttgattgaaataactttgaaatcacctttaatttacttgctttttcttttttttctttttctagatactaaaatggatcgtaaggataagctatttgtgattaacgaggtaattttggaaagtaattgcaacaaaatatttttaaaatgttaacagtggcttatttcaaaactaagtcattcagtgactttaaaaattattttgtaaaaactattcagacacattttattaactcttcaataactggtcttccaaatttttatctctcacagtttagtgcttcattcatttctgtttgttttgtctgaacaagcatattgaaatttcctcaggagaaggattatgtcccattttttaaccctgtagtgtctagtatnatgctaaatccatagtaggtactcaaaaaattatcagtcaacatatataaagtaaaataagtccattaaacrtatatatatataaaacccacatggtaaaaagtgttttgccagtattaaaagtgatttgtgtggaactggctattaaggtattacaaactgaataggttacattttcaaagtattgtttaagatactacacttaggtattttttttaacctctggaagcacagaacataaatttacattttaaagcaaaattttcaaaacttagaagaattaggatcattttttcactattagccttctttagagcacaaatttttgaacctctgctrtaataccacattattctatgtgctgtagaaactgttcaacagagcaatgtccctgtcattatggaacttacattctaatggagacaggccataaacaaggtttataatttcaagtaaagacaggagaaataaagcaggttataggttttggacagctgaggctacaccggaaaaacctgttcaaagggatggtgtttaatatttgagcagagacgtagtgaaggagaaatatggtaaaagaccatctagctagagaaaatggcaactacaaaagcccagaagtggcacaaacttcctatttttgtgtttattctaagaccagtaagaaacaaaagttttgttttttttttttaagttgttagggtttgtttatttgtttaactggttttggagacaaaagtctctctctgttacccaggctggagtgaagtggtatgatctcagctcactgcagcctctgcttcctgggtttaagcaattctcctgcctcagcctcccgagtagctgggacgacaggcacacgccagtatgcccagctaattttttgtatttttagtagagatggagctttgccaggttgctcagacaattcacctacctcggcctcccaaagtgctggggttataggcatgagccacctcatccagccataagttgttaggtttaaagtcttaaataatgtggagtttaagagtactatattaattagagtttatgaatactacagtaatacaagccttcactcctgtaatgtttttgtgtcttctcaagtgtgacttttgtaagccttcaagacattgaagtttaatttgaaataggtttgatatacttaggcttttcacccaatcccttagtgattttatagaaccaaatcaccagaaatgatagtataaatgaagaacaacttaagttttgtgatcttagaatcaaaaagctaaaaagttaaaaatcaaaataatcattaaaaaggatgtttttagttctataagtactgcattttcataagattggctaagaagattgattatgaaggattaacataagaagattagttgtggtatgctttatccgtagggcatctatttttagtctttgtagtttgtcaatgggactatgggcagaagaggttcctggccaggtgaggtggctcacacctgtaatcccaccactttgggaggctgaggcaggcagatcacctgaggttgggagttcaagaccagccagaccaacatggagaaaccccatctctactaaaaatacaaaattagcggggtgtgatggcacaggcctgtaatatcccggctactccggaggctgaagcaggagaatcatttgaacctgggaggtggaggttgcggcgagccgagatcgtgccattgcactccagcctgggcaacaagagcgaaactgcatcrcaaaaaaaaaaaaaaaaaaaaggagggaggtttccagtaatcagaagtgagaccattttagatgctaggcccaaaaatatgatagataatttcacccaagatatgggcagagcatctagtttaccttgggtagaatacctaagaggaactttaaaggttccttctgtgaataaatacatgtttaggcctttgtagcctattagcctggttaggtatttttgagataatctggatgatattaatcacatataattactttagttctcatttatattatctacttcattttcctatactttgcttcctttaggtttgtgaaatgaagaactgtaataaatgcatctattttgaagctaagaaaaaacaggatctctatatgtggtaagagaatgtattaagattttggttaaactcatttaagtggatttgttctttgtaccttttatgttatagactcctagtgtttcatgttaagggttgagaatgaagcaaacttttgatttcacgraacttgatacctttaaagaaaattaaatgtataaatattataagcatattatttatggtgaataggtggtaagcattgactacatttgctaattagttgaaaaagcttactccatatctttcaggctttcaaattcacctcacggaccatctgctaaattccttgttcaaaatagtaagttgactcaataaatttttttagatgaggaaattaaaagtaatcttttgaaatagttgtgcaaaagttacaactatttttgtttttgttgtaatttttctagttcataccctcgctgaactgaagatgactggaaactgtttgaaaggttctcggccccttttgtcttttgaccctgtaagtttctcattcagtgtatgaggtctaattttcttatctggcatggttgtttttagtagatatagttgtgttattcaatktagtttcacccccaccttggttttatggattatcaattctttcaggtacatttataatgaggttatagccaagttatagaaacaaatgagcaaacagttttaaacaaggcagtctactgttaaataatatgcttaccttatttttataggcttttgatgaattaccacattatgctttgttaaaagaactcttaattcaggtaaatatctttaaaattagctatccaaaatatacatgatatatcttggaataaggaactaacatacacttttttaactagatctttagtacaccacggtatcatcccaaaagccaaccatttgtggaccacgtgtttactttcaccattttggataataggatatggtttcggaactttcaggtaagctttacttgatttttaattataccttttttttaattgagtttatttatttatgttttgagacagagtctcgctcttgttgcccaggctggmctgcagtggcacaatcttggctcactgcaacctccacctcccgggttcaagcttctgctccctcagtctcctgagtagctgggattacaagcacccatcatcacgcctggctaatttttgtagttttagtagagacggggtttcgccatgttggccaggctggtctcaaactcctgacctcaggccatctgcccgccttggcctcccaaagtgctgggattccaggcgtgagccactacacccggcctaatttttttttttagagatagagtgtcgcagtgttgcctaggttggccttgaacctcctggcctcaaatcattcctcctcagcatcttgagtaggtgggattgcagttgtgagccactgtgcctggtcaatttttagttaaacttttagataaggatatacagggtttgcatacacaaaaaatgcaaataattcttttgttttaaatagcttccttttccctaaagagattgctgcaagtaactatgtactgtcttatatcttaagtgagctctacctacttctattcatgactgttagttgatacagagtatggatttcctaataagccattatatatttaactttatagaaagggaataacttgaagatccatgagatacttgggttcctaatttgtagaaagtgctgtaaaggatacagtaaaatagaagtttctctctcaaagcttagaagtttctctctcaaagcacctcaaaggttaagacctagcaaaatgtaattgctctagaaggcattcaatggcagcggttagatgatgagtcacacagtgactcattcaggagaaaagaggaggtgactctagaaatcttgaagcaggagtttggcacgataagtgcagaaagatgaagaggtggaagagaacagcaagaacaaaattttagacagtatatgacataaactgagctcttttctgcatattttatattggatacctggcatgtgagttgaacacatcatcctaacctctgagggtagacatgcctgaactaatagataacataaatatttgttgttcggaagttgccttttaattccrtaatcagtagctattaaataaatttgactacatatccttttaatctaacttgaattagatttataaaaacaatttagggattgatttaagtttcaagagttcccccataatgtgctttaatacattttgttaatagtggttactgttttaaaatcctgtttaaccagtttttcaaggatatatgcattgtgacaagcaagatgtgaaccaaaatctaattactcaattttaaaagaactcactgaaaaaacatttttccatgacaacttcctataagtactaatagatttcagaaaatattgatgatttgccatttaccaagtttcacccccaccttgattttatggattatcarttatttcaggcacatttataatgaggttatagccagtataccttttgggaataaygtaaccaaaccaaaatgaaatgtttcctttttattaaagatcatagaagaagatgctgctcttgtagaaataggacctcgttttgtcttaaatctcataaagattttccagggaagttttggaggaccaactttatatgaaaatcctcactaccagtcaccaaacatggtaagcggttgtgtcattcagtagtcttcaatgtaccagaaccctttggccaaaatgattctgtgaagtaattgctgttttattacctgtgaaactgaatttggtttttgctgcatagaaacttggaaattactcccttttttcatgacactggctgaaaggatatatggttcataactgaaagtctttgccttatataaaatgtttatttttatttcaaaagcatctaatcttttttttttttttttagcatcggcgtgtcataagatccatcacagctgcaaaatacagagagaaacagcaagtgaaagatgtgcaaaaactgagaaagaaagagccgaagactcttcttccacatgatcccactgcagatgtttttgtaacaccagctgaggagaaaccaatagaaatacagtgggtaaaaccagagccaaaagttgatttgaaagcaagaaagaaacggatttacaaaaggcaaagaaaaatgaaacagaggatggacagtgggaaaacaaaataagtcaatggaaacctgatttgtttttcagttactttatatttattttgtattcaatgtgtaaatacttttattatctaatactatcttacgtctaattagtgtagcatttacaagaaagaaaaattaagatcttaaaatcagtgattatctttttctaaatwaaatatcaccagaattcatcagttaatttctgatttctttttgaagtttgtgttgctaaaaatgtagcacacttaatgtagcctgttctcttgggttggaatttttggtttagcaaagctgaaattcagacatttattaggtcatattatttgtaaaagcattcaacacttcaagagcatcggttgtggatggtaaagtaggagtagactggtagaaaggaaggcatctcactgaagtttactcagtcatcagttaatgaagccatggaagaaccaacccctgatctgtcacttcaaaaaagagtatattaaaatgttgaggttttgagaatcaaatgcattaatggctgtgttgaaagcactttgtaaattttttattttattatattttatttgtgagacggagtttcgctcttgttgcccaggctggagtgcaatggcgcgatctcggttcaccgcaacctccacctccctggttcaagtgattctcctgcctcagcctcccgagtagctgggattacacgcatgtgccaccacgcccaactaatttgtatttttagtagagttggggtttctccatgttggtcaggctggtctcgaactcctgacctcaggtgatctgcccacctcggcctcccaaagtgcttggattacaggcatgagccaccatgcccggccaaatgacatacttattttagaagcagtgtgtatagattacttatttagaaaactaatagtaaaaggagagaaaaataggacagttgttaaaggggataccagaacatttgaatttttccccacatgaaagagaaactgcctattgtgtaagggggcactaggcttaagatcttatgggtaaattagtaacggaaagaaaagattctgagtaccagtgaccatggaggtaggtggctgctgacatggacagatagaaatacaataaaatatatatctaatgaaatgacacatgctgtttcatcacctgcttttttgacttcacactgattgtttttctatgtgtttgttccacatgtttacttgctaactgctaactgtagtattctgtgtaccatagctatgtaatcagtattttcagtttttcctcttttttttgctggtatcgatgcttgtagtgaatacttatatagatgtgttacatgtctttttacacaacacttggtttcctagaagtgcaacttaggttaaagattatgaactctaggctttttgcttgttccctccaccaccataacctcactagaggctattagagggttcatttccttgtccccttaccagtttcactatgcatgaaagaatctgtcaatttaataggttaaaaaaaaaaacccacctttttttttttttagttactggtttatcctttttgactggactaatcatgtttgtttttctgtggtaggattgtcttttactgattctataagtgcttttatatagtaagtttattatagagatctttcctagttcacttacattttaattttatgtctttattattttaagtatttaggcagaatgatcaatattgatggtttttttttccttaaattttttgctaagaacggccttcctgagtgcttaattggccttgaaatagtctaaattaggaaacttgaaatcttgaagtcatctaaattatgcaggtaattcaggtgagaggatcacttgaaatacttgtatgtgactagggccaaatctagttaaatggaaaaaaaccaaagtggccgttattttatttaggcagttgaatatagtcttggataaaaataagacagccgtattcagaatttgtttttaaacacccacatctcaggaacaagttaattataggttataaactagatcaacaaattgtaagttttagtagagatacaaacttgtacttttgatgtgtgcattgtggagttttggtgtaatttccaatttcacaattttcaattaacagtttccataatagagatatccttatatctcaaattccctttcacaattatatggatatcttatttgagaattcttctggaatggatcatctctaaagtctggtcatttaaagggcaccagtttaataaaagatgttcctttatttattagcggcagggtcttgctctgtcacccagggctgtagtgtggtggtgtggtcatagctcactgcaggctctaactcctgggctcaagtattcctgcctcagcctcctgagtaactaggactacaggcccacgccaccatgcctggcttttttttttttttgtagagacaagttctcgctatgttgcccaggctcgtcttgaactcttgggctgaagggatcctcctgcctcggcttcccaaagtgctgggattacaggcatgagccaccacgcctggtcaagatgttcctttagactgaaatttatatccagcatagttacctttaattatacaatgttacaggcaaaaatccttcttacttcagaaggtaaaagaagtaagtgattcctacaggctgtatccaaaaccaaatcaagttggagggagaaaatactccaaattaagttggagggaaaaaaatactttccctttccgtttttttttttttttttgtccctcccttccccccgcccaccatcccaattctgttctcaggaggggaaaggtttcattctcccccaaactcagacttctcaatccttatccattaccaatttaccaactaactgagactgtgtagaatcttcctctggaaaaaagggaagtgtatgaattctgagtagtgagttggttggtcagtggcgtgtgaagtaacctgatgaagcttagcgtgggttttttattttactgggggcagcatattggggaagagaaggataaccttactaaaccgcttgggtacgccaaccctgtgcaatagatattagcaacatagctaaccatacatggttagtaaatacaacccacacctaactgatgcatgtaaacattccacattacagtgaaatatattggtgtattaatgcattttaataattatggtattattttgatacctttcaaagtgtttggaataattgtgcagatagtcagatcaaccaaaacctaccagttaaatactatcctttaactgctttcttaacctaaaccaatcttggaaaggtaggattagaggccagaaagttaggattaaagtgtgttggatggatagatcagcacaatttcatccatgttggtggtaaggcttttcattaagtgtgttgatgcttcccttttaaattgtttccgcttaaataatctaactgtcctttctcaagcatattggtcaagatgatcaataccagatatcttaagtggcagctgaagagaattaaagagattaaaaaaaaaacctgatattcagtccaaccgaattctgctactgtattagctgaggaggcttgagccaaccacttgaccacttggagtctgaatcgccttatctataaaaacggggatccattgagaaattataatcagatattttccagaatcctctcccatcccagctcctatctcccccttcagccctcaggtcggctgccactcacactgaccgccatctgtgcccctcacaatgacaccagcgtggccctgcctcccttccgcgcggccccgcctctcgccccgccgaggccccgcctctcacaccaaggtcccgccttcctcctgttcttcccggccaaggcctaccttcctcccacgcggcccgcctctttccccgccaagctcccgcctttctcctgcgcggcccgcctctctcctcgccaaggccccgccttccttcctcggggcctcgcctctcaccccgccgaggccccaccccctcccgcgcggccctttccggcacagagcccacccctagcccatgcgaagcggcggccgccggcaccgcccccgccgcgctcccgcttgccgcagcctgcgtcgtctgccgccaccgcgcgccttcactgacctacaccaccgccgccgccgccgccgccgccgggctcgctggctggcccggtgcgggcggcggactcccgccggagaggactgccagcgccgccgccgccgccgcttcggcccgggcccgggccccgaccccgtcccgggccccagcgccggccgcccgcccggtcgggcgatgaagtgtcactatgaggcgctgggggtgcggcgcgacgccagcgaggaggagctcaagaaggcctatcggaagctggccctgaaatggcacccgggtaagtacctgtcccgcagcccccgcggccactcggagaagcccggccctccccgaccttcccttcccccgggcggactccgcggagccagcagagagggacctggcggcctaggagctccttgccccgcccggccagtgcccggagccgccctgcccgtctcggtgggcgaagcgctctgccctggcgcaccccggctcacaccccatctcctcatacccgcgaccccggccccgcatcgccactgtagggggaaaactgcagtccaacaacctcacttgctcccgctaccgggtcgcagacaccacgagggagcagtcgggaactcggaactcagacctgccccaggcttgcttttccctgcgtcccttgcagcgcagcctctcggtgtttttcctccgctgccctccacctcgtccgggaatcccagatacttcaacctgatgtatggctcttttcgtttcttagttaagaagttaagacacgggagctagtaaaatatcttttcaatagggatgcgcttttttcgctgttttttttttcttttaataagctgtttaagcagaccttgtacttcactttggacatgattctgccggggaaggttttaatcaggcggcttccccagtaaagtttgtatgtttacttagaagtatccttcctttggatgtttcattggtctgtaatccaggcctgtgtgacttttatgaagtaatctgatcttccaggctgggaaactaagagagtagttgactttcagctttttgaggttcatatgaagaggctttcatattagcattcatcagtaaacacggttacagagtatccaatatatgcaagtcactgcactctactaagtagatttggaaatgctgagacaggggtcttagagtcttgttaggaaaacaactttctgccttacacaaatgaaaagttaaatacaactgccagaaaaaaatcgcaacatacataattggtggttagattaatggaacaactaatatatgctccaggaattcagggagggagttaccattttgtattgagtcttccccttctcagaggagtttggactggatcgtagaggaatgcaatttggaaaagtgaactcaacagtatggaggatagcatggtggaggacaaaagatgttccgggggacagtttgactgaaggtggtgtgtattgcaggtctgaaaaatagggattatgagaggagtggaaggaaaggtcagggacccaaagtcaaaagggaatggctatggtgatggagtgagagatagaggtgtgggtctgttacttaaagttatgcttaccaacagaggcgtgaaaaaatgtgattataaatatattagaagagcagaagtaaatgaactgatgttcatcatagcagtaagtcagaagatacagccaaaattaataaatgtaaaaatagtgtagaagtatattcttagagtttgggttagtgtagaagcatattcttaggagtttgggttgttactgttagaaatcaagttaggaattagaaggaagttcggaattccttgactttctaggtgggaaagggtaaatgaagtagcgaatgctgtgaccaaaagcgtatgtaattttctgaagagtgattttaaatcagattgtatttcttgagtacaagagtagtttgaaatcagattgtatttcttgtaatcttgaatattagcccaaggactgtgaaatttgcttcgctaaataagggagagttgtggctggttttattaagctgccatgggagagtactatgaaggcaacttagtggattgaagagggctggagacagaagttagggagagtccgcagtggacagacaggtaagggcccaagccaggcttggggtcagcgggagggggaaagcgcaaggggaggagatgttgggaaggaaaaatgaccagatttggtgattaattagaaatcagtgctaggaagaagcatgcaaatatgacta

SEQ ID NO: 94837 - DNA, 16684 bp, Homo sapiens
tgtttagggctcatccaaaggagagaggcctggtgaggtggaatcagggagactggtgacacccatagggatagacacaggggcggcctgagcccccaaggcgggccctgggggtgagggaggccaggctggggtctggggcccaaggtgtggaatgggggtgacaggacccagcttccttcctggtgcacacaggtgtttggccacgggaaggtgaatggtgaacccacatgggcactcctcctgacggcactcatcgccgagctgggcatcctcatcgcctccctcgacatggtggcccccatcttatccatgtgagctggggccgggcagggcagggggatggggaaaggcttcctgaaccccagcacctccccgtggctgcgtctggtgttggaggtccagctgggagatgtggcaggctgcatggggagatgtggcctgacagggctcagcccacccctgcatttaggagcaagcctggcacctatgccaaagctataaggtgaccaatatgtccacacctccctgaggcccccagagcaggtggccggcagaccttcccactggacagggcaaccaccgcgtccctcatgcctccatgaagccactgctgccccttccatctgttagtttgttttttggtttttgttttttttttttgagacagagtctcactctctcacccaggctggagtgcaatggcatgatcttggctcactgcaatctccgcctcctgggttcaagcaattctcctgcctcagcctcctgagtagctgggattacagaaatgcaccaccacgcccagctaattttttgtatttttagtagagatggcgttttaccatcttggccaggctggtgtcgaactcctgacgtcagatgatccacctggctcggcctcccaaagtgctgggattacaggcgtgagccaccatgcccaacccatccattttcaaagtcatttgcttttaacattctggaatcagccaggcaaatctgcgtgccagtgccttgcagggagtggccagcatgtggtgactcccagggaccccgaggcagcgcttgtttggttgactctgtccaggctggggtcctcgcccaccctgctccgtggctgacgctccttcttgcttgtgcggttatgaaaggcctcctcttccctgcccactcagcctgcagacttgacaggggccctgtacccctgagcaggctccatcccagctacagccaggcctgctggagccagcaccctcttgtccacccccccacaccccttcctctcacccaagagcacacctgaaactgttttgccacagccatcttgggtggtgaccccccttgtgcccaaatcagaggctacatctcagcctttatctcgggcctcctgctgggagcccctgccccctggcatgccctgtgtgggtcctcctgccttcctgcgcacccgtcctcgggtgccttcctggagggctcatgcagctggccctgcccatgcgtgggactcccacgcccaccgcagtgactcttaagtatctctgactggttgcattcaaatggtccagcttatcttccatcctccccttcatgcatggcagcctctcatccagctggtcactcaggccagaggcctgaatgtggcctagagtctccaggcactgagctcttcctgctgcccctgcaccaccctcttcagctctgccctgttactccccttcctacctcctccaacagcaaacccttgcccatcctctgcgatctggctccgaggactcctccacagtagtctcattgcctcaggccatggaggtggcagcaatgaggttgagaagaccttgctgagccatgcagggcagggccgggccacgccccgtttctgggccaggcccagcctgacatcaggtccccagctgccgaggaggctgctcttcgccaaccgccctctgtgccgcaggttctttctgatgtgctacctgttcgtgaacctcgcctgtgcggtgcagacactcctgaggacccccaactggcggccccggttcaagtactatcactggtgagccatgcctctgacacgggagaccctggggaggccaggagcctcattctgggtgaggcttgggtttcctgggtagggagctcttgaaacactgtggggagggagattatagggctgcgggggactggacctaggtcttacacccagtgacctgaccacccacctgggacctcccacccgggacctgacagggctaccagggcatgggccaggctgtggccaggggtcctcctggtcctgccctgactctgccctcccctctcgtccagggcgctgtccttcctgggcatgagtctctgcctggcccttatgtttgtctcctcctggtactatgccctggtggccatgctcatcgccggcatgatctacaaatacatcgagtaccaagggtgagtgagcactgccacctggcctctgccagctgagggggcccggccgagcaggcagggtggtctggcattggggtgggcagggagctgggccaccgtgggtgccaggactggggactgtaactcaggacccctgggtggtcttgaggggcagaacccctccacctcgcatccacatagacagaaccccctgggcggcaccaggggctcaccagctgtggtggaatctgcagggctgagaaggagtggggtgacgggatccgaggcytgtccctgagcgctgcccgctacgcgctgttgcggctggaggaggggcctcctcacaccaagaactggcggtgagttcccgccagaccctggccagggcgcagaggttcttaggggtcgctgtcggggtcagagggtcgagaggtgccggctccccatcctggggctgcccggggcaccctcctgggccatgctacccaaacctgcagggaccacgacccgagaagggaagaagaggaggggctccctagaacggccggccctggtctcaggctccccccacccggccactgcaggccgcagctgctggtgctgctgaagctggacgaggacctscacgtgaagtacccgcggctcctcaccttcgcctcccagctcaaggctggcaagggcctgaccattgttggttctgtcatccaggggagcttcttggagagctatggcgaggctcaggccgccgagcaggtacttgctttggggagggagagctgagccagactacaggggtctggactgcagctggcacggaggggagggcccagtcttggccagggtggccagccaggcagccagcactgctgccacctgagagctggcacaagggggagccagcagtcccatcttgaaaacttggcctctgggtaggcagcttgttgcccccaggccctcctccacccaaaagtcgttttgttcccgaggggccttgggagggagcccagaggcaggaagctgatggcctcccattggccctgggtgtgttccccacagaccatcaagaacatgatggaaattgagaaggtgaagggcttctgccaggtggtggtggccagcaaggtgcgggaggggctggcccacctcatccagtcctgtggcctgggaggcatgcggcataactccgtggtgctgggctggccctacggctggcgacagagcgaggacccccgtgcctggaagaccttcattggtgtgtgaaggcctggggcctggtgggcaggggtgaagtgaggtggcagtgggcggagggccacagactggtggtcagccgtgctcctcctccccagacaccgtgcgctgcactacggctgcccacctggccctgctcgtgcccaagaacatcgccttctaccccagcaaccacgagcgctacctggagggccacatagacgtgtggtggatcgtgcacgatggtggcatgctcatgcttctgcccttcctgctgcgccagcataaggtagaccagggggtgggtgcagatgagaggggctaggcccttggaggagcagctgtgaccaaaccgcccacctggtcccttgcctcaggtctggaggaagtgccggatgcgcatcttcacagtggcccagatggatgacaacagcatccagatgaagaaggacctggctgtctttctgtaccatctgcgccttgaggccgaggtggaggtggtggagatggtgagccctctgccctgccctggccccgtggataccatgtcccgtgcagctgggtcctcacggccaaccctgtccccagcataacagtgacatctctgcatacacctacgagcggacgctgatgatggagcagcggtcgcagatgctgcggcagatgagactgaccaagactgagcgggagcgagaagtcagtgccctttgtggttcacgccagggcgggtggcagggtcaggcctttggagaccgcatcggtgggtgcggaggaatcagaatgactcaccgcagccctacccaagctagtgctcatttcccggaggcaaggtggtcacattgggccagacaggccccatcccccttttcctatgggaccaaggctatctcctgcaattgtcctcaggcccagctggtcaaggatcggcactcggccctgmggctggagagcctgtactcggacgaggaagatgagtctgcagtgggggctgacaagatccagatgacgtggaccagggacaagtacatgactgagacctgggaccccagccatgcccctgacaatttccgggagctggtgcacattaagccgtgagtgcagcaaaaacagccccagcggcactggaatctaggggtggaggtggggtggggcagacaagtagtgttagatgggccaggggtggggaccctccttgcaggatggctcatggcgacctgtgactggctacactacgtgtagggaccaatccaatgtgcggcgcatgcacactgctgtgaagctcaatgaagtcattgtcacgcgctcccacgacgcccgcctggttctcctaaacatgcctggcccacccaggaacagtgagggcgacgagaactgtatccctttgtggagaggcaggcagttgggaggtggatagcatgggaggtcaagccagcggcttctctcctgggcacccctgggtgggcatggcccaggtggcccgggttgcccgttgattctgttgttgcctccttgacttgaggccctgcagacatggagttcctcgaggtgctgaccgagggccttgagcgggtgctgttggtgcgcggtggtggccgtgaagtcatcaccatctactcctgagcccagtgtcatcttgtggcctggagtcgaggtcttggccaggacataacaagctgtggtctggggtaacagcctcttcccagcacccacctgccagccctgcttgcctggccctgtcctggacccagctttgctaggtctccttggaaaccaggcctgggcctcaaaatggagatggatcccaggtcttgtgggaccctgggatgtttggggactttactatctagcaccccagtaggcctgtcctggccrgagaagactggtaggggccgagtggggtttgaaggcagccggcccggcccagcccaggagcgctatttattgcatatttattgtttggatgtcaccatcagagacgaagggaagggtagccagggagggagtccagcccagctgcctgcaggaagatctggctcagtctactatgggcagggccccccaccaagctgagccgaatggagacagctgagctgaggcctgactttttcaataaaacattgtgtagttctgggcctcctgctgccccggctctgtttcccctggcgccaagagaagaaggcggaactgaacccaggcccagagccggctccctgaggctgtgcccctttccggcaatctctggccacaacccccactggccaggccgtccctcccactggccctagggcccctcccactcccacaccagataaggacakcccagtgccgctttctcyggcagtaggcaccagggctggaatggggccgcccggctccccatggcagtgggtgaygctgctgctggggctgctgctccctcctgccgcccccttctggctcctcawtgtgctcttccccchgcacaccaygcccaaggctgagctcagtaaccacacacggcccgtcatcctcggtaagcccccaccaggcccctgatgcaccacgccagaccctggggagcctgggccccagcccctggcagctgacctggccaaagcccttctgccctgcataagccccgacataagtacctgccctggtgtggggaggggccaaaagcttgtcccktagaggaatgacgtcccttctcccaccacactgtgactctcagttgtctaacccagggggggcggagtgggggacggggtgtgcctgaggtcttggctggggcatcacaagctgtggtcagtcacagccacaccagactctgggccaagccccascactccttccttggcccccacccaccaaggacaagatgcccagcccaggatcggtgagcaggagaggcccatccatgcccggcccctattaggcccagcccccatgcccccagacctatctgttcccaccttggactttggcaataaaggagcgccagrctgggtgtttgctctgcagaggcaggggtcagcggccttggcctcagcacctcagcgccttcccttcctcaggkaagcctgggctttggctactggggggacagcagggagagggggtgtaagcaggggagggtaagtgtgctttgtacctgggggttgagggtatgggaggtggggggtgggtctggtcactgcagcatctggggtgacgggggtaagggtcacggggggaatccagagtccagagtgagggctgctgctcacagtgcccrgctgcctgsggaatcagctagaagccaagctggacaaaccagatgtggtgaactggatgtgctaccgcaagacagaggacttcttcaccatctggctggatctcaacatgttcctaccccttggggtagactgctggatcgataacaccaggtacagccatgtgctccaccctagccccaacacgctgccccttggctactggctgctgagtggcacccccgccccgcagggttgtctamaaccggagctctgggctcrtgtccaacgcccctggtgtccagatccgcgtccctggctttggcaagacctactctgtggagtacctggacagcagcaagctggcaggtttgtgtcagagggcagggctggggctccaggcctgggtgctggcccacagcaggcatggcccaagccccmggtgctgctggtccccccacagggtacctgcacayactggtgcagaacctggtcaacaatggctacgtgyrggacgagactgtgcgcgccgccccctrtgactggyggctggagcccggtgagtgtctctgcggatgaccggcttggggtggggcaggtgccccagaccccagctgccctgaccccttccacccgctgcaggccagcaggaggagwactacygcaagctcgcagggctggtggaggagatgcacgctgcctatgggaagcctgtyttcctcaytggccacagcctcggctgtctacacttgctctatttcctgctgcgccagccccaggcctggaaggaccgctttattgatggcttcatcwctcytggggctccctggggtggctccatcaagcccatgctggtcttggcctcaggtgagaaggcctcgaacacttaggtccagcgatgggtgagaccaagctgatcctgggcctgccttcattgcggctcctgctcacagtggcctctaggggtgctatctaccactcctgggctggcatgcttgctgtcactggcccccagagcagtgaccctggcctgagcaattagggtggctccttccagagtctgtgtcagtgatggcaaaggggcagtgaacacagaaagtgaatcccagctatctgctcccagggtttgttcttgtagccccagagcctgcctgcccagcccttgcctgccttccasttgctcgcaggagtgcctttgcccagggatgtgcttcactgaggatggatctgccagagctagggccagaccccccgaggccccacctgctcttccctagggagtggcaccagggcccagcactgacacagctaccacctactccccaccccctgtaccctgggagctggtctggagagagaaacacagtctggacaagagaaacgctcatcagacaccaccaataaacatcaaacagacaccatcttgtttccccctttctggagcacaactctgtggcccccattgctgcataagccacacaaggagcagaaagacacatgcccgagggaggacagccagcaccgcccccaccatccccacacatcctgggcctcacccaccatccccacacaccctggtcctcaggaagccccgcctacttttttttttctttttcagacagggtcattctgtcgcccaggctggagtgcagtggcgtgatcatagccgcagtctcaatctccctggcccaagcaatcctcctgcctcagcctcctggttagctgagactataggcacacaacaccacacctaatttatttttgttttttagtagagatgaggtcttgctatgttgcccaggctggtctcaaactcttcaccttaagtgatcttcctgcctcagcctcccgaagtgctgggattacaggcgtgagctactgtgctgggccttttaaaaaatgtttatttgtttatttatgtattttgagatggagtctcgctctgtttcccaggctggagtgcagtagtgcaatctccactcactgcaacctccatctccccagttcaagtgattcttctgcctcagcctccctagtagctaggatcacaggcatgtgccaccacgcctggctaatttttatatttttagtagagattaggtttccccatgttggccaggctggtctcgaactcctgaccttaagtcatctgcctgcctcggcctcccaaagtgctaggattacaggtgtgagccaccgtacccggccctatttatttattttttaagctggaatctcactgtgtcacccaggctacagtgcagtggtgcgatcatagtttactgtaacctcaaattcctaggctcaagcaatcttcctgcctttgcctcctgagtagctaggactagaggtgcactccactaagcccagctgattttttttttttttttttttgtagagacagggtctcactgcattgcctagtctggtcacggactcctggcctcaagtgatcctcctgcctcagcctcccaaagtgttgggattacaggggtgagccatggtgcctgtccctgccatccttttgaagccctacagctccacccaacagaggtcttatcagggcttctcattgagtaagctgacactgagcatcattgaatatcaggcctgctcaagcctgtggcttagagtctgtgtctagattgggcagggacaagattgagcatctggctgagcctacactcagcaggttgtgggccaggggtagccaggcctggctccctgtcccaccttgctccatatccacaggtgacaamcagsgcatccccatcatgtccagcatcaagctgaaagaggagcagcgcataaccaccacctccccctggawgtttccctctcgcatggcgtggcctgaggaccacgtgttcatttccacacccagcttcaactacrcaggccgygacttccaacgcttctttgcagacctgcactttgaggaaggctggtacatrtggctgcagtcacgtgacctcctggcaggactcccagcayctggtgtggaagtatactgtctttacggcgtgggcctgcccaygccccgcacctacatctacgaccacggcttcccctacacggaccctgtgggtgtgctctatgaggatrgtgatgacayggtggcgacccgcagcaccgagctctgtggcctgtggcagggccgccagccacagcctgtgcacytgctgcccctgcacgggatacagcatctcaacatggtcttcagcaacctgaccctggagcacatcaatgccatcctgctgggtgcctacygccagggtccccctgcatccccgactgccagcccagagcccccgcctcctgaataaagaccttcctttgctaccgtaagccctgatggctatgtttcaggttgaagggaggcactagagtcccacactaggtttcactcctcaccagccacaggctcagtgctgtgtgcagtgaggcaagatgggctctgctgaggcctgggactgagctgggcaccctagatgtacagctgcccactctcctggtcgagctgttgaggcagtgtgcaccgtgcctgcctctgtgctgggcgcggggactggagctggctccacccacagccctgtcagaggagcacggggcggtgggggggcggtgacaatttgagctgtctctcccagctcccaaaagggcaggtgagacgaccttttgagtgctgggtgaatgacagggccacaagtgtttagaggccgggcacggtggctcacgcctgtaatcctggcactttgggagaccgaggcaggcggatcacctgaactcaggagtttgagaccagccaggccaacatggcagaaacccccgtctctactaaaatacaaaatatttgccaggcgtggtggcatgcatctgtcgtcccagctactcaggaggctgaggcacgagaatcatttgaacctgggaggtggaggtcactgtgagccgagatcacgtcgttgcactccagactgggcggcagaatgagactgtctcaaaaaaaaagagactgggtctcaaaaaaaaaaaaaaaaaaaaaagttagaattaaaatctgggagtgacaaccattaatcagatcatttcactaatggaagtttaattactaatgaagctaaatgctctgagaaaagcttaggaagcacaagaggctgagcctttcaggtcagcaaagacttcccagaggaggcagtgcctacactgaggtcagagtgacaagaagagtaatggaccactgtaaagacttgggttcggccgggcgcggtggctcacgcctgtaatcccagcactttgggaggccgaggcgggtggatcatgaggtcaggagatcgagaccatcctggctaacaaggtgaaaccccgtctctactaaaaatacagaaaattagccgggcgcggtggcgggcgcctgtggtcccagctactcgggaggctgaggcaggagaatggcgtgaacccgggaagcggagcttgcagtgagccgagattgcgccactgcagtccgcagtccggcctgggcgacagagcgagactccgtctcaaaaaaaaaaaaagacttgggtttgacttgattgagcccaggagttcgagacaagcctgggcaatatagtgagacctcatctctacaaaaattttaaaaattagcctggtgcggtggctcatgcctgtaatcccagcactctgggaggccgaggtgggcggatcacttgaggtcagaagtttgagaccaccctgaccaacatggagaaaccccgtctctactaaaaatacaaaattagccgggcatggtggcgcatgcctgtaatcccagctactcgggaggctgaggcaggagaattgtttgaacctgggaggtggacgttgcggtgagccaagatcacactattgcactccagcctgggcaacaagagcaaaactccgtctcaaaaaaaaaaatttatttttaaattagccaggtgtagccacagctgtagtcaaatctactaggcaggctgaggtgggaggattgcttgaacctgggaggcagaggttgcagtgagccaagatggtgccacggcattccagcctgagcaacagcaagaccctgtgtccaaaaaaaaaaaaaaaaaaaaccgtaaaataggccaggcacagtggttcatggttataagcctagcactttggaaggctgaggagggtggatcgcctgagctcaggagttcaagaccagcctgggcaacacggtgaaaccccatctctaccaaaaaaaaaaaaaaaaaaaaaaattagccaggcatggtggtgtgtgcctgtggtcccagctactcaggaggctgaggtggaagagtgcttgtgcctgggaggcagaggttccagtgaaccgagatcacaccattgtactccagcctgggcaacagagtaagaccccatctcaaaaaaaaaaaaaaaaaattaagataaaccctttggcagctgcgtgctgctcttagcctcaaacccaagtcttttttttccccctttgagacggggtctattgcccaggctggagtgcaatggtatgatccatactcactgcagccccgaactcctgggcttccaaagtgctgggattacaggtgtgagccaccaggcccagactgctgaagggtttaaaccagagaaagaatgtgaccagatttccaatttagaaagacccgctctctgcagggtaaggagtagcctgggggtcsgggggcggggggcaagaattgcaaggtaaccagggaggccagtgcaatgtccaggtgggagaggatgctagctgagactagaagtgctaggaaaaggatgtgtgcagacaagaggtcactggggaggtgaaataacaaggcttggccatgagtggaacccaacacccatggtgccctcttgagagagggaagatggcacctgagatggaagatggaaagaccagggtccctgtgactgaggactgagcctctgtttgaggtttttgcagaggagtaaaggcaacaaaagaggcaagagttggaagaaaggtgacaaggaacaaaagtcagctatgcctgatgctactgggtggccagcaacaatgctgacttggccaaggctctgagagctttactatgctgggactggaggtcagagttgaggctagggtaagagcaaggggctcagatggagggggaggaggacctgaacaagtccagaagggaagagatttgtccctctatccaacagagtacccagtgagcagcacagagggcacagcaagggacatcacccggttccccaaatgctcagagccacaagtgaagccaaaagtgaaagacaagatgcagaaaaccgccacgggcctttgaggaagggtaaaggcgaaagcgaaagcaggaagtacagacgtgaagcctagcagaggactttttagctgctcactggccccgcttgtctggccgactcatccgcccgcgacccctaatcccctctgcctgccccaagatgctgaagccagccctggagccccgagggggcttctccttcgagaactgccaaaggtgaagcgggggcgcggggggcggtcactcctgagccgcctctgcttgctcgtggccttttttcctggctgggggtgggggagggtgtgttggtcgacttgggttccaggcttaccccggaagatgagggagacggggaccaggttaggggaagcaacaggggtcttgaaagcagagccgaaacatgggcgccctcctccgtttccagaaatgcatcattggaacgcgtcctcccggggctcaaggtccctcacgcacgcaagaccgggaccaccatcgcgggcctggtgttccaagtgagcagcggggagggacggggagctggaggggagccgagagtatcgagcaggcactgaagctgcggtccctccctctcctcaggacggggtcattctgggcgccgatacgcgagccactaacgattcggtcgtggcggacaagagctgcgagaagatccacttcatcgcccccaaaatctagtgagactcccgagcccagttcccgtacgcaaaaaagaacggccccctcgttcccactccggtccccgcacgtcccagccctgcccacaccgatcctcccttttgcctcagctgctgtggggctggagtagccgcggacgccgagatgaccacacggatggtggcgtccaagatggagctacacgcgytatctacgggccgcgagccccgcgtggccacggtcactcgcatcctgcgccagacgctcttcaggtgcgggggcagggctaacaggaccccggcaggggtagttacggggttggggccattggaaggcgggacagaaagaagggcgggaccgcgacgggccaggtgaccggaagaggccggcccaagagaacctgggctacaggaaaaggcgatgtcagtcatcgggcgccagcccacaggaaggrgcggggatagcacctaggagctgggcatagagaggtggggcctaggccccagcttgtggccgaccccgcccatcctcgagcaggtaccagggccacgtgggtgcatcgctgatcgtgggcggcgtagacctgactggaccgcagctctacggygtgcatccccatggctcctacagccgtctgcccttcacagccctgggtgagcgcttctgtcccttctcctcgaactctgcccctgtgaccttggcctcactccaaacggcgtcgcagcggttgacttcagatgcttctcctgccttcaggctctggtcaggacgcggccctggcggtgctagaagaccggttccagccgaacatgacggtgagcggcctctgtccccgactttgtggtcgctggtgggatgtgcacccgggagctgggggagcacaggaccctggcccagtgcgggtggctaaggcttgtcggaggaggtgaccactgaagggtgagtggagtaagggcagagaagtgcggtcccgacataacaccgtccaataccaaagcctgcacggctgggagaagtcgaagctcacagaggatctttaggagccgagggcggagagaaggaccagtagggtcctacttatatcaacgtctggagcctagattttgtttggggtgggatggaagcaggtgatgttgcctcagaggtggctaaggctcagagggagaaacacagtgggggtttggagggcaagaccagattgggtaagtggacaggcaagtccccaggctgtagcctaagttaacagcagagagagcccgttaggtctcacacacccatcaccgcagctggaggctgctcaggggctgctggtggaagccgtcaccgccgggatcttgggtgacctgggctccgggggcaatgtggacgcatgtgtgatcacaaagactggcgccaagctgctgcggacactgagctcacccacagagcccgtgaagaggtgagagctggagatcggggaccacagggatgtgtggggctatagcaggggagatagggggctgcaaaaaggggatgggccacatgacaggcccatgttcagaggctgtccctcctccctcccaggtctggccgctaccactttgtgcctggaaccacagctgtcctgacccagacagtgaagccactaaccctggagctagtggaggaaactgtgcaggctatggaggtggagtaagctgaggcttagagcttggaacaagggggaataaacccagaaaatacagttaaacagatggctgtgtcattcttgagtggaatggggtgggcaggcagccagcagggctctgtagctaaggcgtccctgcaggggccattacctaccatagctctagtgtctggcctaagagatgcccttcacccataacctcaggcacctacaactccagaaccccagccctggccagcattgcaggcttggtctccacccaaaccttccttctgactccacacttgaaggctcccccaccactccactgtcttgctcttgccctctagtccactggagacttgtaaattatgaaataccccatgtactaccccctcctagagactttccatggctcctcagtggcccaggacaaagctcatacctttcaatcaggcccccacaggccccactgagggctaaagtgctgacaagaggagccgctccctgactccaaggcaagttctcaccaagcactcctcaacctcgcaacatctttacctgtgacaccccttagatgacgaggcatgcctgcactgctcacgtgaagctcgtcttctgtctgcacatgctgggcttgtgactccaagttttccaggctaataagggtcacaggactcacatggggagagatgacacgtttctccaacaaacctttgctgggcccctgctgagtctcaggcctggctgctgggtgccagcaagagcatcctgtcctcagcgagaacggctgaactccgctggagcttcagaaatgtcagggagagtctacccagggcccagggagggtctatgccgggctgcacatccccaggccgctgagtgtgctccctgcaccccaacattctattaatgaacatttgtaaatgtaacagaaaagtagaaagagttgtatattgaatacccttatactgtcaggtcaccacagacctgacagtattttgttatatttgttttatcatctattcatccctctatccattaattcatcgctcctttttttttttttttttttttttttgagacggcgtctcgctctgtcacccaggctctggagtgcaaatattttgttatatttgttttatcatctattcatccct

SEQ ID NO: 94838 - DNA, 167615 bp, Homo sapiens
  misc_feature (1)...(167615): n = A,T,C or G
caaggctgtatttgtctgtttggattgctgtaaaggatacctgaggctgggtaatttataaagaaaaaaggtttaattggctcacagttttgcagcctttatacgaaacacagtgctagcatctgcttctggtgaggcctcaggaagcttacaatcatgacagaaggtgayggggagctggtgtgtcacatggcaagagcaggagcaagagagagacaggagagatggcacatactttctttttaattttaatttttatttctggggtacatgtggaagatgttcaggtttgttacataggtaaacatatgccctggtgccacatgcattttttttttcctgctcttacacttttctttctttttaaatgctttaagttctgggatatatgtgcagaacattgttacacaggtatacacgtgccatggtggtttgctacacccatcaacctgacatctacattaggtgtttctcctaagctatccctcccctagacccccccaccccccgacaggccctggtgtgcgatgttcccctccctgtgtccatgcgttctcattgttcaactccaacttatgtgtgagagcatgcggtgtttggttttgtgttcctgtgttagtttgctgagaattatggtttccagcttcatccatgtttctgcaaaggacatgaactcatccttttttatggctgcatagtattccatgttgtatatgtgccacattttctttatccagtctatcattgatgggcatttgagttggttccacatccttgctgttgcgaatagtgttgcaataaacacacgtgtgcatgcgtctttatagtagaataatttataagccctttggtatatacccagtaatgggattgctgtgtcaaatgatatttctggttctagatccttgaggaatcgccacactgtgttccacaatggttgaactaatttacactcctaccaacagtgtaaaagtgttcctatttctccacatcctctccagcatctgttctttcctgagttttaatgatcgccattctaactggcatgagatggtatctcattgtggatttgatttgcatttctctaatgaccagtgatgatgagctgtttttgatatgtttgctggtcatataaatgtcttcttttgtgaagtgtctgttcatatcctttgcgcactttttgatggggttgtttttttcttgtaaattggtttaagttccttttagattctggatattagccctttgtcagatggataggttgcaaaacttttctccaattctttaagttgcctgttccatctgatgatagtttcttttgctgtgcagaagctctttggtttaattagatcccatttgtcaattttggcttttggttgccattgcttttggtgttttagttatgaagtctttgcccatgcctatgtcctgaatggttattgcctaggttttcttctagggttttcatggttttaggtcttatgtttaaggctttaatccatcttgagttaatttttgtataaggtgtaaggaaggggtccagattcagttttctacaaatggctagccagttttcccaacaccatttattaaatagggaatcgtttccccatttcttgtttttgtcaggtttgtcaaaggtcagatggttgtagatgtgtggcataatttctgaggcctctgttctgttccattggtctatatatctgtttgggtacaagtaccatgctgttttggttactgtagtcttgtagtatagtttgaagtcaagtagcgtgatgcctccagctttgttctttttgcttaggattgtcttggctatactggctcttttttagttccatatgaactttaaagtagtttttttccaattctgtgaagaaattcaatggtagcttgatggggatagcattgaatgtataaattaccttggacagtatgaccattttcacgatattgattcttcctatccatgagcgtggaatgtttttccatttgtttgtgtcctcccttatttacttgagcagtggtttgtagttttccttgaagaggtccttcccatcccttgtaagttgtattcctaggtattttattctctttgtagcaattgtgaatgggagtttactcatgatttggctctgtttttctgttattggtgtataggaatgcctgtgatttttgcacattgatttttgtatcttgagacttttctgaagttgcttatcagcttaaggagattttgggctgagatgatggggttttctaaatatacaatcatgtcatctgcaaacagagacaatttgacttcctctcttcctatttgaatccctatattgctttctcttgcctgattaccttggccagaacttccaatactatgttgaataggagtggtgagagagggcatccttatcttgtgccagttttcaaagggaatgcttccagcttttgcccattcagtatgatattggctgtgtgtttgtcataaaatactcctattattttgagatatgttcaatcaatacctggtttattgagaggttttagcatgaagggctgttgaattttgttgaaggtcttttctgcatctatgaggataatcatgtgttttttgtcattggttctgtttatgtaatggattacgtttattgatttgcatatgttggactagccttgcattccagagatgaagccaacttcatcatggtggataagcttgttgatgtgttgctggatttggtttggcagtattttattgaggattttcaccattgatgttcatcagggatagtggtctgaacttttttgttgttgttgttgtgtctctgccaggttttggtatcaagatgatgctggcctcataaaatgagttatggaggagtctctgtttttctattgttgggaatagtttcagaaggaatggaaccagctcctttttgtacctctggtagaattaggctgtgaatccatctggtcctgggctttttttggttggtaggctattaattactgcctcaatttcagaacctgttattggtttagtcagggattcgacttcttcctggtttagccttgggagggtgtatgagtccgggaatttatccatttctccaagattttttagtttatttgcatagaggtgtttatagtattctctgatggtagtttgtatttctctcggatcagtggtgatctcccttttatcattttttattgtgtctatttgattcttctctcttttcttctgtattagtctggctagtggtctatctattttgttaatcttttcaaaaaaccagctcctggattcattgattttttgaaaatattttgtgtctctatcttcttcagttctgctctgatcttagttttttcttgtcttctgctagcttttgaatttgtttgctcttgcttctctagttcttttaattgtgatgttagggttttgattttagatctttcctgctttctcctgtgggcatttagtgctataaatttccctctaaacactgctttagccatgtcccagagattctggtacgttgtgtctttgttctcattggtttcaaagagcttatttatttctgccttaatttcattatttacccagtagttattcaggagcaagttgctcagtttccatgcagttgtgtggttatgagtgagtttcttaatcctgagttctaatttgattgctctgtggtctgagagactgttttacttccaattatgtggtcaattttagaataagtgcagtgtggtgatgagaagaatgtatattctgttgatttggggtggagaattctgtagatgtctagtaggtctgcttgatccagagctgagttcaggtcctcaatatccttgctacttttctgtctcattgatctatctaatattgacagtggggtgttaaagtcttccactgttattgtatgggagtctaagtctctttgtaggtctgtaagaacttgctttatgaatctgggtgctcctgtattgggtgcatatgtacttaggatgggtagcacttcttgttgcattgatctctttaccattatgtaatgcccttctttgtcttttttgatctttgttcatttaaagtctattttatcagagactaggattgcaacccctgctttttttttctttccatttgcttggtaaatattcctccctccctttattttgagcctatgtgtgtcttgcacgtgagatgggtctcctgagtgcagcacaccgatgggtcttgactgtttatccaatttgccagtctgtgtcttttaattggggcatttagcccatttacatttagggttaatattgttatgtgtgaatttgatcctgtcattatgatgctagctggttatattgcccactagttgatgcagtttctttatagtgtcaattgtccttacaactgggtatgtttttgcagtggctggtactcatttttcctttccatatttagtgcttccttcaggagctcttgtttaaggcaggcctggtggtgacaaaatctctcagcatttgctggtctgtaaaggattttatttctccttcacttatgaagcttagtttggctggatatgaaattctgggttgaaaattcttttctttaagaatgttgaatattggcccccactgtcttctggcttgtggggtttctgcagagatatctgcttttagtctgatgggttacctttgtgggtaaccagacctttctctctggttgcccttaacattttttccttcattttaaccttaatgaatctgatgattctgtgtcttggggttgcttttctcgaggagtgtctttgtggtgttctctgtttttcctgaatttgaatgttggcctgtcttgctagcctggagaagttctcctggataatatcctaaagagtgtttttggtacatacgtttaaacaaccagatctcctgagaaatcactcactattgggaggacagtgccaagccattcatgagggaaccatgcccatgatccaaacatctcccaccatgcttcaccttcaactctggggattatatttgaccatgatatatggaggggacaaacatacaaattatatcaaaggcatagcatggctactgtgaaaggagggtaaaaacacaaagatgacatcaccactgacctcagggagtgcccagtagactgagggagacaagtacatattttcctgaaggagggcactggattgatggcatgtttagaatgtggaagtagagcggccacagaaaggcagcccggcagagtgctcgcacaaagactgggctagagactccccactgcatgtgatgtatctgaggaaagtcattaaaataggtgatggtcactttccatcaagtccctggtatggtccatggaggcagggttgtcaatgtcatttcggcatttcagaggcctctcagggtttggatatggcagaagacaaccagcaatgattatgcattrcagagatgcaggtgagccccaatttcttgccagctgggaagtcggtgctaaggggccttgctgtctttccttggaacataggataccaatttctttctggacagagagtatttggttggctaaagttaaaatctaaattttgctttgggatgaattccaaaaatattagctttattcaaatttactttcactttatctttctgaatcttcaaggtcctaaagcattgcttagtaattttgtttctaaactcacgttacagcactgggcatgatctgtccaaggcagagactataagctactcttatagtactcttatgagatacatacaagtaggtatctcaaaaaatgatactcatgtattcctgttcttatgagtaaatcattggcagtgagtgtgattttttttttttttatgacaggataaatacacgccctctattggggtcaggttttgtgcctgtagttcttccgcctactgtatcatagcagcttagaatcccagctgctggctcgggctgcagttctctcatggctcgcacagggtggaccagccccattcccctatgtgtttstctgctgctgacctgtggctttgctgaggcagggaagctgctggtagtgcccatggatgggagtcactggttcaccatgcagtcggtggtggagaaacttatcctcagggggcatgaggtggttgtagtcatgccagaggtgagttggcaactgggaaaatcactgaattgcacagtgaagacttactcaacctcatacactctggaggatctggaccgggaattcatggatttcgccsatgctcaatggaaagcacaagtacgaagtwtrttttctctattwmtgagttcatccaatggtttttttracttatttttttcgcattgcaggagtttgtttaatgaccgaaaattagtagaatacttaaaggagagttcttttgatgcrgtgtttctkgatccttttgatrcctgtggcttaattgttgcyaaatatttctccctcccctctgtggtcttcrccaggggaatagbttgccactatcttgaagaaggtgcacagtgccctgctcctctttcctatgtccccagaattctcttagggttctcagatgccatgactttcaaggagagagtayggaaccacatcrtgcacttggaggamcatttattttgccagtatttttccaaaaatgccctagaaatagcctctgaaattctccaaacmcctgtcacrgcatatgatctctacagccacacatcaatttggttgttgcgaacagactttgttttggactatcccaaacccgtgatgcccaatatgatcttcattggtggtatcaactgccatcagggaaagccattgcctatggtaagtcacctctcctttagcacattaggaataatctggctttggaaattaaaaaaagattccttactgaattgtgatttgacattttcatttgttgcatttcaaatttctttccagtttaacagattattttgtgccaatttatgtactcatcagttatcaaattttataaaactgcccttcttgaaggtgtgtgtatataatttaaaaattgtagatcgtattcagcttacatttttgagtaccatgtttagaaaagtaccaaaaaccacagtaagaaattgaactttccttttttgctaattctatgtgaccccctagagcaaatgctcttagcagttttgcatacattcttttcattaaaaaaagtattttaggtgtatatatttaatttaaaaattatagatcatatttagcccacgtttttgagtaccgtgtttagaaaagtaccaaaaaccacagcaagaaatgaaactcccctttttcctaagttttctgacccctagaggaaatgctcttatcagttttgtgtatattcttttcagtataaaaaaagtttcatttatatgcaatatctaatgtaaattctcatacctattttgttaaaataaacttttatgctgtgctggacatattcttctttaccttgcattttttatttgccaataaattgtagattcctttatacaccaatacagacagatttgacaagttcttttcataattgcataaaagtctttactttggatgctatgtagttttttaaaccaattaatattgatatatgtttaggcattttccatttttgcttttatgaataaggctgtgtaaacattctttaataatttccttgtgtgaatatatttctatattcttgcttttatcttagtagactagagtcctacatgtagggttagagggttttcctgaattgagaagattggcatctttttgctattatatcttcctgttcaggaatatgtgtgtctcactatttattcaggtcttgttttatatacataaataaaaattttcactatataagcatttatgtttgttattaacatttattccttggcattttatgatttttgaaactatttttttacagggtaatttttccatttctacaattaactgactattggtaattaaagttttggtttttgcgtatgtatcttgtatccagccacattactaacttttcttattattttgtagtatgcattagatgtacaatatgcaataccatctgcaagtaattcccttctctgatatttatactgcttcttttgctttgctggagcatatacttccaaaacattattgagtaatattgttagagtagccagtttaaatagggatttggtagcttgtgactgaaaaatccttgaaaaataccagaataagattcttggcaaacgcatagttgctaaatccagatgaaacacctggtgtctcatctcattatattattttattagggatggagtatacatttttgtctattgttctggcttcttataaggttcagtagactttgtaacagtcatatctgtcattggcagatggttggtgaaagagtgaccgttcagccatctcacaggaaagtgaaataatgctctttctaaaaagcaggaagactacagttgtaggcctttcaaaattaggcatgactttcagctcacggcaagatcaggtgaagagatgcaagttgcaggactctaagaggttggacgtatcaaagcacttttctcctcattatcctccattaattacagtaccaagcaccacccatgtgttgcctgcaccctacaccctttggccgagtgtgaggctctgccacttcctgaacccacactgagtttattgtggcccaaggggtcacccagaggcctttagagatataaaaamgtatatatgattttatatcacctacgatagggagatatccataaaaaaaggaaacattaaactctacatggtttcagttattttgattataaatcttttatgagatatgaaataaatgtgtttctatatctattaaagaatatatatgtatgaaagtttttatacttgcagaaggttatgtgtattaatgtatatatttatgattatatgcataaagccagcagaattctcacagaggaattcagatctgaaagagggctttctgtcaaagagccttggatatggcccaaccacaaaagtaaaagtcaactgtcatcgaaagaaggatggacactgcgtattgctccttccttgtttcagatgccaggatatgtctgggaaaagcatgcagttggttacatcttgctgggaaacaagattcagagtgtgagtctcatctgcctgatgagaaggaagcattacttagtgatagagtatgtgtttgcacatgtatgtgtttgtgtatgtgcaggtgtgtttgygtgcagtgtcccagaccctgcacaggggatttcttgaagatctcctgtaacaaaatctccttgagtctatccaggagaattacatccagggatgtaattaaatactttaacaaagatggcagatggccccatctccaacgtcagggatcaaatttcaacgtgagatttggaggggataaacttttaaactttatcttttggtatggtcattgttttacatttcagtattccaatgtgtgtgtgttgattaaagatgtgtaaataattcagcagaacagcgaaatagttttaatgagaaaaagaggaagtcactcctagtctctttgaatttttggtgagttccaacagaattgatgactggttttaggtgaaaagaattcgggcttcgtctataccatccatggtaggttcagctctgcagacctggggatggaatatggttacagagcaagaaaagatctgtgcttcccccattcctctaagtttctggctccagtttaagatccaaattcaaagktagcttttggtggacaagactaaggcctcccactaaaattgtttacttcaagtatttattttcaaagttttccaacctatacaaaggagagacttagtgtcatgaccacccatatatcaatcttaggttaaataattttcactattttgctgaactgattcatctatcccttttttctgtctttttaaagaaaacttttaaagagaaatttgtgtcaatctttttttaaattatactttaagttctagggtacatgtgcacaacgtaaaggtttgttacataggtacacatgtgtcatgttggtttgctgcacccatcaactgatcatttacattaggtatttctcctaatgctatcccttcctcagccccccaccccatgacaggccccagtgtgcgatgttcccctccctgtatccatgagttctcattgttcaactcctacttacgagtgagaatatgcactgtttgattttctgtccttgtgatagtttgctgagaacgatagtttccaacttcatctatgtccctgcaaaggacatgaactcatccttttttatggctgcatagtattccatggtgtatatgtgccacattttcttaatccagtctatcattgatgaacatttcggttggttccaagtctttgctgttgtgaatagtgctgcaataaacatacgtgtgcatgtgtctttatagtaccatgatttataattctttgggtatatacccagtaatgggatcactgggtcaaatggtatttctagttctagatccttgaggaattgccacactgtcttccacaatggttgaactaatttacactcccaccaacagggtaaaagcgttcctatttctccacatcctctccagcatctgttctttcctgagtttttaatgatcgccattctaattggcatgagatgatatctcattgtggttttgatttgcatttctgtgatgaccagtgatgatgagcattttttcatatgtctgttggctgcataaatgtcttcttttgagaagtgcctgttcatatcctttgcccacttttgatggggttgttttattcttgtaaatttttttgagttctttgtagattctggatatgagccctttgtcaggtggatagattgcaaaaatgttctcccatttcataggttgccttttcactctgatgatagtttcttttgctgtgcagaagctctttggtttaattagatcccatttgtcaattttggcttttgttgccattgcttttggtgttttagtcatgaagtctttgcccatgcctatgtcctgaatggtattgcctaggttttcttctagggtttttatggttttaggtcttacatttaaatctttaatccatcttgagttaatttttctataaggtgtaagaagggatccagtttcagctttctacatatggctagccagttttcccagcaccatttattaaatagggaatattttccccatttcttgtttttgtcaggtttgtcaaagatcagaaggttgtagatatgtggtgttattcctgagacctctgttctgttccattggtctatatatctgtctgggtaccaatacgatgctgttttggttactgtagccttgtgatttagtttgaagtcaggtagcatgatgcctccagctttgttctttttgcttaggattgtcttggctatatgggctcttttttagttccatatgaaatttaaagtagttttttccaattctgtgaagaaagtcaatggtggcttgatggggatagcattgaatctataaattaccttgggcagtatggccatttttgtgatattgattcttcctatccatgagcatggaatgttcttccatttctttgtgtcctcttttattttgttgaacagtggtttgtagttctccttgaagaggtcttcgcatcctttgtaagttggattcctaggtgttttattctctttgtagtaattgtgaatgccatctagtcattttaaaaagaaattcttggcatgtcattccatcaccgaatacttaattaaatataaaaaataagaaacatttgttacatagccacaatatcattatcatatctatgacagtaaaaattttttaatattatctcatttccagttcataattaaatttcccccattttcttgaacaacatctttccatgtagatcaatggaatagaatggagaattcagaaataaacccatwcgttctkggccaattgacargatgtcaaattttgataagggtgtcaagawcattcaaatgggaaagaatagtctcttcaacagaagacccaccctggggtccttaatctccagcatcagactccaagaccatttgcagagatcatccagacagctcccatcatgcctctgatgaatccttcaccatgtgcatccacaggggtcctgcaaatattttctcacagtccgttgagtgacttttcttacaaatactttattttagaataaatagaggtttatagcaaggttgcaacaaatagttcagagaattcttatctaccctgtacccggtttcccccattgttaaatgttatgtttctatggcacatccatcacaactcattcaccaatatgacacattatgatgagctaaagtctgtttccttcagatttcattgatttttacttaatatccctgttcttttatgggatcccattgataccacctgaaatgtagtcatcatgtctccttagtctcctccagcctgtgacagtttctcagactttccttgtttttggtgacttgggcagttttgagcagtcctggtcaggtgtcctgtagaatgttcctctagaatgtcagtgtgtgtttgcctgacatttttatcatggttaaactggggttataggtttttagtaggaagatgcggaggtcttttcttgttttcttgcatgtgaatattcaactgtagaaaagagtggcctttcctccaatgcacttcttgtacctttgtaaaaacttggctgttcatacatctgtgcatgtatttctagactttgtattctgctccattgaaatatttgtgaaatatttgattactatagctgtgtaataatcttgaaatgaggtagtgttacctatttttttcaaattgtttttgctattgtaggtctgctacattaccacatggattttagaataagtttgttagtttgattttgattgggattgtattgaatttatagatcaactggggagaaacaacatcttagcaattttgaattttccaattcattaacatatctatgttaagtgcctcatcagtgttctgtagttttcagtgtacagtctttcataatttttgtcagatatattcctaagtatttcatgtttttgatgctatttaagtgatatttttattccaatttttaattgttcattgctagtatagttgacccctgaacaatgtgggaatgaaggggaccaacccgtgtgaagtagaaaatccacacagatcttttgattctcgaaaaacataactactaacaaccatttaccaaaagccttaccaatagtataaacagtcaattaacacatattttggatgttattagtattatatcctgtattattacaataaagcaaactagagaaaggaaaatgttatttaaaaacataacatatgaaaaaatgcccaacatcactaatcatcagagaaatgaaagtcaaaaccacaatgagatatcatctcacaccagttagaatggctgttattaaaaagtcaagaaacaatagatgcttgtgaagctgctgagaaaaaggaccacttgtacactgttggtggtgggaacgcaaattagatcatcccctgtgggaagtagtttggagatttgacaaagaagttaaaacagaactgtcattcgacccagcaatctcattacattactggatatatatattaaaaaaatcattttaccaagaaacacatgcactggtatgttcattgcagctctattcagaatagaaaaggcatgaaatcaacctaggtgcctgtcaatagtggattggatgaagaaaatgtggtacatatacaccatggaatatgcagtcataaaaaaagaatgaaatcatgtcctttgtaacaacatggatgcagctggaggtcattatcctaagggaatatatacaggcacagaacaccaaataccatgtgttctcacttagaagtgggagctaaatagtgggtactcatgggcataaagatggcaacaatagacactatggactactaaaggggagaggaagggatgcaggagttgaaaaactattgggtaatatgctcagtacttgggtgatgggagcaatcatgccccaaacatcagcatcacacaatatactcaggtaacctgcacatgtactcctgaatctaaaataaaagttgagtatgtataagaggaagtcattcatcataaaggtctccatcctcatcatcttccattgagtgrgctgtggaggaggaggagtagatgttggtcttactgtcttagggtggcagaagcagaagaggtagaggaggtggaagtggaggcaggagaggcaggtgcacttggtgtaaatttatggaaatacatcataattactgtctgtttttttctctttgatgtatttaaaaatgcttttatacagtactaatccttcttccccatttgctttagtttcagtgccyataagggttcatgttgtaatagaagtcaatagcagtcttaaataactggaagcctttccatgaggcttgtattgtgtaaggccattttttttttctggcactgcttcttctacatcttctttctcatcaagtagtgawtggaaagcactaatctctatcaggtcatctattaattcctcgagtgtggtgtctattgactcttgaatttctccaagattcatattttgaaacactttatcccccaccttatgttgctgtatccataatccctttcatgacttccttgattggctctgtcttaaatcctgtgaagtcattcgcaacatctggtcacagttttctccagaagaaatgaattgtttggggcttggtggctttcacagctctgtctataacaacaatggcatcttcaatggtgtaatccttctggactttcatgacattctctatccagattctctttcctagtattgacaatcttttccatagaaaactgtgtgtaatgagttctaaagttccttatgacccctgattgagagactgaattagagatgttgggtttggaagcaggtagaccactttgacaccttcagtgttgaactcatggattctgggtggctagcattgtccaatatcaaaagaattttaaaagacagtcccttactggcaatgcattttctgccttcagggacaaagcgttgatggaaccaatccagaaaaagtgttcttgttgtctaggccttcttgttgtacaaccaaaaaactgtcagtgggtgttgatcttgtcccctcaaggcttaaggtttggcagttctacacatgaggtcagtcctgagtgtaaacttgactgcatttacacaaaacagtagagttagcctatcccttcctgccttgcattctggtgcttggtttacttccttgctaataaatgtcttttgtgtcatcttgtttttgtttttgtttttttccagaatagggcaytgtcatctgtattaaaaccctgttcaggcagatatgctttcccctcaataattatcttcatggcatctgggaactcatttgtctccttttgcttggcagaggctgcttctcctgttatcttgacaattttaaagctgaacccctttctaaaactagcaaaccatcctttgctgccattaaattttccagttttagattcttcacctctcttttgctttaagttgtcatataatgactttgcattttctcaaatcacattggcatctataaatacgcctttcttatagcaatgctacacccaygttaaagctgcattttcaatatgagacaaaaacgtatttcagaaaaaaatgcaaggtttggctcctgctggcatagctgcagcaatgtcttcatgaatctcccttccttccttcctttcttccttccttccttccttccttccttccttccttccttccttccttccttccttccttctttctttctttcttttccactggtccttatctagcttcatttattttgaaatggcaggcattcaccacggtagagctcagcctatggtcccaatcaagcaattcgacttttttggttatgtcatgatttctttttgcttcttgggagtaattccagcatcattaggggcactctgtagtcccatgactgtattcaagatttacaatattgcaccaaacatgatgaaaaatacagtagagccatgagagatcactttttactctgacatgcaatttattggagagatgaaatgctcaaacagagagtataartgttatatcacatgcacttaagccacacttcagctcactggaatagcaacaggaggtagctacaaaattattacagtagtgtagtatatactataggtaattttatgcagttaagatttaatgctgcctctatatgtttgtatttctttcctgtgctaatgatgcaatgtacactttggaaatgtttgtgtgtggtttaataaattttttattgatttgtgcatattttaaagtaataaataataacatggtatctgcacatggtttctgcagtcatggcatagctttaaaaatttttagatatttctagtttatgtggtttatatatatattttttcaaactgttagaaatttcttaaaatttttgcaatatatttatttttaaaaatctgcatataagtggatccacacagctcaaaaccctactgttcaatgtcaactgtatatagaaagaagattagtttttaagtattgtatcttgcaaccatgctaaacttacgtatttgttctaggagatttttgtagtttgttattattcctacatagataaacttattgtctgtgaatgagaccttttttattttttctttacaatctggacactttttacttctatttcctccctgactgcactggctggaacctgaagaacaatgttgagtagaagtggggagggcccctgtcctcggcatgtgtttgccttgaggagtggagcattcagtctttcaccatcaaggatgatattaactgtgggtgcctccaagatgtccttcattagtttaagatacttccctttattttccgagtttkttgagaattttttatcacaaatcgattttggatttttgtcaaacactttttccatacctattgagataattatatgcttatacttttttagtttatttatatggtatgttactttaattgatttataaaattatttatttaatcattaattgtggtgaaaacacatagcataaaatatatcatcttcatcactttaggtgcacagttcagtattgagtacgttcacattgctgtgcaaccaacaccaccattcatctctagaactcgcttcatcttcccaaactgaaactttggacccattaaaaaagaatactccattcccccctcctctcagcccttgccaaccagcattccactcttttattctacgtatctgactattttagatacttcatataagtagaatcatacagcatttgtcattttgtgattagcttagttcactctgcacaatgcccttaagtttcattcatgttagcatatgtcagaattttcttcctttctaagggtgaataatatttcatgctgtatacatacaccacatttttgcttgggttgtttccacttcttgtctgttgtgagttatgctgctatgaacatggtggcacaaccttgattaattttctaatgtcaaaccagccttgcattcctaggataaaccccacttggttatggtgtctaatctttttgtgtagtacctattttaaaatattacagactttgacttgccaatattttgtttaaaatttttgcatctaagctcatgagggtctgtaattttcctatcttttaatgtctttttctggttttggtactgtgataatgctggtctcataaaatgaattaggaaatcccctaggcttcagtttttgggactagtttgtgaataattggtattatttattcttcaatgtttgctggattcatcagtgttgtcatctgagcttcactttgttttgtgtgggaaggtttgaattacaaatacaaattcaatttaaaagatacaggttacttctattggggttatgcatttattcttgtgacaagtctggcagtttgtgtctttaacaaaatgtgtccattctatctaagttgtagacttttttttggcataaacttgttcatgttattctcttaacattttaacatctgtagaatctatggtgataccacctctctcattcctaatattgataatttctttcttctctctttttttttcagatcaaggtggctagagctttaccaaattaattgatctcaacaaaycagctttggtttcattaattttctcaacaaaccagctttggtttcattaattttgcctgttttttaaatgcattttccatttcattgatttctgttctgaagtaagcctccaggggaggtagatcactgaccatcatgtttatttttcaaggacagtcatctgcaagtgccccagtcaccaaaagaaaaggtgactaagcaaatgtctagtaccagttagggtgtcccgaaaggagccatcttgtgctcctacaaggattataccccgaggttgtctgcagaatctctcactaaatgttccttaaggtgttgcctgacacacactgcttagctcrtccatgaaggtatcaagaaaacctgcagaatataattctgtccagtgcaacaaatattcyggttgattttctttgtgcagggctgcatttgtctgtttggattgctgtaaaggatacctgaggctgggtaatttataaagaaaagaggtttaattggctcacagtttggcagactttatatgaaacatggtgctagcatctgcttctggtgaggcctcaggaagcttacaatcatgacagaaggtgatggagagctggcatgtcacatggcaagagcaggagcaagagagagacaggggagatggcacatacttttttattttaatttttatttttatttctggggtacatgtggaagatgttcaggtttgttacataggtaaacatatgccatggtagcacatacttttttttttttcctgctctaaaactctttttttttttttatactttaagttctaggatacatgtgcagaacatgcaggtttgttacataggtatacacgtgccatggtggtttgctgcacccatcattccttcatctacattaggtatttctcctaatgctttccctcccctaggccctcaccccccgacaggccctggtgtgtgatgttcccctccctgtgtccatgtgttctcattgtccaactcctacttgcaactccaactccaacatgcagtgttttgttctctgttcttgtgttagtttgctaagaatgatagtttccagcttcatccatgtccctgcaaaagacatgaatgcatcctttttaatggctgcatagtattccatggtgtatatgtgccacattttctttatccaggctatcattgatgggcatttgagttggttccaagtctttgctattgtgaatagtgctgcaataaaatacatgtgcatgtgctttataatagaatgatttataatcctttgggtatatacctagtaatgggattgctgggtcaaatggtatttctggttctagatccttgatgaatcgccacactgtcttccacaatggttgaactaatttacactcccaccaacagcataaaagcgttcctatttctccacatcctctccagcatacgttctttcctgagttttaatgattgccattctaactggcatgagatggtatctcattgtggttttgatttgcatttctctaatgaccagtgatgatcggctttttttgatatgcttgttggttgtataaatgtcttcttttgtgaagtgtctgttcatatccttcgaccgctttttgatggggtttttttttcttgtaaattggtttaagttccttgtagattcaggatattagccctttgtcagatggatagattgcaaaatttttctcccattctgtaagttgcctgttcagtctgatgatagtttcttttgctgtgcagaagctgtttagtttaattagatcccatttctcaattttggcttttggttgtcattgcttttggtgttttagttatgaagtctttgcccatgcctatktcctgaatggtattgcctaggtttttttctagagttttcatggttttaggtcttatgtttaagtctttaatccatcttgagttaatttttgtataaggtgtaaggaaggggtccagattcagttttctacatatggctagccagttttcccaacaccatttattacataggaaatccttgccccatttcttgtttttgtcaggtttgtcaaaggtcagatggttgtagatgtgtggcataatttctgaggcctctgttcagttccattggtctatatatctgtttgggtacaagtaccatgctgtttttgttactgtagccttgtagtataatttgaagtcaggtagcatgatgcctccagctttgttctttttgcttaggattgtcttggatatacaggctattttttagctccgtatgaactttaaagtagttttttcctattctgtgaagaaagtcaatggtagcttgatgtggatagcattcaatctataaattaccttcagcagtacggccattttcacaatattgattcttcctatccatgagcatggaatgattttccatttgtttgtgtcctctcttatttacttgagcagtggtttgtagttctccttgaagaggtctttcccatcccttgtaagttgtattcctaggtattttattctttttgtagcaattgtgaatgggagtttacaatttggctctctgtttttccattattggtgtataggaatgcttgtgatttttgcatattgattttgtaacctgagacttttctgaagttgcttatcagcttaaggagtttttggactgagatgatggggttttctaaatatacaatcatgtcatctgcaaacagagacaatttgactttctctcttcctatttgaataccctgtatttctttctcttgcttgattgccctggccagaacttccaatactatgttgaataggagtggtgagagagggcatccttatcttgtgccagttttcaaagggaatgcttccagcttttgcccattcagtatgatattggctgtcggtttgtcataaataacttttattattttgagatacgttccatcaataactagttcatcaagaatttttggcatgaagtgctgttgaattttattgatgtaatcatgtggtttttgtcattggttctgtttatgtgatggattatgtttattgatttgtgtatgttggaccagccttgcatcccagggatgaagccgacttgatcatggtggataagctttttgatgtactactggactcagtttgccagtactttattgaggatatttgccatcgatgttcatcagagatattggcctgaaatttttttggttgttgtgtctctgccacatcctggtatcaggatgatgctggcctcataaaatgagttatggaggagtccctctttttctattgtttggaatagtttcagaaggaatgataccaggccctctttgtacctctggtagagttcggctgtgaactcatctggtcctgggtgtttttggtgggtaggctattaattactgcctcaatttcaaaacctgttattggtctattcaggaattctgcttcttcctggtttagtcttgggaggatatacgtgtccaggaatttatccatttctcctagaatgtctagtttatttgtgtagaggtgttgatagtattctctgatggtagtttgtatttctgtgggctcagtggttatctcccctttatcattttttattgtgtctattgattcttctctcttttcttctttattagtctggctagtggtctatctattttgttaatcttttcaaaaaaccagctcctggattcattgattttttgaagggttttttgtgtctctatctccttcagttctgctctgatcttagttttttcttgtcttctgctagcttttgaatttgtttgctcttgcttctctagttcttttaattgtgatgttatggttttgattttagatctttcctgctttctcctgtgggcatttagtgctataaatttccctctgaacatagatttagctgtgtcccagagattctggtaggttgtgtctttgttctcattggtttcaaagaacttatttatttctgccttaatttcattatttacccagtagtaatgcatgagcaggttgttcagtttccatgtagttgtgcagttttgagtgagtttcttaatcccgagttctaatttgattgcactgtgatctaagagactgtttgttatgatttctgttcttttgcattttctgaggagtgttttgcttccaattatgtggtcaattttagaataagtgcaatgtggtgctgagaagaatatatattctgttgatttgggttggagagttctatacatgtgtattaggtttgcttggtccagaactgagttcaagtcctgaatttccttgtgaattttctgtctcgttgatctgtctaatattgacaatggagtgttaaagtctcccastattattgtatgggagcctaagtctctttgtaggtctctaagaacttgctttatgggtgctcctgtattgggcgcatatatatttaggatggttagctcttcttgttacattgatccctttaccattatataatgcccttctttgtcttttttgatctctgttgatttaaagtctgtttttatcagagactagattgcaacccctgattttttttgctttccatatgcttggtaaatattcctctatccctttattttgagcctatatgtctttacacgtgaaatgggtcttctgaatgcagcacactgatgggtcttgactgtttatccaatttgccagtctgtgtcttttaattggggcatttagcccatttacatttaagattaatattgttatgtgtgaacttgatcctgtcattatgatgctagctgtttattttgcctactagttgatgcagtttctttatagtgtcaattgtcctgacaattgggtatgtttgtgcagtggctggtaccggttttttctttccatatttagtgcttccttcaggagctcttgtaaggcaggcctggtggtgacaaaatctctcagcatttgcttgtctgtaaaggattttatttctctttcacttatgaagcttagtttggctggatatgaaattctggattgaaaattctttcctttaggaatgttgagttttggtccccactgtcttctggtttgttgggtctctaaagagaggtctgctgttagtctgatgaacttcttttcgtgtgtaacaggacctttctctctggctgcccttaacatttttccttcatttcaacsttggtgaatctgatgattatgtgtcttggagttgcttttctcgaggagtatctttatggtgttctctgtgtttcctgaatttgaatgttggcctgtcttgctaggctggggaagttctcctgaataatatcctgaagagggtttttggcattttttaaaaaattatactttaagagatctgggatacatgtactgtcgtatacttttaaacaatcaaatctcatgagaaatcactcacaattgggagggcagtgccaagccattcatgagggatccatgcccatgacccaaacacctcccaccatgcttcatctccaacactggggattatatttgaccatgatatatggaggggacaaacatacaaactacgtcaaaggcaaagcatggctactgtgaaagaagggtaaaaacacagagatggcatcacctctgacttccaggagtcctcagcagactgagggagacaagtacatattttcctgaaagaggtcactggagtgatggtgtgtttagaatatagaagtagagcagtcacagagaggcagcccagcagagtgttcgcacaaggactgggccagcaactccccactgcatgcaacgtatctgaggaaagtcattaaaataggtgatggtcactttccatcaagtccctggtatggtccatggaggcagggttgtcaatctcattttggcatttcagaggcctctcagggtttggatatggaagaagacaaccagcaatgattatgcattgcagagatgcaggtgagccccagtttcttgccagttgggaggtcagtgctaagagccttgctgtctttccctggaacatgagatgccaatttctttctggacagagagtatttggttggctaaagtcaaaatctaaattttgctttgggataaattccaaaaatattagcattattcaaatttactttcactttatctttccgaatcttcaaggtccaaaagcattgctgaataattctgtttctaaactcacttgcagcgtgctctccctccaaggcgaagaccataatctactcttgtctggaaatcatacaagtaggtatctcagcaaatgatactcgtgtgttatcgttcttatgagtaaatcattggcagtgagtgtgattttttttttttttatgaaaggataaatacacgccctctattggggtcaggttttgtgcctgtacttcttccgcctactgtatcatagcagcttagaatcccagctgctggctcgggctgcagttctctcatggctcgcgcagggtggaccagccccgttcctttatgtgtgtgtctactgctgacctgtggctttgccgaggcagggaagctgctggtagtgcccatggatgggagtcactggttcaccatgcartcggtggtggagaaacttatcctcagggggcatgaggtggttgtagtcatgccagaggtgagttggcaactggaaagatcactgaattgcacagtgaagacttactcaacctcgtacactctggaagatcagaaccgggaattcatggttttcgcccatgctcaatggaaagcacaggcacaaagtatattttctctattaatgagttcatccagtggttttcttgacttatttttttcgcattgcaggagtttgtttaatgaccgaaaattagtagaatacttaaaggagagttcttttgatgcagtgtttctggatccttttgatacctgtggcttaattgttgctaaatatttctccctcccctctgtggtcttcaccaggggaatattttgccaccatcttgaagaaggtgcacagtgccctgctcctctttcctatgtccccaatgatctcttagggttctcagaygccatgactttcaaggagagagtatggaaccacatcgtgcacttggaggaccatttattttgccagtatctttttagaaatgccctagaaatagcytctgaaattctccaaacccctgtcacggcatatgatmtctacagtcacacatcaatttggttgttgygaacggactttgttttggactatcccaaacccgtgatgcccaacatgatcttcattggtggtatcaactgtcatcagggaaagccattgcctatggtaagtcacctctcctttagcacattaagaataatctggctttggaaattaaaaaaggattccttactgaactgtgatttgacattttcgtttgttgcatttcaaatttctttccagtttaacaaattattttstgcgaattcatgtactcatcaattatcaaattttataaaactgcccttcttgaaagtatatgtaataatttraaaattatagatcatattcaggctacattttaaaatacgatgtttagaaaagtaccaaaaaccacagcaagaaatgaaacttccgttttttgttaattctatgtgaccccgtagttgaaatgctcttaagttttgtgtacattcttttcattgaaaaaaagtattttaggcatatgcaatatctcatgtaagttcccatacctatttagtaaaaataaaatctagtattgggctgaacatattcttctttatcttgcatttttcacttgccaataaattatgggtacctttatagagcaatacagacagatttgacaagttcttttaataattgcataaaattctttactttggatacaatgtagttttttaaccaattaatattgatatatatatagccattttccactctttccttttgtgaataaggctgtgtaaacactcttcaatactttccttgcgtgaatatatttctatattcttgcttttatcttagtagactagagtcctacacgtagggttacagggttttcctgaattgagaagactggcatctttttgctattaagtcttcctgttcaggaacatatatgtctcactatttattcagatcttgttttatatacataaataaaaattttcactatataagcattttatgtttgtttttaacatttattccttggcattttattactttagaaactattttgtacagggcaatgtttccatttctacatttaactgattactggtaattaaaattttggtttttgcatatgtatcttgtatccagccacatcactaacttttcttattattttgtagtatgcattagatgtacaatatacaataccatctgcaagtaattcccttgtctgatatttgtactgcttcttttgctttgctggagcatatacttccaaaatattattgagtaatattgttagagtagccagtttaaatagggattcggttgcttgtgactgaaaaatccttgaaaaataccagaataagattcttggcaaacgcatagttgctaaatccagatgaaacacctggtgtctcatctcattatattattttattaggggtggagtacacatttttatgtattgttctggtttcttacaagattcagtagactttgtaacacagttatatctgtcattggcagatggttggtgaaagagtgaccgttcagccatctcataggaaagtgaaataatgctctttctaaaaagcaggaagactacagttgtaggcctttcaaaattaggcatgactttcagctcatggcaagaccaggcgaggagatgcaagttgcaggactctaagaggttggacttatcaaagcacttttctcctcgttatcctccattaattacagtaccaagcaccacccatgtgttgcctacaccccacagccttyggccgagttgaggatctgccacttcctgaacccacgctgagtttattgtggctcacagggtcacctagaggcctttaaagatataaaaacctatatatgattttatatcacctgtgatagagggatatctataaaaaatgaaacattaaactatatatggtttcatttattttgattgtaaatatcttttatgagatatgaaataaatgtgtttctatatctattaaagaatatacacatgtatgaaagtttttatagtttgcagagggttatgtatattaatgtatatttttatgattatacctgtaaaggcagcagaattctcacagaggaattcgatctcaaagagggctttctgtcaaagagccttggatatggcccaaccacaaaagtaaaagtaaattgtcatcaaaagaacgatgaacactgcatattgctctttccttgtttcagatgccaggatgtgtctgggaaaagcatgcagttggttacatcttgctgggaaacaggattcagagtctgagtctcatctgtctgatgagaaggaarcattacttgatgatagagtatgtgtttgcacatgtatgtgtttgtgtatgtgcaggtgtgtttgcgtgcagtgtcccagaccctgcacaggggatttcttgaagatctcctgtaacaaaatctycttgagtctatccaggagaattacagccagggatgtaattaaatactttaacaatgatggcagatggccccatctccaatttcaacatgggatttggaggggacaaacttttaaactatatcaattggtatggtcattcttttacatttcagtattctaatgtgtgtgtgttgattagtgatgtgtaaataattcagcagaacattgaaatagttttaatgagaaaaagaggaagtcactcytagtctctttgaatttttggtgagttccaacagaattgatgactggttttaggggaaaagaattcaggcttcatctataccatccatggtaggtgcagctctgcagacctggggataggatgtggttacagagcaagaaaagatctgtgctttccccattgctctaagattctggctatagtccaagatccaaattcaaagttaacttttggttgacaagactaaggcctcccactaraattgtttacttcaagtatttattttcaaagttttcaaacatacaaaatgaaaagactatagtgtaatgtgcamctgtatatcaatccttaggctaaataattttcagtgttttgctgtattaattcatctatccccttattctgaccttttaaagaaactttttggctgtcatttttttagtggaaattcttggcttgtcattccatcattgaatattttattaaatataaaaaataagtaaaatttgttacacggccacaatatcgttatcacacctaacacaataataatactttaatattatctcatttctagcccataattaatttacctccaattgcctcatacaacatctttttatgttgatctatggaacagagaattcagaaataaacccatacatccttggtcaattgagtaagttccaaattttatgagggtgtcaagaccattcaaatgggagagaacagtctcttttttaggctgcaaatgctgttcttccatagtccaacagtgaccctccccaatttaggggccaacccagggatctaggtccatgtaacctcctgataggccaacaatcttaggtagggccaactctatacccttggtcagtaggaagcagttggaagatgagaccttcactcacatgccaaagatttgtcattgttgctatgtcaggggggaaatgtggagccctaattagggaaaaagagctaggctggcaggaccaggggaaagcaaaaaagaaaaagcagatgaactataagtctccctttcttcatggtctaggacacatagccctcctgcaaaaataacataatcttcctgcacccagcgatcaccagaccctcagctgatagaaaaatgcaagttatctcactgcaaccttggcattatcaatactgcatctagctctctgcagcacaagcaccatcctataaaatcctcagcaagcctttgtctccttgcagccagctcttctcttgctgactatcttgcaacatattttcctactttctctaataaatctgcctttctttacctacaagtatcttggtaaattctttttacctcccatgccacaccagtctcagagagttgccacccatgacagttaccataaggcttgcaaatactatcttataaaccttattttaacctgataacaacttaacactatttgcataaacaaacacacagcaagaagaaaactaatagaaactagtcttaactttgctccctactttttaactctttgtgattttcatttatatcttgttgtactgcctatatcttaaaaagttgtttagttattatttttgatttgttcattgtttagtctttatatgtaggataacagtagtttgcacacacagttacaatgttataatattctgtgtatttctgtgtacttactattaccagtgagttttgtaccttcagatgatttcttcttgctcatgagcttccttttctttctgattgaagtactccctgtagcatttcttgtaggatcggtctggaattgataaaattcctcaacttttgtcttggaaagtctttatttctccttcctgtttgaaggatattttcaccagatatactattctggggtaaaaggtttttttttcttcagcactttaaatatgtcatgccactctctcctggcctgtaagggttccactgaaaaggctgctgccagatgtattggaactccattgtttgttatttatctcttctcttgctgcttttagaatcttttctttatccttgacctttgggagtttgattattaaatgccttgaggtagttttctttgggttaaatgtgcttggtgttctctagccttctcatacttgaatataggtatctttctctaggtttggaaagttttctgttattatccctttgaataaactttctactcctatctctttctctacctccactttatgggcaataactattagatttgcccctttgaggctattttctagatcctataagcatgcttcattgttgtttattcttttttcttttgtctcctctgaccatgtattttcaaatggcctgtcttcaagctcagtaattatttcttgtgtttggtccattctgctattaaaggactttgatgcattcttcattatgccrattgcatttttcagctccagaatttctgcttgattctttctaatgatttcaatctctttgttaaatttatatgctggaattctgaattcctcctctgtgttatttggaatttctttgagtttcctcaacacagctattttgaattctctgtctgaaaggtcgcttatatctgtttctccagcgttagtccctggcaccttatttaattcatttgatgaggtcatggttttcctgaatggcgttgatgctagcagacattcttcagtgtctgggcattgaagagttaggtgtttattgtagtcttcattgtctgggcttatttgtagccgtccttcttggaaaggctttccagatatttgaaaggacttaggtgttgtaatctaagctgtttctgctttagggggcaccccaagcctagtaacgctgtggttcttgcagacttgtagatgtattgccttgatggtcttggacaagatccaagatacttctctggattccagcacatactcttgctttcttcccttacttcctcccaaaaatacagagtctctctctctctctcactctctctctctctctctgtctctctctctgttctgagccacctcaagctgggggtggagtgacacaagcatccttgtggccatcaccactatgactgtgctggatcagacctgaaaccagcacagctctgggtctcacccaaggcctgctgtaaccacctcctggctactgcctatgtttgctcaacgcccttgggctttacaatcagcaggtgatacagccagccagacctgcatccctcccttcagaatggcaaggtcccccaggccctgggtgggtccagaagtgccatctaggagtcagggactagagtcaaaaaccttagcattccacctggtattttattgtattgcagctgagctggcactcaaaccacaagatgcagtccttcccattcttccctcttatttgcaaagacagaggagcctcaccttgtagccactgccacccctggccatggacagtactgccagacttctgctggtgttcccttaaggcccaaggtcttaagtcaacttgtggtgaatgctgcctggcctgagacttgcccttcaaggcagtgggctcccctctatcccaggggagctccagaaatgctgtccgagtcaagtcctggaatcagggaccccaaaagccctcttgatgctctatccccctgcagcagtgttggtacctaagttataaggcaaagtcccctttacctttccttgtgctttcctcaagcagaatgagttttgctccatagccatcacagctgrgaatgtgctgaatctcacctagagccagtaagtctcagaggctcaccaaggcccttgacgtagtacgaggtttcactgctggtattcaggttccaaggtctcttcagttagcaggcgatgaacgctggcaggactgggccctttcttttaaggcagcaggttcccttctagcccagggtgtgttcagaaatgtcatctggaagctagggcctggcacaggggcctcatgattctgaccagtgccctatcctgctgtggctgagctggtctcctaaatgcaagacaaagtcctccccacttttccctctcctctcctcaagtagaaggaaagggtctcttttggagccgcaagctgtgcatcctgggattaggggaggagtgatgtcggtactcccttggctgcttcagctagtgtttcagtatgtcatactcccctttacccagttcactgtctctgggcctagtacagccctagaactcacctaagagttgcaatctttatggactagactgcctttcaagtttacttgaggccaagaccattttggccctcggtggtgaggtctgtgggcattcaagttcagacctctgagatcagcaatttccctcagcctagggctggtttaaatgctccctcaatgctgggcacggtggctcatgcctgtaatcccagcacttagggaggctgaggtgggtggatcacttgaggccaggagtttgagaccagcctggccaacatggcgaaacccaatctgtactgaaaatacaaaaattagccaggtgtggtggtgcatgccggtaatcccagctactcaggaagcagagattcgcttgaacctcggaggcagaggctgcagtgagccaagatcataccactgcactccagcctagatgacagagtgagactccatctcaaaaaataagaataaataaataaataaataaataaacgctctctcagtgggtgggtgtcagctgagtttggtctgggtttcctttctgctctaacagaatagcactgmtttcagtgcctcccaattgtctcccaccagggctcagggattctctttatgccacaccgccactgtgggttcagggggttgggtgacataggagatgcagaacttttttttttctatttcttcagtgtctctgagttatataaaatgaaaaccaggtactatgagtgctcacctgagttttggttcttatgaaggtggtttttcctgtgtagatagttgctaacttggtgtcttctctgtccagattcttttccagtattgacaatcctttacatagaaaactgtgtgtaatgagttctaaaggttcttatgacccctgattgagaagctgaattagagatattgggtttgggagcaggtagaccactttgacacctttagggttctgggtggctagggacattgtccaatatcaaaagaactttaaaaaacaatcccttactggcaatgcattttctgccttcagggacaaagcatcgatgaaagcaatccagaaaaattgttcttgttgactaggcttcttgagagacttattcactatcaagagaacagcatgggaaagacctgcccccatgattcaattttcccaccaggatcctcccacaacagtgggaattgtgggagttacaattsaagatgagatttaggtggggacacagccaaaccatatgattccaccctggtccctcccaaatctcatgtcctcacatttcaaaaccaatcatgccctcccaacagtcccgcaaagtctcagcattaactcaaaagtccacagttcaacgtctcatctgagacaaggcaagtcccttccacctatgggcctgtaaaatcaaaagcaagttagttacttcctagacacaatgagggtacaggtattgggtaaatacaccattccaactgggaaaaattggccaataagggggctacaggccccatgcatgtcagaaatccggcagggcagtcaaatcttaaagctccaaaatgatctcctttgactccatgtctcacatccaggtcttgctgatgtaagaggtgagttcccatggtcttaggcagctccacccctgtggctttgcagggtacagcctcccttccagctgctttcacagagtggcattgagtgtctgtggcttttccaggtgcacagtgcaaactattggtggacctaccattctgaggtggagggatggtggccctcttctcacagttccactaggcagtcccccagttgttgctctgtttgggggcttcaaccccaaatttcccttctgcactgttctagcagaggttctctgtgagggtcctgcccctgcagcaaacttctttctggacatccaggcatatccatacagcctctgaaatctaggcagaggttcccaaacctcaattcttgacttctgtgcacccacagtctcaaccccacatggaagctgccaaggctcggcacttgcaccttctgaagccatggtgtgagctgtactttggctccttttggacacagctggagcagttgggatgcaagacaccaagtccctaggctgcacacagcagggggccctgggcctgtcacacaaaaccattgtttcctcctaggcctccaggcctgtgatgggagggactgctgtgaagacctctgacatgccctggagacattttccccatggttttggggattaacattcggctcctcattacttatggaaatttctgcagccggcttaaatttctcctcagaaaatgggattttcttttctatcacattttcaggctgcaaattttccaaacctttatgctctgtttcccttttaaaactgaatgcctttaacagcacccaaatcacctcttgaatgctttgctttttaaaaatttctcacaccagttaccctaaatcatctttctaaggttcaaagttccacaaatcactaggtcaggggcaaaatgctgccagtctctttgctaaaacataacaagagtcacctttcctccagttcccaacgagttcctcatctccatttgaaaccacctcagtctggactttattgtccatattgctatcagcattttgggcaaagctattcaacaaatctctagggagttccaaactttcctacattttcctgtcttcttctgagccctccaaactttgccaacctctgcctgttacccagttctaaagtcccttccacgttttcaggtatcttttcagtagcaatccactctactggtaccaattgactgtattagtctgttttcatgctgctgataaagacatgcctgagactaaggaatttacaaaagacagaggtttaattgacttagagttccacatggctggggaggcctcacaatcatggcaaaagtcaagaaggagaaagtcacatcctccatggatggcagcaggcaaagaaagagagcttgtgcaggaaaacttccatttttaaaaccaccagatctcgtgagacttacttactactatgagaacatcacgggaaacrcccagccccatgattcaattatctccctccaggttccttccatgacacgtggaaattgtgggagttccaattcaagatgagctttgggtggggacacagccaaaccatatcattattgaatttgatttgctgaaatattgttttacattttcgtatctaaggtcatgaggatctgtagtttttgtatcttgtcacatctttatctggttttggtattgtggtaatgttggtctcacagaatgaattagggcatttcacatccttctgttttccggactagattgtgagaaattggtattatttcttccttcagtgtttggtagaatttatcagtgaagtcatcagaactttaccgttttgtttgtgggaacatttgaagtcaaaattcaatttgaatttaaaaggtacagattatgtcatttgtgttattaatttcttcttgtgtaaagtctgacagcttgtgtcttttaagaaatttgtccattccatctaagttgtagattttattggcatgaasttgttcatgtttcttattgttttaatacctgtagaatttatggtgatactactgctctcattcctgatattggtaatttatatcttctgtcttttttcctaatcagtctgggtagagatttatcaagttaattgatttgccccaaaagctagctttggtgtcattggttttctccattgtttttctatttcctatttcattgatttctacactgaagttagcctccagggaaggtagatcactcactgcccatggatgggagccactggttcaccatgtggtcggtggtggagaaactcattctcagggggcatgaggtggttgtagtcaggccagaggtgagttggcaactgggaagatcactgaattgcacagtgaagacttcttcaaccttatacaccctggaggatctggamcaggagttcatggcttttgccaatgctcaatgggaagcagaagtacgacgcttattttctctattaatgagttcatccaaatgtttagaatttaatttttcacattgcaggagtttgtttaatgactgaaaattagtagaatacttaaargagagttcttttgatgcggtgtttctggatcctttagatatgtgtggcttaattgttgccaaatatttctccctcctctcggtggtcttcgccagaggaatactttgacattaccttgaagaaggtgcacagtgccctgcttctctttcctacagtcctagatatgtctcagggttttcggatgctgtgactttttattattattattatttttatttatttatttatttttgagacggagtcttgctctgtcacccaggctggagtgcagtggcgtgatctcggctcactgcaaactgcacctcccgggttcacgccattcctctgcctcagcctcccaagtagctgggactacaggtgcctgccaccacgcctggctaatttttttttgtatttttagtggagacggggtttcaccgtgttagccaggatggtctcgatctcctaacctcgtgatccgcccgccttggcctcccaaagtgctggaattacaggggtgagccaccacacccagcctggaygccatgacttttaaggagagagtaaggaaccacatcttctacttagaggagcatttattttgcccatattttttcaaaaatgccttaaacatagcctctgaaattctccaaacacctgtcatggcatatgatctctacagccacacatcaatttggttgctgcgaatggactttgttttggagtatcccaaacctgtgatgcccaatatgatcttcattggtggtatcaactgcaatcagggaaagccagtgcctatggtaagtcattgctcctttagcacattaaaagtattctggatttgaatatttaaaaagattccttacggaactgggatttgacatttgtgtttgttgcatctaaaatttcttttctgtgtaaaaaattattttgtgccatccacgtgtttgttggttagcaacttttatataatggcctcgttaatatgtatgtgtatacgattggttaattgctcataatttccactgcatttttaaaattttgaaacagagtattgctatggtgccctggctagactcaaactcctgggctcaagtgatcctcctatctaagccttccaagcaattatgacttttttagtatttttggaaaagtatttaaaagcacaataagaaatgaaaatttcatttttaactaacctgtactacctgctgcagtaaaatgttctttgcagttttgtatgcatgtgtttccatctgttgaaattatatataagcatatatgtaaatatttatacttattttatgaaaatcaaatcaactatcaggctggacatgttgttctttactatgcgtttttacttgccagtaaaccagagacatcttcacagatttgacatgttcttttaataattgcataaaagtctttactttggatgcaacatagacacaagctttcccaggtgtttttctgctaaagatttggctaacttcttcaaaacaacaatgataagcagatgttatctttctttgaccctgaagaaagtataaagcagaatgcccttagccacccaaaaaactgttaccatgatgtttggtcttgtccagtctgcttttgatttgactggatcactttcatctcttggtagccattgctttgcttgtgctttgtcttcattatcatactggtaaatctatgtttcatcttctgttacaatctttgaagagatacttcaaggttttttgtttgtttgtttgttttgagacagagtttcactcttgttgtcgaggctggggtgcaatggtgcgatcttggctcaccacaacctctgcctcctgggttcaagcgattcacctgcctcagcctcctgagtagctgggattataggcacatgccaccacacccagctaattttgtaattttagtagaagcagggtttctccatgttggtcaggctggtctcgaactcctgacctcaggtgatctgcctgcctcggcctcccaaagtgctgggattacaggtgtgagccaccgtacctggccaaggtctggatcccacttgtttataatttccattgaagggtttgttcttgtctgcagctgatctggctgcaatgattttggcacccaacaagtagaaaatttgttcaactgaaatttttgtcagaattgtgtaaactgtcctgactgagatatctattgtgttggctattgtttctgctgttaattgtcagtcttcttcagttagagcatgagcaagatgaattgtttccttgcaaattggtatggatggtctgctggtgtaggctttatttgcaaccttgtcctgtcccttcttaaaaggaattactcatttgtaaactgcaaatttcttttgaccatttttcccattaacttttttttaaagcatcagtgatttcaccattcttccactcatatctcagcataaattttatgctattgcttcaattgctgcagaattcatgttgttttgatgggggcttttttccaactgatgtcctatccttcttagtgcctcaaactagatcctattcagacatgttttaacaagttagtaaaagtttgtttggcacaaagaaatttgaaatccatgcttaagtttttcataatatgaattttcatgaattgtttgatgatccctcatctattacttttttagcaatggaccatgcaattttggctatgttctggcttcttacaaggttcagtagactttgtaacacagttgtatgtctcacacatcggcagctgtttggtaaaggattgacttttagccaactcatgggaaaatgaaataatgtaaaaaacaggaagactacagttttagacctttcaagtgaggcatggctttcagctcttggcaagaacaggcgaggagatgcaagcctctacaaggctagacttttcaaagtgcttctctcccctttaccctccttcagttacagcaccaagcaccacccaggtattacctgcagcctcaccctctacccagttgtgggatcctgccacttcctgaacccacactgagttccttgtggctcacagggtcacccagagggcttccgagatacggaaagctatgtgtgattttatatcacctatcatgttaagatatgtataaaataggaaacatattggccatatatcattttatatattttkggttttacatgtctaaaaaatacatgtttttttgtatgtattaaaggataggtatgtataagaggttttatagaagtggaaagttatattttttgcatatctttatgaattataataaaggaaggaaaattctcaaagaggaattcagatatcaaagagtgccctttgacaaaragccttggttacaacatacctacaaaagtgaactgtcattgaaagacctatggacactggatttctctttccttatttagaagggcaggctgtgtcttggaaaagcatacagtttgttgtatcttgctggacaacaggagtcatagtctgaagtgtctgatgagaaggaagcatcacttgatggagtgtgcatctgtgcctgtgtgtgtccacgcgtgtttgtgtgtgtgcatgcacacatgtgtcagcatgcagtgtctcagatcctacataggggtttttcctgaaggtctycagtagcaaaaactcattgagtctatccaggggaattacatccaatgctgtaattaaatactttaacmaagatagcagatcatcattcaagagaacatcaagatagttttaattaagaaaaaaaaaaggaatcactgccaggcttttttagtttttggtgagttccagcagaattgatgactaggtccagtaggaaggaattcaggattactctttaccatccagggtgagtgtagctctggagaactggggatgggaggtgactgcacagcaagaaaagatctgggcttcccccattgctctaagatctggttccattgtgagattcaaattaagagtaagctgttaatgggcaagtccaaggcctctcaccaggattatttatttcaacttttttttgtcaaagttttcaaatgtatagcaaggagagactacagtgtaatgagcacccatatatccatctttgtgttacataattttcaatattttattatactgattcatgtatctgctcttttgttctttttttaaaaataaattttggctataattttttaatggaaatgctggagatatcattctatccccaaatacttcactaaatgtaagaaataaggaaaaaaggaaaatttgttacatagccacaatatcattatcattcctcacaaaatcaataactctttaatattgtctcactcataatgcataatgaaatttcccctaattgtctcaaaaatgtcttgtacatgcagatcagtagaacggagttgagaatccagatataaacccatacatccttggccaattgatttttactgtggtgccaagactgttcaaatgggaaagaataatctcttcaacagaggtcgctgagacagctgcatatccacatgcaaaagaatgaagatgcacccttatatgcaaaaactaacttgaaatggatcaaatagctaaatagaaaagctagaagtgtaaaagtttagaaggaaacatttggggaagtatttatgacccagatttggaaatggtttctgtgatgtgacacacacattgttgtgtatgagaaacaacaacaacaaaaaacacagacatcaaaataaaacacttttgtgtgtcaaggacactatcgagagagtgaaaagtgaacccacatggcctctctaagatgtgcaagtaaacatgtacgtgcctgacatggaggctcctgggaggcaaccacagtcccaaaagacctgaaatttcaaaatcctgaatgttaagagcctgagagatcaacgtcctacaaatgtaattccagaaaaaataactttaaaaattatttatttgaaagataatctgtttacgttttaaaaggggatttatttgaaaaacatataaaaacacgacagaccacttcataggccactttacaccataaaataggtaataayaacatacaggtatctttgcaagcgtaaaccctcaggtgtactaatgaccttcatataggtgtatcaattgtgagaagatgaatcatattcttaaagtaataggttaaaaaaggaaaagtatcaatatttattactgtggttggtaatcttgtgcactcaggtttgcagctttgatcatctgaaataccatgaaaaatgacctgagacttatcatgaggtcagtcagaaacctctatgggtcaccaccgcatacacagttgcttaaagtgcccaagtcttgagaaattttgttttgttttgtttttttgagacagagtctcgctgtgttgcctatgctggagtgcagtggtgcgatctcagcttactgcaacatctgctgcccgagttcaagcgattctcctgcctcagcctcctgggtagctggaattacagatgcccaccaccacagtcagcaaatttttgtatttttagtagacatggggttttgccatgttggccaggttggtcttgaactcctgacttcagatgatctgccctyctcagcctcccaaagtcctgggattacaggcatgggccaccacgcccggccaagaaatgttatctttcacagatgcagatgtrcaaaagggacatctcttcattattgaggacatttcaacatttgtacgtacatgcctaatgcttacacacttactcttgtgctaatgcacttccatggagtcaaatttgtgagcataaaatgaattagaattctccataagtctatacacagtctctgccttcagtattggraatgatatgaagatgaaatacatagcatagcaaattgtaaaaataatgctgacaatttaaccttgtgaaaaaacctaaaaagaagaaaaagtaaaagaaaaaaaggaaaaaaacctccaaattaacctattctgtgattgtgatttttgggattttagctgttagagagtttagatttcagggagttagaccttagggatttggatccttagggaatcaatatttcagaattcaaccttcaggattatgtgttttggggttatgtctttcaggattgtgatccaaaccctatagcatcttgtttcttagcataacctgtactaatcgtagatatatctctgtactccagcagagcatcataaaattaagtagtttacagcagagagtctcaacctatcagtgattaaggaatagaaaaaaacgttttctgcagttgattatatattcataattgtttgtaatatataacaaaaatgaaaagctagaaagtgaaatgaaataaaccacagccctataaaatgcaaaactactgatgattgcttggcgacatagcaacaccaattgctacaggaatttctaagcatttcctgcagggtctgcacccatgctgaggtggttaggtaacacaacgagctgcaaaccacatcttgaacagactgttttagacccagtccagtggctctatgtgagtagtgtttaatcagaaataaggcccagcacagtggctcacgcctgtaatccctgcacttagggaaactgaggtgggcggatcacctgaggtcaggagttcgagatcagtctggccaacatggcaaaaccccgtctctactaaaaatacaaaaattagcacagtgtatggcgggcatctgtaatcatagctactcgagtctgaggcagaagaatcacttgaacctggaagatggaggttgcagtgagccgagatcataccactgcactccagcctgggcaacagagcaagattctctctcaaaaaaaagaaagaaagaaagaaaaagtaaacagaatactaaagaaagaaagaaagaaaaagtgaacagaatactttctgttttgttaatgtgctaattacatggtcacaaacagtgactaatttgtgatcaccagggcaaagtctattatcagctacctgttttccttgtaaccttgtgttttgggaacctagcaactctactccccactaagtgacaacccatgcaggtttgcccagattattcccagtttaacactggaartctcacgtcctgggagactcttcattccccaaggagcagggacagcaggtcactgtcactggagcactggaagctggccacatcattagcagattcagaaggggcacgacttaaggaggctcatgcttctcttgtcttctgccttaggctgtcatttccaatgggtgacaagttccttccatgcagaagccaggccaggagataaagtcatcttgtcctagaaaaactgttagaaagaagggaaactgtctagtgtgtttcgccaaaagagtttcacagactcttctcttgtaggggatatgggggtgggtgatcactgtcctggtctccctgaagcaaggacgcctctctggcctcagggtgcctgtcaggcaagtctctcctgtccctggaggttcacagagcmgcatccctgcaagagcaatgctaagtggggttggctttgagccccagccattctcttaacaattcttttagttaagtatcagttcccccatcccctcactccagcattttttgcctcttgctatgatcagttttctcactttcacttttacacctctgatcactgaaaaattacagaattataagtttggaaaaggagtctatatttcttggaaaaggttacaaccttcaaggtggccatctagctggctgggaagcatgacctctggcaaataccagagacaggcccttgaaaggagaagggatggggtaggagctttatgctgaacaaacagggtaaacatacatattcaccaggttacagaaggagctatgaatatttatgaaggccatcctgactcatgcgtattgaacacacatgcatgttacatatgacccgtgttcaccctggggtggagacatcatatttaaatggattacaattaggccctatacatcaaaaggtctcttcagggcacaaaggcactcaaattcacagtctccgtaaactggccagaaccagtctgtgatcaccagtcactggtcttcttaccaggagaaagttactgaaatcagcctcttgtccaatgaaagcagtatttgtggcttatggaacaaggaatggacgtcagttagtcagtgtccggtggaggtgcacttgtttaacattgtttttctctagacctgtgcttatttagctgctagagaaaaagaaaaactctgtggcagttggaacatagtttattctttaagtgtaggcgcccatgactcaactcttgcctggcgtggtttgaggtcttgtgtgtagttttgtatctgattgccacaaaaagtccactgagtccatctcatctctattttaacactaaagtgggtcagttgtgtttaaaccacaaaagggagggagtgtgacgaggcgtgtccagccttctgtcccgtcgtggctgtgactcagttttgaaggtttctttggggtcccgctggccaggagggttygattcacttgttgtgggagacgggcggcacttagtattttcttttcagtttacacgttcctgggcatccctattaagatgtgcagataaacasgcacatgcttcatgtggcatctccyttagttaaacatcttttttttttttcctttcctgtgagtcttcctgaaacaggtgagcccaggtggagcctccgcctgcgttaggacctaacctttctacgtctttatgaaatccctggtgtcagttactgctgcttcccctcaccagcttctttcctttggtctaccctaagaatgtgatacccaacacaatacaccgtctctttggcccactcaagacattctggtgatgccctgtggcctgctggcccccactagctatcaaggtcccccatcatctcacctttcctggctcatgggctttattttatgccactcttcatgctcagaagcacctggcggtttagtttttttgtgttgytctaaaggaatacctggggctgggtaatgtataaggaagagataatatctggccctcagttctgcaggctgtataagaatcatggtaccaacatctgtttctggcaaaagacttgggctacttccactcatggcagaaggtgaatgtggaaggtgctgatcacaaggtgagaaagaagcaagagaaaaaggaggggttgccaggatctttttaacaatcagttcttgcaggagcaataggacaggaactcacccattatcgggaaaaacatactaggtcatttgtgagagatccatccctgtaacccagatacctcccactaagccccacctccaacattagggattaaatttcaacacttgacttgagggagtcagatatctaaactatatcatttgatatggtcagtctttttgattgcagctattctaatgggtatgtaaattaaattgcaattttaatttgattttcctatttaaatatgatgttgagcatctttatgtgtgactgtttgccatctgtatatgttctttggtaaatgttcaggtctatgccactttttaagaaattgggttttctcttcattattgaggtttaaaagttatttatatattctggatatttatactttatcagtttctgggcttttttccatgaaactttttattttagaagaaatttagatttatgcaaggttgcaagaactagcacagagaattttcatatcctgtgcctagtttcctcctcttttttttttttttttttgagacaaagtgtcactctgtcacccaggctggagtgcagtggggcaatcttggctcactgcaacctctgcctcctgggttcaaatgattcttgtgcctcagcctcctgagtagctgggattacaggtgcacaccaccatgcccagctaatttttgtatttttagtagacacagggtttcaccatgttgaccaggctggcctcaaactcctgacctcaagagacccacggaccttggcctcccaaagtgctgggattacaggtgtgagcaatggcacccatcctcccctatggttaaatgttacgttactatagcatattatcacaactcattaaccaacatttgatacattatgatgaactaaagtctrtgttctctgcagatgtcattaatttttacctaatgtcctttttcatttctaggatcccatcctggataccaaatgacatttagcccatcacgcccccttcatctcctgtaccgtgtgacagtttttcagactttccttgttttcgatgactttgacagttttgagcagttctggtcggatgttctgtagaatgtttctcagtcttggtttgtctgatgttttgatcatggttagactggggttataggttttaggaagtaagaccacaaaggtaatgtcttttcttgctttcttgactatggatagccaactcttgaaaagagtagtcttttctccactgaattgtctttgcacttttgtaaaaacttggttgttcatactgctaaacatctatttctggactttctactctgttccattgatccagttgtgaaatatgtgataattatagctttgtaatgtcttgaaatgagtagtattagctctctaatttttttcaaagttgtttttgctattgtaggttttctacatttctgtatgaattttagartcagtttgccaatttgcacaaaaaaaagcctgttgggattttggttgaaatcatatttaagttacagttcaactggggagaaacagcatcctaacaattttgagttttccaattcttgaacatatctctatattcagatctctcctcagtgttttagttttcagtgtagtctttcacatctttgatcagatttatccctaagtatttcatgtttttgatgttaagtggtattttcattcaatttgcaattgttcattgctagtacagttgacccttgaacaatgtggagattagggataccaacctcgcaggtaktctaaaatccacatatcattttgacccccataacttaactattaatagcctactgtatagcagaagccttaccaataacgtaaatagccaatgaacacatatttgatatgctttatgtgttatatactgtattattgtaataaagtcagctagataaaagaaaatgttattaagaaaattttaaggtttgagaaaaaattttagggttgagaaaaaatgtattaagtattcattaagtggsagtggatcatcataaagatcttccttttgattgtcctccactgagtaggctgaggaggaagaggaggggttggtcttgctttttcagggatggcagatgaggaagaggtggaggaggtggaaagggaggcaggagaggcaggcgcactcgatttaacttaatggaaatacatcataattactgtctgacatttttgctctttcagttctttaaaaatgcttgatatagtatgaattcttcttcaccatttgctttagtttcagtgcccatatcatagaagggtacaatttgcaaaagaagtcaaaagcagtcttcaataatcggaatccttctgcgagattgtctaatgtcaatttattttctgacactgcttcttctgtatcttcttcctcattgtctggtactgattcaaaagcactcatctcatcaagtcatcttctgttaattcctcaggtgtggtgtctattagcttttaagtatctccaagatctctgtcttcaaactctttatgcccaccttgtttttcttgcctgccatatccacaatttctttcatgagtcccttgattggctctgttttaagtcctgtgaagtcacgcacaacatctggacacagttttctgcagcgataatgtattgtttagggcttgatggctttcacagctttttctatacaacaaggacatcttccacagtgtaatccttctagattttcatgatgttcgccccgctgacattctcttccatagtgttgacaatcctttccatagaaaaccatgtgtaatgagccttaaagtgccttgtaacyccttgttctaatggctgaattagagatgatgtttgaggacatggagaccactttggctccttttgtgttgaattcatggggttctggatggctagaggcattgtccaatatcaaaagtaatttaaaagacagtcctttagtggcaaggtatttctgatttcagagacaaagcrttggttttcatggaaccagtttggaaaaagtgtttctgttgtactggccttcttgttctacaacaaaaagactgggagctggcgtttattttttcccttaaaggctcaaggattagcagctttatagataaggttattcttaatcataaattggactgtatttgcataagacgacagagttagtctatctcttcctggcttaaatcctcgtgcccgcttctcttccttacttataaatgtcttttgtggcattttttttctctagaatagggcacttttgcatgaattaaaaactggctcaggcagatattcattctcctcaatgcttctcttcatggggtctgggaagtcacctgctacctcttgtttggcagaagttgcttctgttatcttgagatttttaaagtcaaacctctttctaaaactagcaaaccatcctttgctgccattaaattctccagctttatatccttcagttttatttagctttatgttgtcatataatgactttgtttttctcaggtcatattagagtatataggtatgcctttcttataaccatcctacacccacataaaagctgcattttttataataaaattttatgtagataatcatgatacagaattactctttgacaaattatctatggatgtaatgactctagtttcagactttttttttctgaaatatgtgagcgttccccaacagtctggtctattttcctaccttaattttctacttttggtcttgaatttgttgatagggcacagaggacttcccatgaggctgtaaagaacttatttctctgtgtgggctgtgcacaccatggtgctgtcattaccattaccaccaggagactccttaaacacttaggatatatgatagttttcacttggttaaaaaatctgccagtttctcagtaagacctttctcactattaatctttaacccacagatggaatcctagttctttttatccattaactctttgaatatccttctttctaccttggcagtggagtccattgagattgaaaagctgcatttttaatatgagataaaaagatattttggaaaaagtgcaaggtttgaagcctgctggcatcactgcagtgaagacttactgaattttctttctttctttctttctttctttctttctttctttctttctttctttctttctttctttctttctttttaaacaaaggtccttatctggattcttttttttttttttaatgatcgccaaccacagctgcagtcctcaacctatggtacatatcaagcaattcaacttttcttgtaatatcatgaatttctctgcttcatgggagcacttgaggcatcactagcgacactttgtatgggtcctatggtattatttagagtttctgatatgcaccaaacatgacaaacaatgcatgagaactgtgagatcagtgtttactgtgatacacaatttactggagggatgaactgtacacatggagatgatcagcctcacacggcgtactgagtggatacttgcaacacttgaactccctgcaatagcaacagggggtggctatgaaattatcacaatagtacagtaggcacagttaactctatgcagttatgacttaatgctgcaaacttacctttgttacttttctcttgactacaaatggtgtcatgtatagtctgtaagtgtttgtgtgyataagttttgataaattttaactatttaaaatagatttgtgtctataatatggtagtaaatgataaaatagactcgttgctatatatattttaggcattcctgacatactcaagtttttcttaattttttcactattgtaggctatgtggcttatctgcaagtttttcaatttgttgcaaatctccataacattttctaatatatttattgcaacaaatctgcccataaatggaccaacaccgttgaaactcttaatgttcatgagtaaccatttatataaatgaaattaacttttacttattgtatcctgcaaccatgctaaacttacttatttgttcttggaggttgttgtagagtttgttggaatttccccatagatgatcatgttgactgtgaatgagatccttttacttttcagatctggatattttaaatttctttttcttgtttgactgcattgaatagaacaatgttgaatggaagtagtaattagcccccattcttggcatgtgtctgatctgaggagtggagcattcagtctttcaccattaaggatgatgttagctgtgggtttttccaagatgcccttcattagctttggaaacttctcttcttttcctagtttgctgagagtttttttttttttttgtcagatatgaattttggactctgtcaaacactttttctgtaactattaagattgctacatggttatacagttttagtttatttatatggtatgttacttagatttatttttaaagcttatttattttatcattaattatggkgaaatacacatagcataaaccttgtcatcttcaccactttaggtgcacagttcagtatccagtgtattcacattgctgtgcaaccaacaccaccattcatctgcagaactctcttcatcttcccaaactgaagcttgggacccattaaacaataattgcccattcccctctcctccaagccctggtgtaaccrcccgggggattcaccttgcctgctgcctagacagagtcaatataacaagacaggggaattgcaatagagaaagagtaattaatgcagaactagccgtgtggtagaccggagttttattattactcaaatcagtctccccaagcaatttggggaacagtttttaaggaatacttggtgggttgggggaatccagtaatccaggagtgctgattggtcagggatgaaatcttaggcagttgaagctgtcttcttgcactgaatcagttcctgggtgggggccacaagagcagatgagccagtttattgatctgggtggtgccagctgatccatcaaggacagggtctgcaaaatgtctcaagcactgatcttaggagtggtttagggagggtcagaatctcgtaacctccatctgcatgaatcctaaaccataatttctaatcttgtggctaatgctagtcctacaaagggaatctagtcccctggcaagaaggaggtctgctttgagaaagggctgttattgtctttgttttaaacaactataaaataagtttctcccaaagttggttcagtctatgtccaggaatgaacaaggacagcttggaggttagaagcaagatggagtcagttaagttagatctttttcactgtctcaggcataattttgcaaaggcggtttcatttgcaaccaccattcctctttttgattctatgaatttctctattttagatacctcatacaagtagaatgatataacttccaactttaagtcatttctttgtccttgcatctaagtgtaggtagttacaagcagccaggccacatctggaatactttactgcttagaaatttcttctgccagataccctaggtcatcactctcaagtttaaagttccacagattcctagagcatggactcaatgcagccaagttctttgttaaggcatagcaagggtgacctttgctcamgttccaaataacttcctcattttcacatgagacctcattagcctggccctcactgctgatttttctatcagtattttggtcacaagcatttaaccagtctctaagaaggtccaagctttccttcatcttcctgtcttcttctgagccctccaaactcttcaaacgtctgcctgctaccaagttccaaagttgcttccaaattttcagtatctttatagcaacatctcagtaccaattttctattagtactattttctgttggtaccaattttctacccttcattacgttgccataaaggaatgcctgagactgggtaatttataaataaaagaggtttaattggctcaagattttgcaggctgtacaagcatggcgctgccatctgttcatattctggggaagcctcagggagtgtttactcatggtagaagatgaagcaggagcatgtcacatgacaaaagcaggatcaagagagagttggtgggggaggtccacacacttgaccatatcttgtgaatactcactgactattgcaaggacaacacaaagccatgagggatccacccccatgatccaaacacctcccaccaggccccacctccaacattgggtatcatatttcaacatgagatttgggtggggacaaatatccaagctataacactgaactgtgatttgacattttcatttgtctcatttggaatttttttccagtttcatgaatccttttgtgccacttcatggacctctcagttaacaaattttataattgtagatcatatccaagttgcatttaaagatactctttttgggaaaataccaaaaaccacagtgagaaatgaaacttcccttttttgccaattctatagaaaatgctcttagtagttttgtgtgcatcattttcattttttgaaattattttatgcatatgcagatatctaatgcatattctcacacctattttgttaaaatgtagtaccaggctggacatattgttctttactttgcatttttcatttgccaataaattatagacatctttagaggccaatacagactgatttgacaagttctttcagtaatgacatgaaagtctttactttggatttaatgtagttttttcaaccaattaatattgatatagatttaggcattttccaaatttgtctttttgcacattagtatgtaaacactctttaatactttctttacattactatatttccatattcgtagcctctgatgaattcttcatcatgtgsatccccagcagctttacttctctcattgaaccctgactgctatagaatggaagtagtggctgtggcaaagtagtgccttgtacactttttgacttgaaatacaggaggcagaagcaataggaatgagggtagaggctagaccatagctctactggagtttctgcaggaaaggcaaggtagggcaggagaaacagtttagcattggttggtttgaataatttcagtgggctctgaggtctaagggcaggccctttgctatctgtaataattggctgacccagggaggtgcactgcatccctaccagatagggatttttaagatgcaaaaatataataatatacagaaaatttaaaaatacacacaatacaggaagtattttattcttatggataaatacccaacagtggagtagttgtgatctatggtaggtgtatggttacctttttaagaatttgccagacaatatttacaagcggccagaccaaggtgccctcccaccacctgcatatgagaggtccagctgttcatactcaccaacactggatgtcttagtccgtttgcattgcgataaaggaatacctgaggttggttaatttataaagaaaacatgtttatttggctggtggttcattcaggcgatacaagaagcatggcaccagcatccgcatctggcgagagactcaggctacttccactcatggcagaaggtgagggtggagggtgctgatcacatggctagagagaagcaagagaaaaaggaggcaggtgccaggcttttttttaataatcagttcttgctgaaactaatagatgggaagttcactcattactgggagggggcactaggtcattcatcagggatccactcaaacacctcctgctaagccccactttcaacattagagatcaaatttcaacacttgatttgggagggacagataattcagctatatcatttgatatgctcaatctttttcattgcagctattttaacgggatgtggattaaacctcagttttagtttgattaccctaatcattagttatcttgaacgtctttacatgtgcctgtttgccatctgtgtaccttcttgggttattctctgttcaaatctttgctcattaaaaaacattttttaaaattgaattttaaagattatttatattctggatatttatcctttaccagtctgtagatgttttttttaaagtaaactctttttgtttgtttgtttwtatttttttatttwtattttttattattgtactttaagttttagagtacatgtgcacaatgtgcaggttagttacatatgtatacatgtgccatgttggtgtgctgcacccattaactcgtcatttaaccttaggtatctctcctaatgctatccctcccccctcccccaatcccacaacaggccctggtgtgtgatgttcaccttcctgtgtccatgtgttctcattgttcaattcctacctatgagtgagaacatgcggtgtttggtttcttgtccttgtggtagtttgctgagaatgatggtttccagcttcatcaatgtccctacaatggacatgaactcatcattttttatggctgcatagtattccatggtgtgtatgtgccacattttcttaatccagtctatcattgttggacatttgggttggttccaagtctttgctattgtgaatagtgctgcaataaacatacgtgtgcatgtgtctttatagcagcatgttttacaatcctttgggtatatacccagtaatgggatggctgggtcaaatagtatttctagttctagatccctgaggaatagccacactgacttccacaatggttgaactagtttacagtcccacaaaaacaagaaatggggaaaggattccctatttaataaatggtgctgggaaaactggctagccatttgtagaaagctgaaactggatcccttccttacaccttatacaaaaattaattcaagatggattaaagacttaaatgttagaccttaaaccataaaaaccctagaagaaaacctaggcattaccattcaggacataggcatgggcaaggacttcatgtctaaaacaccaaaagcagtggcaacaaaagccaaaattgacaaatgggatctcattaaactaaagagcttctgcacagcaaaagaaactaccatcagagtgaacaggcaacttacagaatgggagaaaattttggaatctactcatctgacaaagggctaatatccagaatctacaatgaactcagacaaatttacaagaaaaaatcaaacagccccatcaaaaagtgggtgaaggatatgaacagacccttctcaaaagaagacatttatgcagccaaaagacacatgaaaaaatgctcatcatcactggccatctgagaaatgcaaatcaaaaccacaatgagataccatctcacacaagttagaatggcaatcattaaaaagtcaggaaacaacaggtgctgtagaggatgtggagaaataggaacacttttacactgttggtgggactgtaaactttttattttacaataaatttagatttaaagcaagggtgcaaaawattgcactaagaattcccatatatcttttgccagtttcccctattgctaaatgttagtttactgtgcacatttttttttattatactttaagttctagggtacatgtgcacaacatgcaggtttgttacatatgtatacatgtgccgtgttggtttgctgcacccattaactcgtcatttacattaggtatttttcctaatgctatccctcccccatacccccacctctcgacaggccccggtgtgcgatattccccgccctgtgtccaagtgttctcattgtttaaatcccacctatgagtgagaacatgcaatgtttggttttccgtccttgcgatagtttgctcagaatgatggtttccagcttcatccatgtcgctacaaaggacatgaactcatccttttttatggctgcatagtattccatggtgtatatgtgccacattttcttaatccagtctaccactgatggacatttgggttgcttccaagtctttgcttttgtgaatagtgccccaataaacatacgtgtgcatgtgtctttatagtaccatgatttataatcctttggatacatacccagtaatgggatggctgggtcaaatggtatttctagttctagatccttgaggaattgccacactgtcttccacaatggttgaactagtttacactcccaccaacagggtaaaagcgttcctatttctccacatcttctctagcacctatgtacatttatcacaactcattaatcaacactgacacattatgttgaaccaaagtctatgttttctttagatgtcattaatttttacctaatgtccttgttcttttctgggatcccatccaggataccgcatgacatttactcatcacatttgtttcatctcctctagcctgtgacagtttttcagagtttccttggttttgattactttgtcagttttgagcaattctggtgaggtattctgtagaatgttcctcagtttgagtttgtctgatgttttgattatggtaacacaggggttataggtttttaggaggaagaccacaaggtaatgtgttttcccgctttcttgcgaatggatacccaactgttgaagagtcatcttttccccacagaattgcctgtgcacctttgaaaaaacttggttgctcatacttctatttctgggtattctattctgttccaatgatctttttgtgaaatatttgattactatagatttgtaataagtcttgaaattaggtaataattgctctccatttttttttctattttttaaaagttatttttgctattgtaggtcttttacatttccctatgaattttagaatcagtttgccaatttgtacaaaaagatagcctgctggaatttagattggggttgtattaaatttatagatcaactaaggaaaaataacattttaacaattttgagttttctgattcatgaacatatctatttattcaggtctctcaccaatgttttgttgttttcagtgtacaatctttcacatcttttgtcagatttatctgttagtattttttatttttgatgctatttaggtgctgttttcattccaattttcaattgttcattgctagtacatttgacccttgaagaatgtgaggattgaggtaccaacccccgagcagtaaaaaattagcatagaaaggttttgtgggtttctttttgttttttatttttgagacagagtcgtgctgttttgcccgggctggagtataatggcgtgatctcagctcaatgcaacctccgcttcccgggttcaagtgattctcctgcctcagcctccagagtagctgggattacaggcatgcaccaccacctgcagctaattttttgcatttttagtagagatagggtttcaccatgttggccaggctggtctccaactcctggcctcccgtgatacgcccaccttgacctyccaaagtgctgggactacaggtgtgagccaccacgcccagcacacatagaatttttgactccctaaaaatttaactattaatagcctactgtgcactagaagccktaccaataacagaaacagttgcttaacacatatttggcatgttatatgtgttatatactgtattatcayaatgaagtcagctagagaaaagaaaatgttattaagaaaatcttaaggaagagaaaattaagtattcattaagtggaagtggatcatgataaaggtcttcctcttgattgtcctccattgagtaggctgagaaggaggaagaggtgggttggttttgctgtttcaggggtggcagagggggaagaagtggaggaagaaggaggagagacaggtacacttggtgtaactttacagaattacatcataattattatttgacttttttgcctttgcaattctttgaaaatgcttttttacagtactagtccttcttccccatttgctttagtttcagtgcccattcatggaagggtttgtgttgtaaaataagtcaaaagtagtcttaataattggaagcctttgccaaactgtttaataggaatttgttttctggcatggcttcttctatgtcttctttagtatctggtactgattcaaaagcactcatctccatcaagtcatcttctgttgattcctctggtgtggtgtctattcattcttgaatttctcacagattcatatcttgaaagaccatatcccccaccttttgttgctgaattagagatrttgggtttgcaggcaagtagaccactttgacaccttcagtgttgaactcatgggttctgggtggctaggggcattgtccaaaaatcaaaagaactttgaaagaccgtctcttactggcaagatattacctgacttcagggacaaagtaatgatagaaccaatccagaaaaagtgttcttgccgaggccttcttgtacaacaaaaaaactggcagtgggtattgatcttttccctttaaggcttggaggctagcaggcttatggatgggggcagtcctatttgtaaacccaaacatacaaacatacaaactatgtcaaaggcatagcatgggtactgtgaaaggagggtgaaaacacaaagttgacatcacctctgacctcaaggagtgctcagcagactgagagagacaagtacatattttcctgaaggagggcactggagtgatggcgtgtttagaatgtgcaagttgagcggtcactgagaggcagctcagcagagtgctctcgcaaggattgggcgggcamcttcccactgcgtgcgatgtatcttaggaaagccatttaaaataggagacggttactttccatcaagtccctggtatggtccatggaagcagggttgtcagtctcatttcagcattttagaggcttctcagggtttggaaatggaagaagagaagcagcaatatgtatgcattgcagagacacaggcgagccccaatttaggaggttaggaggtcagtgctaagggccttgttttctttgcttagagyatgagttgccatcttctctggacagagagtatttggttgcctaaaggtaaaatctaaattttgctctgggacaaattccaaaaaaaattagctttaatcaaatttactyttactttatctttctgaaccttcaaggtccaaaagcattggttaataattctgctwctaaacttaacattgcagcacagggcatgttctgcccccaaggcaaagaccataagctactgttgtctggaaaacatacaaatagatatctcagcaaaagctactcatatattcttgttcttttgggtaaatcattgtcagtgactgatttttttttatgaaaggataaaaacacgccctctattggrgtcaggttttgtgctggtatttctcccacctactgtatcataggagcttagattcccagctgcttgctctcagctgcagttctctgatggcttgcacagggtggaccagcccccttcctctatgtgtgtgtctgctgctgacctgtggctttgccgaggcagggaagctactggtagtgcccayggatgggagccactggttcaccatgaggtcggtggtggagaaactcattctcagggggcatgaggtggttgtagtcatgccagaggtgagttggcaactgggaagatcactgaattgcacagtgaagacttattcaacttcatataccctggaggatctggaccgggagttcaaggcttttgcccatgctcaatggaaagcacaagtacgaagtatatattctctattaatgggttcatacaatgacatttttgacttatttttttcaaattgcaggagtttgtttaaagacaaaaaattagtagaatacttaaaggagagttcttttgatgcagtgtttctcgatccttttgataactgtggcttaattgttgccaaatatttctccctcccctccgtggtcttcgccaggggaatactttgccactatcttgaagaaggtgcacagtgccctgctcctctttcctatgtccccagaattctcttagggttctcagatgccatgactttcaaggagagagtacggaaccacatcatgcacttggaggaacatttattatgccaccgttttttcaaaaatgccctagaaatagcctctgaaattctccaaacacctgttacggagtatgatctctacagccacacatcaatttggttgttgcgaacggactttgttttggactatcccaaacccgwgatgcccaacatgatcttcattggtggtatcaactgccatcagggaaagccgttgcctatggtaagttatctctcctttagcaccttaagaatacttcacctttggaaattaaaaaaggattctttactgaactgtgatttgacattttcatttgtttcatttcaaatttctttccagtttaacaaattattttgtgccaatgcgtgtactcrtcagtagcaaattttataaaactgcccttcttgaagatatgtatttataacttataaaattgtggawcatattcagcctacatttttaagtaccatgtttagaaaagtaccaaaaaccacagtaagaaatgaaacttcccttttttgttaattctatatgmccgccccagaggaaatggtcttagttttgtgaacattcttttaatgtttttaaaaaagtactttaggtatatacaatatctaatgyaaattctcacacctattttgttaaaataaaatctagtattgggctggacatattcttcttttctttgcatttttcacttgccaataaattataaatacctttatagaccaatacagacagatttgacaagttctattaataattgcataaaatactttactttggatgcaatgtagtttttaaccaattaatattgatatagatttaggcattttgyattttttgtctttatgaatagggccgtgtaaacactctttaatactttccttacatgaatatatttccatattcttgcttttatcttagttgactagagccctacatgtagggttacaggatttccatgaattgagaaggattggcatttttttgctattrtgtcttcctgttcaggaatatgtatgtctcactatttattcagatcttgttttatatacataaataaaatttttcactatataagcattttctgtttcttattaacatttattcctcagcatttcattatttttgaaactattgggtacaggacaatttttccatttctacatgtaactgactatgggtaattaaggttttgttttttgcatatgtatcttgtatccagccacattactaacttatcttattattttgtagtatacagtagatgtacaatatacaatgtcawctgcaaagaattcccttctctgatatttataccacttattttgctttgctggagcttatacttccaaagcactattgagtaatattgtgagagtagccagtttaaattttaaatagggattcaatcacttgtgattgaaaagtccatgacaaataccagaataacattcttagcaaatgtgtagttggctgaatccagattaaacacctaatgtctaatctcagtatattattttggagggatggagtatacaatttatctattgttctggctccttacaaggttcagtagacttggtaacacagtcatattctctcacatattggcagatgtttggtgaaagagtgactgttcagccaactcatgggaaagtgaaataatgctctttctaaaaagcaggaggactacagttgtaggcctttcaaaattaggcatgactttcggatcttcacaagactaggctaggagatgcaaatggcagaaatctaagaggttagacttgtctaagcacttttctcccctttaccctccataaattatagtatcctccattaattrtagtaacaggcaccacttatgtgttgcctgcaccccacaacctttggctgagggtaaggccctgccacttcctgaacccacactgaatttattgtgcctcacagcgtcacccagaggcctwtagagatataaaaacctatatatgattttatatcacctatgatagagggttatctataaaatatgaaacatcaaactatatatggtttcatttattttgattataaatatcttttatgagatatgaaataaatgtgtttatgtgtctattaaagaatatggatgtatgaaagtttttatacttgtggaagattacatatattaatgtatgtatttatgactatacgtgtaaagccagcggagttctcacagaggaattcagaactcaaagaaggctttccggcaaagagccttggatatggcccaaycacagaagtaaattgtcattgacagaaggatggacacttcatattgctccttccttgtttcagatgccaggatgtgtctgggaaaagcatgcagttggttacatcttgctgggaaacaggattcagagtctgtgtcttatctgtctgatgagaaggaagcattacttgatgatggagtatgtgtttgcacatgtatgtgtttgtgtatgtgcaggtgtgtttgtgtgcagtgtcccagaccctgcataggggattttcttgaaggtctcctgtaacaaaatctccttgaggctatccaggggaattacatccagggatgtaattaaatactttaacaaggatggcagatggccccgtcttcaatgtcagggatcaaatttcaacgtgagatttggaggggacaaacttctaaactatatcattccgtgtggtcattcttttacattccagcgttctaatgtgtgtgtgttgattaatgatgtgtaaataattcagcagaacattgaaatagttttaatggcaaaaagaggaggtccctagtctttttgaatttttgatgagttccaacagaattaatgactggttttaggtgaaaagaattcaggctttgtctataccatccatggcaggtgcggctctgggggtgggatatggttacagataaataagagatctgtgcttccccccttgctgtaagattctggctatagtccaagatccaaattcaaagttagcttttggtggacaagactaaggcctcccactaaaattatttacttcaagtttttattttcaaagttttcaaacatacacaayggagagactcagtgtaaygagcacccacttatccattcttaggttaaataattttcactattttgctctactaattcatctatccctttattctatctttttaaagaaaacttttaaaaataaatttgtatgtttttaaaaagaaattcttggcatgtcattccatcactgaacaattcatttaatataaaaaataagaaaaatttgttacatagccacaatatcattatcatatctaagacaataaaaattctttaatattatctcatttacagtccataataaaatttccccggattgtctcacacaacatctttccatacagatcaatggaatagaatggagaattcagaaataaacccatacatatacatccttggccaattgactaggtgccaaagtttgacaagtgtgtcaagatcattcaaatgggaaagaatagtcttttcaacagaagacccaccctggggtccttgagctccagcgtcagactccaaaaccatttgtggaaatcatccagccacctcccaccatgcctctgatgaatccttcaccgatggattcatcagaagcatggttgatgatgaattcactgatgaatcacccctgtgtgcatccacaggggtcctgcaaatattttctcacagtctgttgagtgacttttcttacaaatacttcattgtagaataaatataggattatagcaaggttacaacaaatagtttagagaattttcatctaccctgtgtccagtttccaccattgttaaatctcatgtttctatggcacatccatcacaactcattcaccaatattgaygcataatgatgagctaaaagctaaagtctgtttccttcagatttcattaatttttacttaatttccctgttcttttatgggatcccagtgataccacctgaaatgtagtcatcatgtctcctttgtctcctccagcctgtgacggtttctcagactctccttgtttttagtgacttgggcagtttcgagcagtcctagtcaggtgtcctgtagaatgttcctctagaatgtcagtgtgtgttttgcctgatgttttcatcgtggtaaaactgggtttatagacttttggtaggaagacacagaggtcttttcttgttttcttgcgtgtgaatattcaactgtagaaaaacagaaccttttctccactgcattgcctttgtacctttgtaaaaacttggttgttcatacatctgtgcacgtatttctagactttgtattctgttctgttgatctatttgtgaaatatttgattactatagctgtgtaataatctataaatgaggtagtgttacctctaattttttttttcaaattgcttttgctattggaggtcttttgcattaccatatgcattttaaaataagttcattaatgtgtgcaaaaatcctgctaggattttgattgggattgtattttatttatagatcaactggggagaaacaacatcttagcaattttgagttttccaattcattaacatatctttttatttaggtccgtcatcagtgctctgtagttttcaatgtacagtctttcacatcctttgtcagatatatccctaagtatatcatgtttttgatgctatttaagtggtatttttaatccagttttcaagtgttcattgctagtatagttgacccctgaacaatgtgggaatgaaggggaccaacccgtgtgtagtagaaaatccgcatagaacttttgattctccaaaaacttaactactaatagccaactgtttaccaaaagccttgccaataccataaacagtcaattaacacatagtttgtatgttattagtattatatcctgtattatgacaatgcagctagctagagaaaagaaaatgttattaaaaaacgtaacatatgaaaaaatgctcaacatcactagttaccagaaaaatgaagatgaaaaccacaataagatatcatctcacaccagttagaatggctgttattaaaaagtcaagaaataatagatgctggtgaggctgctgagaaaagggaacacttgtaccctcttggtgggaatgcaaattagttcatcccctgtgggaagtagtttggagattttgcaaagaacttaaaacagaactgtcattcgacccagcaatcccattactagatatatgtaaaaaaaatcgttttaccaagaaacacatgcactggtatgttcattgcagctctattcagaatagaaaagacatgaaatcaacctaggtgcccatcaacagtggcttagatgaagaaaatgtggaacacatactccatggaatatgcagccataaaaaaagaatgaaatcatgtcctttgtaacaacatggatgcagctggaggtcattaccctaagggaatatatacaggcacagaacaccaaataccattgttttcacttagaaatgggagctaaatagtgggtacttttgggcataaagatggcaacaatagacactatggactcctaaargggagaggaaaggctgcaagagttgaaaaactattgggtactatgctcagtacttgggtgatgggagcaatcatgccccaaacatcagcatcacacaatatactcaggtaacctgcacatgtactcctgaatctaaaataaaagttgagtatgtataagwggaagtsawtcatcataaaggtctccatcctcatcatcttccattgagtgggctgtggaggaggaggagtagatgttgattttgctgtctcagggtggcagaggcagaagaggtagaggaggtggaagtggaggcaggagaggcaggtgcacttggtgtaaccttatggaaatacatcataattactgtctgtttttttctctttgatgtatttaaaaatgcttttatacagtrctaatccttcttccccatttgctttagtttcagtgcccataagggttcatgtcttaatagaagtcaatagcagtcttaaataattggaagcatttctatgaggcttgtattgtgtaaggccaattttttttctggcactgcttcttctacatcttctttctcatcaagtactgattggaaagcactcatctctatcaggtcatctattgattccctgagtgtggcatctattgkctcttgaatttctccaagagtcatattttgaaataccttatccccaacattttgttgctgtatccataatcccttcatgacttccttgattggctctgtcataaatcctgtgaagtcatgtgcaacatctggtcacagttttctccagaagaaatgtactgtttggggcttggtggctttcaaagctctttctatartaacagtggcatcttcagtggtgtaatccttctggactttcatgacattctctatccagattctctttcctagtattgacaaccttttccatagaaaactgtgtgtaatgagttctaaatttccttaagacacctgattgagagactgaattagagatgttgggtttggaagcacgtagaccattttgacaccttcagtgttgaactyrtggrttctgggtggctagggaatggtccaatatcgaaagaactttaaaagacagtcccttgctggcaatgcattttctgccttcacggacaaagccttgatggaaccaatccagaaaacgcgttcttattgttgagtccttctttttgtacaacaataaaactgtcagtgagtgttgatcttttcctttcaaggctygaggtttggcagttctactgatgagggcagtcctgactgtaaacttgactgcatttacacaaaacagtagagttagcctatcccttcctgccttacattctggtgcttggttttcttccttgccaataaatgtcttttgtgtcatctttttttttgtttgtttgtttttgttttttccagaatagggcactgtcatctgtattaaaaccctgttcaggcagatatcctttgtcctcaatgcttttcttcatggcatctgggaactcatctgcctccttttgcttggcagaggctggttctcctgttatctggacaattttaaagccaaacctctttgtaaaactagcaaaccatcctttgttgccattaaattctccagttttagattcttcacctctcttttgctttaagttgtcataaaatgactttaatttttctcaaatcacattggcatctataaataagcctttcttatagcaatcctacacccacattaaagttgcattttcaatatgagacaaaaatgtatttcacaaaaaratgcgaggtttggctcctgctggcatagctgcagcaatgtcttcatgaatcttttcttctcttttctttctttctctctctctcttttttctttttctctttctttcttttgcaatggtccttatctatcttcattgattttgaaatggcaggcaatcatagcggcagagctcaatctacggtacctatcaagtaattcaagtttttttggtaatgtcatgatttttctttgcttcttgggagtacttgcagcatcattagttgcactttatagtcccatggtggtattcaaggtttaaaaaattacactaaacatgatgaaaaatacagtagaaccataagagatcattttttactctgacatgcaatttactagagagaagaaacgcgcagagggtataaacgtcatatcacatgcatttaggccacactttagctccctgcaatagcaacaggaggtagcaacaaaattattatagtagtgtagtatgtactagaggaaagtgactaagcaaatgtctagtaccagttagggtgtcctggaaggaaccatcttgtgcttctacaagaattatgccctgaggttggctgttgaatccctcackaaatgctcctcagtgtgttgcctaacacacactgctgagctcacccattaaaatctgcatgatggaattcagcccaatgcaatgagaattcccatggacttcctctgtgcaaggcaaagcaygggtgctgtggaaggaggatgaaaacaggtagaagatgtaatctcatcctcaaggggtgctcggtagaatggaggaaacaatacatagattcctgaagatgagcaccaaagtgattggggtgggcccatagcaaaggcctgcagctctgttcagaatgcagaagcagagtgggcagagagagacagctcatcagagtgcttgggcaagcatagggacggcgactcaccactgcagacaatgtatctgwggaaagccatttaaaataggtgacagtcacattccatcaaatttctggaagggtcyatggaggcagggttgtcaatctcattacagcatttcagaggcctcagaagatttggaaatgaaaaaagacaagcagcacttgtggctcacctgtgtcacaattgtggctcacctgtgtctctgcaatgcgcaagtgagctgtgtattgcagagacacaggtgagccgcaatttcctcccagttaggaggtcaacgctaagacccttgctctctttccgtcgaacatgagatgccaatttctttctgggcagaggacaaaataaaaattgtctataaactttggccaggtgtagtggctcacgcctgtaatcccagcattttgggaggccgagatgggcagattgcctgagctcaggagttcgagaccagcctgggcaacatggtgaaaccccgtctccactaaaatacaaaaagttagctgggcrtggcagcgtgcgcctgtaatcccagctactgaggctgaggcaggagaatcgtttgaacccaggaagtggaggttgcagtgagcctagatcttaccactgcactccagcctggatgacacagtgagactccatctcaaaaaaaaaaaaaaaaaaaaaaaaattgcaaatttttctttgtgacaaattccaaaattattagcttcgttcaaatttactttcctttttatctttcaatgtcgtcaaggccaaaagcattgcttaataattttgtttctaaactcatattgcagcacagggcatgatctgtccccaaggcaaagatgatgagttactcttttcttgaaaacatataagcaggtatctcagcaaaggctactcatgtattattatgagtaaatcattggcagtgaatgtgaatttttttttaaatgaatgaataagtacacgccttcttttgagggcaggttctatctgtacttcttccacktactatattataggagcttagaatcccagctgctggctctgggctgaagttctctgatggctcgtgcagggtggactggcctccttccmctatatgtgtgtctactgctgacctgtggctttgccaaggcagggaagctgctggtagtgcccatggatgggagycactggttcaccatgcagtcggtggtggagaaactcatcctcagggggcatgaggtggtcgtagtcatgccagaggtgagttggcaactgggaagatcactgaattgcacagtgaagacttactcaacctcatacactctggaggatcaggaccgggarttcatggtttttgccgatgctcgctggacggcaccattgcgaagtgcattttctctattaacaagttcatccaatrgtatttttgacttatttttttcaaattgcaggagtttgtttaakgacmraaaattagtagaatacttaaaggagagttsttttgatgcagtgtttctcgatccttttgatgcctgtggcttaattgttgccaaatatttctccctcccctctgtggtcttcgccaggggaatattttgccactatcttgaagaaggtgcacagtgccctgctcctctttcctatgtccccagacttctcttagggttctcagacgccatgactttcaaggagagagtayggaaccacatcatgcacttggaggaacatttattttgcccctattttttcaaaaatgtcttagaaatagcctctgaaattctccaaacccctgtcacggcatatgatctctacagccacacatcaatttggttrttgcgaactgactttgttttggagtatcccaaacccgtgatgcccaatatgatcttcattggtggtatcaactgtcatcagggaaagccagtgcctatggtaagttatctcccctttagcacwttaagaataatctggctttggaaattaaaagatttcttacagaatcataatttatcatttacatttgtcccatttggaatttctttctggtttaaggaattcttttgtaccaattcacttaattgttgggtagcaaattgtataaagcagctcttgttgatatgtaagtgtatacaattgatataattgtagatcatatctaggctgcaatctaaatgctatttttggaaaaatacaaaaaaaccacagtaagaaatgaaacttccctttttttgctaattctacactacccccagaggaaaatattcttagcagttttgtgtgaattgttttcaatttttttgaaattatactatgtatatgcatatatttagggtaaattgtcacttctattttatcaatataaaatctactatcatgctggctatgtttttttatgttagatttttctcttgtcaataagttaaagatatctttacaggtcaatgcatacagatttgacatgttcttttaataattgcatgrtagtctttactttggatgcaatgtagttttccaaccaattaagattgatagagatttaagtgttttccacttttggggtttatgagcaataataagaattcttgtatactttctttacattatatatattttcatatttttgcttttatctcagtagggtatcatcctatgagtatggttgcttggttttcactaaatgagtgagattggccttcttttgctattacatcttcctactcaagaatatgaatccctcattatttattcggattctgttttatttccataaataaaattttgcactttataaaagtatttcatctttcttattaacctttattcctctgcatttcattatttttgaaaccattatgtgcaaggcaattttcccatttctcttttgaattcactatgcataattaatgtactgctttgagttttacacatttatcttgtatgtagtcatattactaaactctcgtattagtatgtaaggtgtattaagtatgcaatatcatctgcaaattattccctcccctggtatttatacctcttattttggcggagcatatagttccaaaatattattaatattgttggtctagccagcttaaattaggatttggtcacttgcaattgaaaaagtcktgacaaatacaagagtaagattcttggcaaatgcatagttgctaaatccaggtgaaacacctggtgtctgatctaagtatattattttgttagggatggagtatacatttttatctattgttctggcttcttacaaagttcagtagactttgtaacacagtcacattctctctcatattgrcagatgtttggtgaaagagtgactgttcaaccaactcatgggaaaatgcaaccaagcgctttctaaaaatcagggagactacagttgtaggcctttcaaatgaaacatgactttcagctcttggcaagaccaggcgaggagatgcaagttgtaggacgctaagaggatagacttgtcaaagtgtctctcccctgtttaccctccatcaattacagcaccagccaycactcaggtattgcctgcagcctcaccctctagccaagtgtgtggcctgccactttctgaacccatgctgagtttkttgtggctcaaagggtcacccaaagggatttagagatgtagaaattatatatgattctataccacctataatggtatatgatagagagatctataaaatatgaaacattgagccatatatagttttacatattttggttatttgtatatcttcagtggtgtataaaatatatgcatttatatgcctttaaggaatatacatatgataggatttatagatgtggaaggttatgtattaatgtatatatttataaatakaaaataaatataattatcaaagaagaattcagatcataaagagtgccctttggcaaagagccctggatatggctcaaccacaaaagtaaattgtcatagaaaaatttatggacactgtatagtgttcctttcttgtttcatatgggcagggtgtgtcttggaaaagtatacagttttttgtaccttgttagacaacaggattcatagtctgcatttcatctgtctgatgaaagcattgcttgatgatgcagtgtgtgtgtatgtggtgtttgtgcacgtatgtgtctgtatgtgcaggtgtgtttgtgtgcaatgtcttaagctctacacaggagattttttttctgaaaggtttcctataacaaaatcttattgagtctatccaggtgaattacatccagggatgtaattaaatactttaacaaggatggtagatcatcattcaggagaacattaaaacggttttgttttgtatttttaatagagacggggtttcaccatgttggccaggctggtctctgactcctgacctcaagtgatccgcccgcctcsgcctttcaaagtgttgagattacaggtgtgaaccaccacacccggacttaaagtggttttaatgagaaaaaaagaaaatcacttccacttttcttgacttgttggtgaattacagcagaattgatggttgaatccagttataaagaattcgggctgaatctacaccatctagggccagtgcagctctggagaactgggactgggatgtggttacagcaagaaaagatctatgctttccccattgctctcgcattctgtttttgatccaaattcaaatttacctgttactgggcaagcccaaggcctccctccaagattatttatttcaactttttatyatcaaagttttcgaacatataccaaggagaggctatggcataatgtgtacccatatagccattcttaagttaaataattttcaatatcttgctgtactgcttcgtctttctccattttttcttccattttaaagaaaaattttgactttttgttttaaagaaaatcttggcatgttgtctcatcacgaaatacttcactaaatataaaaaataaggaaaatttgtttcatagacacaatacctaagacaatcaataattctttaatattatctcattttcaatccatcattaaatttatcctgattgtctcaaaaaagtcttttatatgtagatcaatggaatagaatttaaagtccagaaataatcctgtacatcctttgccttgattttcatcatggtgccaagagcattgaaatggcaaagaatagtgtcttcagcagagggttctgggacaactgcatatccaagtccaagagaatgaagttgcacccttaccttgtatcatatataaaaattaacttgaaatggatcaaagacctaaatagaaaatctaaaactgtaaaactcttagaagaaaaaattagaaaaatatttgtgaccttggatttggaaatggtttctgagatttttttttttcttgtaccaaaagtacaagaaactaaaacaagaaaaacaagagataaatctgactttatcaaaatgtttttatacaaaagcttttgtatatcaaaggatactatcaagagaatgaaaagacaactcgtgtgggcgcccttattaaggtgtgcagataaacacacgcatgcttgacatggaggctctcccatgaaacatcctattttttcctttcctatgaaactttctgaacaggtgagcccaggtggagcctccacctgcgttagaacctaacctttccgtggctttctgaaatccctggtttcagaagttagtgtggattactgctgctttctttgactgtctctctctctccttcaatctatcttgataatgtgatatcaaacatgatacactacctctttggcccactcaggatattctggtggtgccctctggcctgcaccctcccaccggctatgaaggtcaacctcttgccttccctagcctcactggctttattttatgcaacactccaactctcctctttccacctcccctgttacttttccctacctattttattcctcttttctatctccttccccacctatgtctttcctttctgtcactttttctgcatgattcctgccccagaggggtcaacaagaaagggcatcccactggctgactcatgcagggaagctgtcagtaattaattagcaaggcmgggaagttgtaccccaagtcttggtttcaacactagaggactttaggaggtggttcaatgtagtgtttgagcacgcggaccctggagtcctccaagcctgatttcataagtacttcagctgtgacacttgcrtaaacttgggtaaaaactcagcgttatctagattaaatatgataatacatgcagatgactggcatgtggmtatgaatcagcaatacccgtaattgggtgggtgatatgcattttccagcacaattatctccaacctccacaagattaatgatcttaaccatgcattcagactctcttcagaacaacatggtgagatatcaatrttgtcttcttgatgcaagtttcccttgaatgatttaaacttcagatgggtggactgtctccttagggagaatttgcaaattaaatataataaaagctaacatatattggaggcttaccgtgtaccaggtgctaccctaagtatttacatggaagctggcattattggcagacctatttttcagatgatgaaactgaggcacagaggggttgagtgacttgcccaaggttatgcctcaagtaagtgggggagccagaattcaagmccatacattctttgtaaaaaaaaaaaaaaaaaaaaggaaagaaaaaaaggctgagtgtggtggctcacacatgtaatcacagcactttaggaggccaaggcaggaagatcacttaagcccaggagtttgagaccagcctggacaacatasggagacactgtctctacaaaaaatgttttaaaaattagctgggcctggtggcatatgcctgtggtcccagctactcaggaggctgaggtgggaggatctcctgtaaacccaggaggttaaggctgcagtaagccatgactattccactccactccagcctgggtgatagactaagaccttgtctcaaaataaataaatcaataaatacatgaataaataaaatttaaaaattgatatgtaattcatgtatcgtaaaattcagtggttttctgtgtgctcccagatacaatcaaccatcaccaatatctaattccagatcattttcctcactccaaaaagaaaccccatgcccactggcagtcactccttatttctcccccttcttctacccctcagcactaatttactttctgtctgtatggatttgcctattctgggcatttcatggaaatggaagcctttatgactggcttctttcacttagttttgtggcttawccatgttgtagcatgaatcagtatttcattcctttacatggccgaatattccattgtatggatttaccgcattttttttatccattcatcagttggtggacatttgggttgtttcccattttyagccatgaaaaataatgttgttgtgaacatttgtatacgataaaccctgatgttctaattttcgagcccatgtgcctaacctctatacctgactgcctscctgtgttgacaggaaacttcttgggaaatgtcctatctccatccttttgggaatgtcacatgcagtgaaatgcgcctagagtgggtttgacttacatcacatggtctctaatccctcagcaaacatgagttcatcttgttttggttggtgttacagaataacaccctcagcaaacatgagttcgtcttgtttttgttggtgttacagaataacatgcagctggctcttttttwaaaaatttaatattaaacgtccttcattgaacaaatatctgttgagagtctttgagtgactgggatatggccataatcaaatgaacatggctttgccattctaatggagaggaaggcattgattagctacaaactgtgaaacatactttgaaagaaaaggaygtaaagagagctgatcatagggggccttgcaggataaggagtggcaatcttgggagaagttggggggatggtgtgccaagcarggaagatggcaggtgcagcatgaagccaaatgtttggaatcatagcatgttctttcccttcatccctatgtcccagggtctctttacttcataaacatggscaagtggaaatcctactttatgtctcttctgtataatccctttgtcatggcttaacttagtggcctgtgcccctccccactgctcctggaaccacaacccacattgttacaagcccctgaaggaagttataaacaccttatcttctactaggacaggwgcccctggaactgtctggctgggcaagccatacttacctgcacttccctattccatctgtgagtgattcagacttgactattgttatcayactaaactaaactggggttcactcacccagcacagtaagaccaaacatctacactgagatttgcaatgggagaaaggaaggcatttatgtgcagggcacaaagcaaggagtgttaggaggcttatacttgagacccaatctctctaatggcttgcaagtaaaggtttttaagagcaaggatacattttaggaaaacagaagttacaagaagaaatcgcaaatcaatacgcagaggttacacattggtttggtcatgagaagtgagggcttgcaggtcataggtgaattcagagattttctgatttgcaattagctaaggaagagaagcttggtttaaaattcggggttagcagaaaagaatgtttgctcttgctcatgagtgtgacttcctccaagaacaaagaatggctgtcagagttcagtcgttatttccccttatctgaggtctgcctgccaaagaatccatttggtgggagtccaggtttctgaaaaacaactcggggacatatgttatgatgtgatctgtagtttctataggaaaccaaacatctctggactctaactttcttggatattgttttaggctactattaccttcttgcttatcaagtgccttatttatttctcagggccaggtaggtgcctggaatttccttcgaaagaacccaagattttcctttatttccatgcttggaggaacccacaggcccctaaaagggattctcacttcatctcaccattttggaccttcctcaagatctgggcccagagcattctgacttctgcagccccacctcacagcctatcaaatagattaaattgctcctgcatcttatgtcacatatgtctttgtaacttggtgagctaatctgtagtggattcattgacatgtagttatgtttttatagccatttcataaaatattcataaattcaatgtttgccattttagtattctagattcagcaaatttcttattttaagtctcaaacattttgcaggtcctttgaaatcttgcaggtgggtcctggctccattacttatgggtcgtaggtcatacaagggtctgaaagagtkagcaccttagaagcaaacctctccatagggtccacgtttccagaccttcctattcccaacatgaaattaccttcatgcacatctttgggtctctcctctattcaaaatgccagctatcctccatttactttttgggaaatctgctcttgccaacagagatttgttttatcttaggatctacttctttcaccccactggaatatgtcccaagcctgagtcattcagcctgcagcaatccctgagaaaaaaaaaaaatcggcctttgcctggacactcaagtgatacctgaggacaccttgactcctacagcaccaaccagggcaggcctgggtctccagcggagctactctttagggatcgtcattatgacgaacagacatgccagattcctctggctagtgtccagtgcagacatacacacacacacacatacacacacacacacacacacacaccattcttagtacagtcaaagctcacaggagaaagaaaaatgttttctaataccttcttaatttgcaagaaggtgttaggaattcaagggatggtatgcatagtgatgttagtttcatttcttcagctccttcctccaactcatgttctgtagggacttctgggactaagaacaggacccacatatgagcaacaggattttcagagcaaggctgtggttggaagggctcagaccaacgtccacagcagagtggaggtctagtataaagaatgtgaagtttgtagcatctcttgatcccgctattcctacatgcttgcttaagccattcttcctctagatgaactgttctttgaaggaaacctgcctaatgtctgcctgctcaagaaggtggacctgagctctgttccctttgcaaccttcctggagtcttattgctatctagatgaactcaaagcaagatgctgccgcccccatgactttgatcattgtaagctgscaatcctcttgggaggctgctcccagcttggactgagctgagtcttcgcatgccttgaacaatgaatttgcatcctggttatgttccccatgggggccagccctgtccttggagtggcccctctaatcatgttgctcaggcttcttctcccttcctgggccccagaacacctccrgtgccaaacttgtgggtgggaacaggaactcgcgtgccagccaggtgtgcatgactagctctgggcaagtctgttctagtaattcaaggtaccacctctcactgggacagcctagtttctacacaggtcttgctctgggaccgccctcagcagtgtgrttagcaggcagggccagtgtgaccctccctttctgggcctcagttgagaaacctgaagctcaggagaggagtcactcccctggcagatgggtggctgggccagaagcagataccaggctttctgactcctgctctaggattctcaccacgtactggctagacttatacttctcaaatcttaatttcctaaaggcaagtaacagtttgaatgttgttatattgtgatgtataataagaaatatatgtttgtctttgtttcctggacacagctcctgaaaccataagtggtgggagcgataaacgtgaacaaagaatcttttgttattcaaaacagatccctttcgatcacacctaagtttatgtaaaggagatgtaaagtctctaaggatgagggctagttgccagggaacaaaacccttgcgattagagggaagaaaggagagagagattgaagattgatttgatcaccgatgggcaacaatctaatcaatcatgcctactatgtatggaagcctacataaaaactcagaagggcagggttcagagagctttcaggttgctgaaggtgtggagggtggggcacccagagatggcagatggggctccatggccatacccccatatcttgttctttgtactttttcctctggctattcatccgtattgtttgcaatatcctttgtaataaaccaaacctagtaaataaactgttttcttcagttctrtgagccattctagcaaatgattgactccaagaaagagggtgtgtgaacctctgatttttgccaagtcagacagaagttgtgggtaacctggggacctactacttgcaattggtgtctgaagtgagggcagtcttgtaggactgagcccttaacctgtggggtccgtgctaactcagaattcagttcagaatggaattgaattgtaggatacccagctggtgttasagaataggtccgtgtgcaagaaaaattcccgcacatcatggacataacagacaacgtcaatgatgaggaatccagcaagttcgggatagagaattggcagggggtcctcaggggtctctccaagtcatcttcaaagtgttgctataacttttcagagagggagaagcagacttgtggagctgaagagaaacacccagaagctcaggtgaaagctgacacggccatagttggttcatattaaccatgtgattaaaatggttaaatattaatttgggttcttacatatcaaagggtaaaattcagagcaagggagaggtagacaggacctgtgaaaagcagtggttagtttagggaaaatacctaggagccctgtgatttggagagtgaaaactctttattaccgttgttactttaactctttccaggatggcctgcctccttcgckcatttcagagaatttctgcaggggttttcttcttagcwctttggkgcatggttgtaggtgacaagctgctggtggtccctcaggacggaagccactggcttagtatgaaggatatagttgaggttctcagtgaccggggtcatgagattgtagtggtggtgcctgaagttaatttgcttttgaaagaatmcaaatactacacaagaaaaatctatccagtgccgtatgaccaagaagagctgaagaaccgttaccaatcatttggaaacaatcactttgctgagcgatcattcctractgctcctcagacagagtacaggaataacatgattgttattggcctgtacttcatcaactgccagagcctcctgcaggacagggacaccctgaacttctttaaggagagcaagtttgatgctcttttcacagacccagccttaccctgtggggtgatcctggctgagtatttgggcctaccatctgtgtacctcttcaggggttttccgtgttccctggagcatrcattcagcagmagcccagaccctgtgtcctacattcccaggtgctacacaaagttttcagaccacatgactttttcccaacgagtkgccaacttccttgttaatttgttggagccctatctattttattgtctgttttcaaagtatgaagaactcgcatcagctgtcctcaagagagatgtggatataatcaccttatatcagaaggtctctgtttggctgttaagatatgactttgtgcttgaatatcctaggccggtcatgcccaacatggtcttcattggaggtatcaactgtaagaagaggaaagacttgtctcaggttggtgggtttatttcttttggactgccttgtttcttccaggctctgtcctccctcactcatttggctccttgagccgactgtcccttggaggatttcctggagaaacggtggggggaagtgataccckgctcggagcagcrggaacacataggagacctgaggctgaagtgatacagaggcattcggatgaagacagggctcatgcttggcaagagtaggagatttgcttagttggataatctgggacagtcacatactcattgaatgagccttagaaatgtcccagttcaaacagaggtgaaggcttgactaagggaacaggtccaggttaaaatccattttcccaactctgtcccatgctttgtctctggaccttgagccagggaccagcraactacagcctgtgagcccaatctgcccaaaggcctgttttttgtttttttttttccttttatgttgagacctgtttttatatggcccagagctaagaatggtttttgtagttttaaaacaatttaacaatgaagaatatgtgccacagaagtatttggtctgcaaagcctacacatttactgactggccttttcagcaaaaggggtatggcctctgacctaagacaagtgtttacagatgccctcctgacatgtaggaaaagggcccagagttactttggaaaataaaaatctgtgagttttaaatttcaatgtaaatatttacaactttgaagggcttcaggcaactccctctatcttttatgcctcaattttcttttccagttccttttttatcagagagaaagcctcaaacaggtcccaaagacccttacctctcttctttacacctgctgatttctctgttaacaatttgaacagttggcagtagccactgtgaaaaggcaagggtgaggggatggggataactgaamtggttccagggattctggggcatgaaataaaaacatagaatgtcaggattcttttaattgggacataatatagttgtacacatttggggggttcatgtgatattttgatacacgtatacaatgtgcgatgatcaaatcagggtaattgagatatccatcaccttgaacatttattccttccttatgttgggaacattcccattcttcatttctagctattttgaactgcagtatacattcttgttaaccatagtcaccctactgtgctatcgcactttggacttactcattctatctaatggtgtttttgtgcccattaaccaacccttttcttttcttttttttttttttgagacagagtctcactctgtcatcaggctggagtgcagtggtgcgatctcagcccactgcaacctccacctcctgggttcaagcgattctcctgcctcagcctcctgagtagctgggactataggcatgtgccaccattcccagctaatttttgcatttttagtagaggcggggtttcaccacgttggccaggatggtctcaatctcttgacctcgtggtccgcccaccccagcctcccaaagtgctgggattacaggcgtgagctaccgcgcccggccttcttcttcttcttttttttttgatcaacgtgctttattggccctttagatgtttttctcttttctatcaaagtttttggagtattacaaattttatttcttttttctttttcttttttaaattttaaccaaccattttcacccccccttccctacttacmctttccaccttctggtaattaccaatgaactctctacctccatgagacccacttttttagctccacatataaatgagaacatgtggtatttgtctttctgtgcctagattatttcacctaacataatgacttccagttacatttatgttgctgcacatgacaggtcttcatccttttttatggctgaataattttccattctgtatatgtactatctgtgagtggaaaacaaaaccaacaaaaaactcaaagggtttttcctgttttctcactcaacaacaaacaacgcagaaaacttcagtgaacaaatgtgtggggttttttttctccacacaccaagcaagcaggcaattctgccagataccagctgggtgtcctctaattcagttctgaagatgtccacctgaagatagcatcaggtcccacagacatggggctcagtccctaatttacatttgaagaatgtaaattagtacagccactatgaagaacagtatggagagtcttcaaaacaaaacaaaacaaaaagaactagaactgccccaatatatcccattgctgggtatatatccaaaagaaaaaaatatatattgaagagctatctgcactcccatgtttattatagcactattcacagtagccaaaatatggaatcaacctaagcacacatcagtgaatgaatggataaagaaaacgtaggactgtaatatcgtgaaatatatatttggtcttcatcctcatttccttatacagatctttcacttccttccttaaatttattcctaggtattatatattctttgtacgttttgtaaatggggttgatttccttttcagttttttctctgttggcatttataaatgctactgatttttgtaagttgatcttgtatactgcaactttaccgaatttgcttgtcagttctaacagcttttgggtggaatgtttaaatttttctgaatatattatgtcatctgagaacaagaataatttgacttcttcctttccaacttggatgccctttctttctttctttctcttgcttaattgctttggataggacttccagtactatgaagaataacagtgctgacagtcagcatctttgtcttattccagattttagaggaacagttttcagttttacccttttcagtatgatgttagctgtggatttatcatatatggattttattgttttgaggtatgttccttctgtagccagtttattgagagtgtgtatcataaagggacgttgaattttgttgaatgttttttcagcatctacaacatatgagttctgtcctaaattctgtcaatgtattcatatcaatatatcaataaatgcatcaggattaattatctttttaacatattattggatttggtttgctggtgtttcgttgagatttttgcatctatgttcgtcagagatatgggcccgcagttttctttttttttgttgtgtccttgtctggttttggtatcagggtaacactggtctcacaggatgagtttggaagtattctctcctcttcatttttctgtaatagtttgagtggaactggtattaattcttttaaaaatggttggtagaattcagyagtgaatccatctggtcctgggcttttctttgatgagagactttttattactgcttcaatcttgttacttatattggtttgttgaggttttctatttcttcttcattcaatcttggtagattgtttgtgtttggaaatgtatccatttcctctaggttttctaatttgttggcatatagagttcacaataatcgctaatgatcctttgtatttctgtggtgtcagttgctgtgtttcctttttcatttctgattttatctgagtgttttctctttttcttagtctagctcaaggtttgccaattttgtttatcttttttttttttwwaaaaactttttgtttcattggtctttgcattgtttatttagcctcaatttaatttattttttccctgatctttattatttctttccttctacaaagtttgagtttggtttacttttgcttttttagttccttgaggtgcattcttaggttgtttattcaaaatatttctgctttttggatgtaggcatttattgttaaaaacttctctcttagttctggttttgctatagcccatagattttgatacattgtgtttccattttcattcgtttcaagtaatttttaaattttctttttaatttcaagaaaatctaattaagaagttagtaagcaaaagttatgcatttatttaatgatttcttaccattgattgaatcaaatctattgactccttctcctagaagtctagggtattggaaaaaagtaaatgaaagctatttattcttattacaaagaaatatttggtgtaagaaggaaaaaatatcatttctgcacattggtaccaattatcttattttttcaaaaagttgtactcagttatattgagaaactgggctctaatgaatgtactttttgagccctgtgaccctgtatctggtgcttgaccttgtttgtgtctcaactstattcccagcatgtcgtcctagagaacattctgtattatgatatgtaattatcaacatgcacttttaattattaggaattaaattaaagtgatcaaaatagaatttcttttgtccaataatcaaaccatttcaacactatgaaaaaaaatgtgtctttggacagatggaaatgtctggaaccagatagaggtgtcagttgcaaaacatgaatgtgctgaatgccatgaaattgttcactttagcgtggtgaattttatgtgacttcatcgcaataaattatttaagaaaagaagatatatcacagatcatagaaaatgaagccctgatttatagcttaaaaatgcagtcctcattaggcaaatcacataatcggcaatacataaagtaaacagaacacgagtggccaacaaaactttaagaacatgtttaatttcagaaataatccaagaaattcggattaataaacagtggaattcaattttgcctaacaggttagtaagcatgctttataggtaactattggcccaactataaaacaaatacatttctaaaaaaaatgtgcaaagccttttgaaaaccatagcttggtgaccattttttacataatgctatgattcagaaagaaagagtatcctttctcatggtaacctctgggctcccagcctcgccttgtggaagagtaaggcaggatcacttccctcttattcccatgttggtgtgactttgcgactttgaccaaagccttacctgcctcctctgcccaaggagggacgtggccgtctcagagggctgcttggtttctgtccaagctggcccttggggaagccctttggccacccaggtggtgattcctgctgtaagaasatgagaggctgagccaccaggcagtcccagatgtcctgaaacaacttatcccagccctgcccagggccttctctctagccctgtgcacctcatcacctgccccaaaacagttctacttatgtcagattctcatgggtgccttgcaacctttctgtctgtctctctgatcctcacttcttcttcagaatctcatgctgttgcatgaaaaaaaaacaaaaacgaacttttgtttttaggcccctttcctcttcctataggggcttgaatccaggccagatgctgggacactcttatgctgtcctttttgctattttgttgagtttcatccaccctagggctaacctcttttcttattggtatggctagatttcaaatatctcaattttagaagagaatttagctttgcatttcattattagaagggtcattggagtgttttccttagaacaaaggaggtcagaagtaaatcctagtctcttctacttgtaatacaaagaactgttcaagccttccgaaggacagggccattcacatcatagagccaggtcatggccagagctctggctctaggacatcctttcttcccagcctggtctatagaaaggaatagaatgcaagctcaggcctagagcctagctaggcctgaatacaggctgaaactttctcgctgagaggtgataaaaacaatgaatgtggttttcttgcagcattttttacggagcgttttcccagaaaactagaccccagttcctcaggactagttctgttcccaagtttcctcctctcatattctggagtcatctaaatagtagttctcaaatagaactaatttttcccctaggacagatatgtctgaagacatttttggtgttgcaattggagaggcgaaatagtcagtaggatatacgtagaggccaaggatgctgttgaaagttgtacaatgtgtgaaaaatacccgtcccccaactcccaacaaagaattactctggctcaaaatgtcacgagtgctgaaattgagaaactctgatctaaatcaattccaagtgaatccagtggtgtctacccagcaaggcccccagcctggaggtgtggagggcagcaaggatcctgtgcccaccctctgagctgtttgtctccctataggggtctttacaaggaatgctcattcaggctgaaatctcagcctttgttggctgagctgtgggttcattctaggcaactcagtagaacaaaagccccaaaatgccaagtcattcttaataggcactttttaaaatacgtgacttaggccaatgtctacaatgcctttaaaattctgcctctctttcaaaaccctgtgcttatctttatggctgattatctggggcatttccaggcatgtggaacattttggcagcagtgtttctgttaatagataattatctaaagagtagctgaatgctagaatgattcagctaaaaaaagtattcaacatgagtacataaaagcctagaaacttgactgtctagtaatttagataactctaggagaatgagaataaggggttataaaaatataactttattatgatgcaatttattatgatacaattcactctttttttgggggggttccagtaagatttaatgactttaagtgtttacatatttctacttttcagcacaaattcgtgataatatataaactacactttgaatgtttttttctttttttaaaaattttattattattatactttaagttttagggtacatgtgcacaacgtacaggtttgttacatatgtatacatgtgccatgttggtgtgctgcacccattaactcgtcatttagcattaggtatatctcctaatgctatccctccctcctccccccaccccacaacagtccccggtgtgtgacgttcctcttcctgtgtctgtgtgtgattgttcaattcccacctatgagtgagaacatgcggtgtttgattttttgtccttgcgatagtttgctgagaatgatggtttccagtttcatccatgtccctacaaaggacatgaactcataattttttatggctgcatagtattccatggtgtatatgtgccacattttcttaatccagtctatcattgagggacatttaggttggttccaagtctttgctattgtgaatagtgccgttataaacatacatgtgcatgtgtctttatagcagcattatttataatcctttgggtatatacccagtaatgagatggctgggtcaaatggtatttctagttctagatccttgaggaatcgccacactgtcttccacaatggttgaactagtttacagtcccaccaacagtgtaaaagttcttagagatctacaaagagacttagactcccacacaataatagtgggagactttaacaccccactgtcaacattagacagatcaacgagacagaaagttaacaaggatacccaggaattgaactcagctctgcaccaagyggacctaatagacatctacagaactctccaccccaaatcaacagaatatacattcttttcagcaccacaccacacctactccaaaattgaccacatagttggaagtaaagcactcctcagcaaacgtaaaagaacagaaattatagcaaactgtctctcagaccacagtgcaatcaaactagaactcagaattaagaaaatcactcaaaaccgctcaactacatggaaactgaacaacctgctcctgaataactactgggtacataacgaaatgaaggcagaaataaaggtgttctttgaaatcaacgagaacaaagacacaacataccagaatctctgggacacattcaaagcagtgtgtagagggaaatttatagcactaaatgcccacaagagaaagcagraaagatctaaaattgacaccctaacatcacaattaaaagaactagaaaagcaagagcaaacacattcaaaagctagtaaaaggcaagaaataactaagatcagagcagaactgaaggaaatagagacacaaaaaaaaacccttcaaaaaattaacaattcactaattttaatggtttttggtatagtcacagatttgtacaaccatcaccatagtcaaccttagaacattttcagtcactcccaaagataccttatatctattatcagtcactcttctttctctccttcctccagcccctggcagccattaatcaactttctgtccttatgaatttgcctatttctatggattccattcacaaaatacatgartagctttttccctttagcataaagagttttgtatattgatcttgtacttcaacatttctgaacttgtttatttgttctaatagtttttttttagtggatttcgtaggattttctacattccagatcatgttatctacaaatagagatagcgttacttcttcctttctaataaggataacatktatttcttttgcttatctaattgccctggcttgaacctctagtaccgtgttgaatagaagtggaaagaggagattcttatcttgttcctgatcttaggtggggaagtattcagtcttttagcagattaggtcttaactggagattttttgagtagatgccccccacattatgagattgaggaaattttcatctattcctagctygttgagtattcttatcatacctgaggtgtttggttttgtcaaatgctttttctgtgtctattgaaatgaacatggttttctttttggtcccctattctagtgatatgtgttaattgatttgcaggtgtaaacgaaccttgtattcctagaataatcccacttgattgtgttgtataatccttttacatgttactgaatttggtttgacagcattttattgaggasttttgcatcatatccataagagatattggaagtcttattttcttgcggagccttggtctgtgtttgctatctgaatattactggccttgtagaagaaactggggaatgttctcttctattttttgggaacagtctgtcaagaattggtattcattctttacatatttgatagaattcactagtgaagctgtctgggcctaggcttttcttgcaggaggttttaaaattactaatttaatctttttacctgttatggctttatttagattttgtatttcttcttgattcaatttcagtagtttgtttctttctaggaatttgtcaattttatctaagttatctaattccttggcataaaatggcccagagtgttcccttataatactttctgtttctgtaaggttggtagtaacattccctctttcatttcatatttttagcaattttgagtcttctctcttttttctttgttaatctaactttaggtttatcaattttgtctatattttcaaataaacaattttggttttgtttatttttctctattgcttctctatttctatgtcgttaatttcccctctattctttattattttctgccttcttgctttgtgtttagtttagcttcctggtggagtgacacttatcattacacaatttcccactttattgctagtaatattttttgttttaaggtctatattatcttgcttcatgatactgtgtcattaaaaaagtctattttatctgatattagtataaccaatctgcatttcttttggttgctgtttcatgatatattttttttccaccatttaactttgtaaaatttaagttttaaatataaacttttttttgtttttaaatctcaaatgtatcttctgcagacaagatattattagtccttgtttttaatgcagtctgataatctcttttaattgagttgtttaatccattcacatttaatactattattgatgtagatggatttatgtctaccatcatttttttmttttcttttttttttgagacaaaatctcattctgttacccagactggagtgcagtggtgtgatcttggcccactgcaacctccgcctcctgggttcaagcagttctcccacctcagccgcccgagcagctggaactacaggtgtgcaccamcatgcctggctaatttttgtattttttatagagacagagttttgccatgttggtcagtctggtctcaaactccttacctcaagtgatccacccgcctcagcctttcaaagtactgggattacaggtgtgagccactgtgcctggccccattttactttttatgctctatatctctcatgtatttatttgttcctctgttctgcctttattgcttttttttttttttttgcattgagtgaatattttctagtgcaacatgtaaaatcctttaatgtttttctttccactatttaaaaagttgtgttctgagyggttgttctagggcttagcacatcgattttaacttaccagtatctacttcagatttataccaacttaattccagttaaatattgaaatgtcattcctatatagctctatttcctttctcccctttttatgatattattgttatacgtggtacatctatatatgttacaaactaaacaatacatggtgataatattactttatataaatacacatgctttcaagaatcagagagaagaaagaagagcaagtatgtatttatagagtttgttatattaacctttttgcttatcatttttggttcttttcctttgttcttatggatctgagttaccttatggtatcatttcttagcccaatttgcctttgctcccaactgcctcccttgtgctattattgtcaaatatattacgcttccatatgttatagtcccaacaatataattatatatatgtatattgctttttaggattgcttttaaaatcagttaagagaatagggccgggcacggtggctcactcctgtaatcccagcactttggaaggctgaggcaggtggatcacctgagaccagcctagatcaagaccagcctggccaacatggtgaaaccccatctctacttaaaatacagaaattagccgggtatggtggcaggcgcctgtaatcccagctactcgggaggctgaggcaggagaattgcttgaacccgggaggcggaggttgcagagagccaagatcgtgccattgcacgccagcctgggggacaagagcgagacttcgtctgaaaaaaaaaaaaagagagagagagagagaataaaggggaagtatgcattggtactgccttttataactacatgattactattatcagtgctttttttctgtatgaattcagattattctatggggtcacttgctttcaacctgaagaacttcctttagtatttcttgtaagttgagtttttcagcaacacattctctcaatttttgtcttattacatggggttttgcttttattttgtttgtgcctttaaaatgatactcatcagagacttgtcttcagaggtggctcataacttatccttcagaattgcacatattttttagcagacacacatgaggcaaatttaatgataataaatacctttttaagaatcagggtggggagattaccttcagctgtgaagagcagctggtgatattgcttgtggcaagggatagaaatggtttatggatctgggaaaggctctgaagagagaagaaactgagttgacagttctaggaagttgaaggtcttctcataaattatagttgtgagataatattcacaacgactggtataaaaattcaccagtatattgttatcttttaataccctgagcaggtaggtcggtaacagatcagctgcatactttgagtgtcttagtgcaaaatgccccttgttcaaaaattattaagaatttcaggccgagcacagtggctggagctgaagtgggaagctgaggcaggcagatcacttgaggccaggagttcaagactgccctggccaaaatagtgaaactccttctctactaaaaagacaaaaaattagctgggtgtggaggtgcatgcctgtggttccagctactcaggaggctgaggtgtgagaatcacttgcacttggacctgggaggcagaggttgcagtgagccgagatcacgccactgcatgccagcctgggtgacagagctagattctgtcttaaaaaaaaaccaagaatttcaggacactgacagcaaagtattaaacaaagcatgagaaccttctaaatgtggaatgtggtgtgtctgcccaggctgctcctccacaaagctggcccaggcaggggcaaatgtgcagctgggagagtgagagaaccagggcagctggattgcccaacctcaggggtggggcccagtgccaggtactatgtagatagtgccttttggaactattcaagctggtgaccctgaaaaaacattcttccaatttaggccattgtacaaaagcagaggccaagtacatttaccactcaaacttcacgtggtctttcagccacagacttggtcaaagcaaatgaccattgaggtttcaccataggctgggtacatgagggtgtccaggctggtgtgatgctgaggattttacagcggcttagaaacacagctttttttctaggtgtttctcaaaccttagggtaagagtggagatgggaggtggacctaagtatgtgataagaagactagagaaatgagtgtttctactgtgtctgtgccccatcactgtaggtctgatttctactccccaccccactccttcttgtcactgaaaagtcatggaattctggaatctcagggttgacagtgactgtgaagcagagtgcygtacactggtatccatctctgggagagaaataccatgcaccaattaggttgggttgccaatcccagggcaggactctaaacacctcagcagtctttactaagattcctagacctggcacttcccagctctggttggaggcattttacaatcctagctgccagagtatgagtctggtgagatggaatgcttgtgcaagtcaggcaaagaaacttgattcttcacagataggcagtaagaatcaacaggaacctaggatccatggtcagccagcccccaaggtagaggaagctgctcaggtggacagagtcccatctgcatgtgctccactttgcatggcagctgagggacccccaaaatactctgcattaggctttctatcccggaggtcactgcagtttatcagcacccagacatccatcctgggtgcctgccctccgttctattccctttccatcttttctctgacttttgtgatgattatttctcttgtgtttttcttcatcagcatttattttaagttccagggcacacatgcaggatgtgcaggtttgttacatagctaaacatgtgccatggtggtttgctgcccagatcaacccatcacctaggtattaagctcagcatccatgagctattctttttgatgttctctctccctcgactatttctttgcttttctttacaattttgccacctaaatttgcatctgtaaataatacagatgattttacctgtttcggtacttaacataaatagaattttactgtttttctttgtcttgccttttttttttttttggttcaaccttatgtttgagagattcatgatgtgtgtttttacaagttgtagtttgtggattgtcagtactgaatatatcccattgtatgaatacaccacaattttatttatccattctactgttgatgggctttgggttgtatctagcttttcactaytgtgaacaatgttacaacgaacattcttttacattctgaaacacatgtgagtgggtttttagagtatatacctaggggtggagctgctgcgttggagggcgtgcatatcattaatttaataagatgtaactatttttcagagtggttgtacatatccctgattgctaaggcattagttatgtacatgactgattatattgagggttttaaaatrtacttatcagtcatttggatttcctcttttgcccattcaagtctattgcccactgggttgtctactcgaattatgtatgcattctggatactagttctttggcagttatagatattgcaaatatcttcccccactctgcatcttgctttttacttttattcaaacgaattagaataaacatcttagtatatgactcactgtgctcctgtgtgggagtttccacaggggagttgccggaaaatggacttactgtgtcgtgcacattttaaatgtcattaggcattaacaatttattcttcccttagcaatgtataagtgtacactttccttcatatccttgccacatgtattatcatcaaatgctttcagtttttgacaatccaataggtaaaaaatatctcaaggttatttgaattttcatttcccttattaattcttcatttaaacgtcttttgtgtgtgtgtgtttactttcatcaagttgtttcaccagtgaagataagaactggtatttaccttctgcatttaatagaattgatgcaactggctgagcgtggtggctcatgcttataatcccagcactttgcggggccgaagcaggaggatagcttgagcccaggagtttgagaccagcctaggcagcatagtgagattccttcactacagaaagtaaaaacctagctggacatggtagcgtgtgcctgtagacctaactactcggaaggctgaggtgggaggattatttgagcccaggagttcaaggttccagtgagctatgtttgcatcattgcacctcagcctgggcaacagagcaagaccctgaccaactccccaccyccccccaaatcaatgcaacctgtgatcactttatttgggcaacttccccaaattcttgactcagtgaatttgttgcagggcttttcttttttaatctcttttattggttcacatactagaacaatctcaggggctatctggttaggtattgcttgctacagagccaaactatgtcaccagaacccatttatatgtttccatttcttgtctctgtttcctcggccrtggcatccttctcagtgtcataatacccaagcagcaggggcttcagcctgagttcttttcccaggattcctagttaaagttcttctgcctcattggctctaatgaagtcacatgcccatctctgaactaatcatggtggccaaggggatgagacgtgctgattggttgaggcctaggtcacatgttctatcctgagctgggagtggatcctcaccagaagtacatttgagagtttgggggaggggtggccgctgggatgagataggaaataacttgtccacgctgtgaattacccttcaattaatgatattttctatttagatgtcagattttttgttactagtttgtcatataaacctattactatatagatttttctgtgtcctaatctaaatttcttttaataatctatgggtgaacactcaataagaatgtcctccagaaaggatgacctgccgacttttaaagcaatcattttggggcttataagtatttagtatttgaagtctctgcctcttgctctcttttaggaattctttttcctactgtgatatatgtaagtacttataaatttaaacttaaaattcaaaaaatataccaggatgtgaaakaaacattattaaatataggtgttttgctgtgagtgtttcttggaataggtagggctttgtatagtaggttttggtcttttggtcagcttgggaaaattttgttcttttttaattgaatgatatgttttcaattgatactactaaaataaacattattggagtattatttacatgcaataaagtgcaccgttttaatgatacatttctgagttgtaatgattttatttagctgtgcagccatcaccacattcaagacacggagcactccattacccagtaacttcccttctgtcctatctcagtcacctaatacctcccctcaccttaggcaaccctggatggtttctgttgctggataacagaattgtcttttctagagtttcatctgaatggaatcatacaattatgaatgaaaaacacacaggtatactgttttgtgtctggcctctttggctcggcataatgtctcttcagatcctttcacattgttgcatgtatcaatatttcattcgtttctatttccgagtagcatttcattgtatagatatatcatcatttgcttatgcatttatttattgatggacatgtggatagtttccagttgttggctattatgaataaagctgctatgactattcgagtacgagtgtttctgagatttcatttttcttgggtaaatacttaaaagtgggattgttgggttgcatggtaggtgtatgtatgacttcataagaaacagtcgaactgtttccaaagcagttatacaattttacattcctaacagcaacgcattagagttctggctgctctgtatttgtgctaagacttgctatttttagtcttttacattttagccatcctaatgggtgtgtagtagaatttcattgggtttgaatttgcattcctcttatgactgatgataatcttttcatgtgcttattgatcatatgcctgttttcttttaaaaggtgccctttcaaaatcttccgcacacctttattggtttgtttgtcttcttatatttgagtagtgagttctttacatattctggatacaagtgctatgtcagatagttgtgtttctgtttacttctggtgtgtggtgtcctttgtttcattttttaaaaaacaacgtctttcaaggagcaaaagttgcaagttttgattaagtcaattttagcaaacgttttgtgttttgtacccctcgtgccctatctaaggaatctttgtctaccaaaaggtgggaggatttgtttctatgttttttaaaaaagttaaacagtttaagtttgtaggtttgggtggaaagaggtctttagaccacttagtctttgtttaggtctttgtttatgtctctgagattggcagaggggaatatacaatcattcagatcaggctattggatgcctttttctatctctgaatttttctggggtgacctcactgacacccatggcttcaatcaccacttatgctgatggctccaagtctatctgtgcagcccagacccctcctcatctccagaccctggaagctgatgccttgggctgctcctcctatttcctgggcaccaggaatatgagctactccctccccacagtcctgctctccccagtgctcccawgtcgctgaaggcaccaccatcttccaagatacatgggcctccccagggtctaggagtcctagacgtgggastagaaattagatgacattggtgtctaaacaaaacaccactgcatggagatagaacaggggagccccctgaatgtggtgagagcaccctcccaggtgtgttccaccctcaccccgggctcatcaggagggtgcttaggatgcatacagttttaagggggttggaggaatagttcagaggctgagatgttgcacccacagctgagaatccctttctagcgctctgtgtcctcacaactccccgggaatcatcctcccctggagagttcccaaagcccttgcaggcctgccttctctgtgccttcctgcctgcgccctctggtggacagctccattcrctgcctgtcccatgggttctgtccaaaggtggaatctattatcaatgtggatttctaatgggggtaacttcctccctaagggaagcctcagcttcaccagcaatggcagacacggccaggcatgtagacacagaggaagtgagatagaaagtgtgcacagcccagagagcctgcccacatcatcctggggcgaccaggacaaggaggcgtcagcaatcttgccaagcacaagtatgagtgactttctggagcaggacgagtctcatgggcgtgagaccattgtgagtgctcagggtctctccattagaaaggcacacgtttaattctccattttgaaatttgaactagagcccccacaaattattctgttctggaggaaccattcttatcagaacttggtgctggattgacttggaaaaaagcctgaccataatcttcaggatgaaataaaggcctggatgaatggacacttcagtctctaagcagacttgcagaagactggagccttcagcattcagaagaggaattcagactgtgcaagatctgaggccaggctccagctcccccggtcccttggtgagcaggagctccctgaacccaccatgggtctttgctagggttgtcttgcacatgtgtgctttagayagcagcacctcttcttccatggtgtagatggagaatcctcaacaaagcctttccaagaatctgatcatcacatcttgagctcagcctccctgcagctttttttatattgacagccacttcagrgagagtcctctttgagctttacaagaaatatcctggtgtgaaaaaygaccaaaaccagatagccagcctccccactccctgtttaaagaaagctggcttagcaatgttgtctgcatyttggatgtgctgtgttacccatatgtgggaagaaagagtattaagagttagcaaatagggtcacatccagcagagaccatatggttggggactagggcaatggtgactcctyagacctcagctgcagcctgataaacgtggttaagagagaagtaggagacagtgacatgaaatgggggttcacagccttgtgttgggaattgaatgagaaacaagagcttgaacttggatgttccccagagcgagygcaaggtcagatgagtttttcaagataggagtgatcggtctttcccagggtggggcccataatgcaagacaattatagattaaygggtaataagtaactggaggagggcactctgtcttcaattacatgttgatttgctaggtgtctcagtgacaaggtaattaagacgaaggaaacaattctaggaggcacaacgtggggtggacagtcagctgtcggtggcttctgctgagatggccacaggactccaggttcccctgccgcagctggccacaggactgctgcttctcctcagtgtccagccctgggctgagagtgggaaggtgctggtggtgcccactgatggcagccactggctcagcatgcgggaggcctngcgggasctccatgcgagaggccaccaggtggtggtcctcacccnggaggtgaatatgtacatcaaagargagaactttttcaccctgacaacgtatgccatttcatggacccaggacgaatttgatcgccttttgctgggtcacactcaatcgttctttgaaacagaacatcttctgatgaaattttctagaagaatggcaattatgaacaatatgtctttgatcatacataggtcttgtgtggagctactgcataatgaggccctgatcaggcacctgmatgctacttcctttgatgtggttctaacagacccctttcacctctgcgcggcggtgctggctaagtacctgtcgattcctgctgtgtttttcttgaggaacattccatgtgatttagactttaagggcacacagtgtccaaacccttcctcctatattcctagattactaacgaccaattcagaccacatgacattcctgcaaagggtcaagaacatgctctaccctctggcyctgtcctacctttgcyatgctgtttctgctccttatgcaagccttgcctctgagctttttcagagagaggtgtcagtggtggatnttstcagccatgcatctgtgtggctgttccgasgggacttygtgatggantaccccaggccgatcatgcccaacatggtcttcattgggggcatcaactgtgccaacgggaagccactatctcaggtctgtattggtgcctttatccaatcaatgttccaggcaaaacactttttaaaaaatgtatttacttacaagtgcttccatatctacttatctttccaaagatttcatttctgcttctcattgttgtaatagtcttcagtgagataaacttttaaagggtcaatggtagtgcagttcagggtttcaatggccactgagaggaaggagaggcagggacgaggatctgtcaaaggatgggcaagagtggtgtgactcacsgagactgttcgtttgtaaaagcaccatcttcatggctgtggatgtgcttcagctgggcaggagcagggacactacactgagaactgatccatccaatcttgctggcaagattttcagtagaaaggaggaaggaatagaaatttacaattgttgacgtgacaatttttagtggtcccatcttgcaaaagatagagaggtgaccacaggagacctaagcactcagaggaagtagaggtttcaaagaagttgactcagttcagtggaattgggccaatgtaggtgcaatggatgtctgtgatcagagaatgaaacacagagttcagtttccagagagggagtgttggattgtaataggagaatgtttcttgtgaagacactacttaaaaaaaattcttactaggttaacttcatggtctaataccgaagtgtccaatagaaatatcatgtaaaccacatacataatttaaacttttctagtgggcatgttaaacaccagcaaaaagaaaccactaaaattaatgtgaataatgcattttatttaaccagatgtatcccaaatattatcctttcaacatgtgaactgtttaacgtagctttttttgttgttaagtcttcaaaatctagcatatatttgacacttacagtatatctcaatttggaatagccacatttcaagtgctcaatattcatatgtagttagtgacaacaatatggtgaatgtttataaatattccatggataaaactaaaattctatcttttaaatttttctatcttttgagatggagtcttgctctgtcacccagtctggagtgcagtggtgggatcttggctcattgcaacctccacctcccaggttcaactgattctcctgcctcagcctcccaagtagctggaactacaggygcatggcaccacatccagctaattttctttttttttgtattttttatggagatggagtttcatcatattggccaggctgatctcaaatgcctgatctcaagtgattcactcacctcagcctgccaaagtgctggaattacaggcgcgagccaccacacctaggcaatttttctatcttttaaaagaccctctactgaatctgcccaattctgtgaaggatgtcttttaaaaaatccccttacataacaaattctcctccagttatattttggctcttgaataggttttgctttatacatagtgattagattggtgcatgtaggtttgaggtttgagacttatattttcttcacwgtttgctgttatcattaaataataatccttaaaatacattttatctgatatcagtaatgtgactcctatgttattttttgaattccccatctcttttaatttgaaaatgatttgtgtgcaagtgggtagctcacacctgtaatttcagccctttgggagaccgagggaggaggattgcttgagcccaggagtctgagagcagcctgggcaacatgctgagactccatctctacaaaaaattaaaaaattatccaggtgtgatggygcacacctgtggtcccagctactcgggaggctgaggcaggaggatcacttgatcccaggaggtggaggctgcagtgtgccatgttcacgccacctcactccagcctgagtgacagagcgaggacccatctcaaaaaaataaaaatttatttggaatgtgaaaatcttgttttaaagttagaaaacatttttttaaaactccaatatgaaaagctgggtgcagtagcttgtgcctgtggccccagctacttgggaggctcaggtgggaggatcattgagctcaggagtttcagctcttgtggtttgttgactgactgactgattgactgattgattgatttaaaacacaacaaaacccaaaatgactttaatctgatagtttcttttgatgtcagcattctgattctgtccattcttagttgtattctttccactgagtgtaagctcattcctttaacagaaatttagtttttccatcttagttttggaattccatggcccttttccatttccatggagatgcagtgcagcatcttcaagtctctaattcttacatctgtctctttcacttgcaagagcccttgtgattacattgtccygcccggacatccagcataatctccccatgtcaaaacccttaatataatcacatctataaagtctcttccacctgtaatggaatatattcccaggtttgmgcaactacaatgtagatactttgtggggctgtgattctgcctaccacagacactaagcttaaagtgaaacccacatcttattcaaaacttggaggttttccttcatttggccatttaaatttaatttttgtttctgtcctccgtagtcttctattctccaggcttcagagctctcagcttaccattcaattatctcctttctctccttatattccttttttcattttttaaaaacaatactttcaaagagcaaaaattttagaatttgatgaggtttattctagtgaagtttttatcgtttgtactttttgtaycctaaggaagctttgtttaccccaagatatagtttctacattctcttaaaaacactaaagagttccagtttatatgtttagctctgtgagattgggagaggggagctagatcactcaggtcaggctttcgggatgcctttttctgtctctggacgttgctggggtgacctcactgacacccatggcttcagctaccacatatgctgatggctccaagtctatctgtgcagcccagacccctcctcatctccagaccctggaagctgatgccttgggcagctcctcctatttcccaggcaccaggaatgtgagcttctccctcccyacagtcctgctgtcctcagggcccctatgtctctgaaggcaccaccatcttccaagatacatgggcctccgcagggtctaggagtgccagacacgwaaccagaaatcagatgacatcactatctaaataaaacaccactacatggaaatagaacaccactacatggaaatagaacatgggagccccttgaatgtggcaagagcaccctcccaggcatgttccaccctcaccccgggctcatcaggagggttcttaagatgcagacagytttaagggggttggaggaatagttgagargctgagatgttgcaccyacagctgagaatccctttctagcactctgtgtcctcacaaatccccagaaatcgtcctcccctggggagttctcaagcccttacagacctgccctctctgtgccatcctgcatatgcctcccttgagctgggtgtccctctgatggacgcatccattcactgcctgtcccatgggttgtgtccaaaggtggaatctgttatcaatgtggatttctaatgggagtaacttcctccataagggaagcctcagcctcaccagcaayggcagacatggccaggcatgtagacacagaggtagtgagatggaaagtgggcacagcccagagagcctgcccacctcatcctggggcraccaggacaaggaagcatcagcaatcttgcgagcacatgtaggagtgactttctggagcaggacgagcctcatgggcatgagaccattgtgagtgctcagggtctccccctagaaaggcacacatttaattctccattttgaaatttgaagtagtgcccccacaaattatgcagcccgttctgttctggaggaaccattcttatcagaacttggtgctggattgacttggagaaaagcctggccataatcttcaggatgaaataaaggcctggatgaatggatacttcagtctctatgcagacttgcagaagactggagcctttggcattcagaagaggaattcagactgtgcaagatctgaggccaggctccagctccccaggtcctttggtgagcaggagctccctgaacccaccgtgggtccttgctagggttgtcttgcccatgtgtgctttagacagcagcacctcttattccatggtgtagatggagaatcctcaataaagccttcccaagaatatgatcatcacatcttgagctcagcctccccggagcttttttttatattgacagccacttcagagagagtcctctttgagctttacaagaaatatcctggtgtgaaaaaagaccaaaaccagatagccagcctgaacactctctgtttagagaaagctggcttakcaatgttgtatgtcttttggatgtgctgtgttattcayatatgagaagaaagagtttcaagggttagcaaatagcrtcacattcagcagagaacatgtggttggggactagggcaatggtgactcctcagacctcagctgcagcctgataaatatggttaacagagtagaaggcagtgacatgaaatgggtgtccacagccttgtgttgggaattgaatgagaaagaagagcttgaacttggatgttccccagaggcagcacagggtcagatgagyttttcaagataggcgtgattggtctttcccagggttgggcccataacgaaaggcarttatagattaatgggtaataagtaactggaggagggcactttgtcttccaattacatgctgatttgctaggtggctcaatgacaaggtaattaaggcgaaggaaacaaatgtagcaggcacagcgtggggtggacagtcagctgtcggtggcttctgctgagatggccagaggactccaggttcccctgccgyggctggccacaggactgctgctcctcctcagtgtccagmcctgggctgagagtggaaaggtgttggtggtgcccactgatggcagcccctggctcagcatgcgggaggccktgcgggagctccatgccagaggccaccaggcggtggtcctcaccccagaggtgaatatgyacatcaaagaagagaaatttttcaccctgacagcctatgctgttccatggacccagaaggaatttgatcgcgttacgctgggctacactcaagggttctttgaaacagaacatcttctgaagagatattctagaagyatggcaattatgaacaatgtatctttggcccttcataggtgttgtgtggagctacygcataatgaggccctgatcaggcacctgaatgctacttcctttgatgtggttytaacagaccccgttaacctctgyggggcrgtgctggctaagtacctgtcgattcctgctgtgtttttttggaggtacwttccatgtgacttagactttaagggcacacagtgtccaaatccttcctcctatattcctaagttactaacgaccaattcagaccacatgacattcctgcaaagggtcaagaacatgctctaccctctggccctgtcctacmtttgccatrctktttctgccccttatgcaagycttgcctctgagctttttcagagagaggtgtcagtggtggatcttgtcagctatgcatccgtgtggctgttccgaggggactttgtgatggactaccccaggccgatcatgcccaacatggtcttcattgggggcatcaactgtgccaacgggaagccactatctcaggtctgtattggtgccttcatccaatcaatgttccaggcaaaayactttttaaaaaatgtatttacttacaagtgcttccatatctacttatctttccaaagattttattttggcttctttataacagataaactgttgaggggcctagtgtatttcaagttttcagtggtcactgagaggaagaagaggcacggaygagggtctgtcagaggatggacaaggactgctgtgactcacggacastgtttgtaaaggcaccatcttcatggttgtgcatgtccttcagctcggcaggatcagggacactacattcrgaactgatccatcctggggtttttgcttgcctgattttcagctgaacggtgatgcaacagtaaattagaattgtggacatgataatttttagtggtcccatcttgcgaaagatacagaggtgaccacaggagacctaggcactcacaggaagtagaagtgtcaaagaggttgactcagttgagtggaagtggggctgtgaaggtgggatggatgcatgtgatcagagaatgaaacatggagttcagtttccagagagggatctgtcctgagaaaagtttttctgaccaggagttgggggtctggtgtatgatgtggggacatcgtagagtttggaaggtatggtgatggttgcatgtcaaaagggtcttctacttggaatgctgaaattatcaagagtgggtggaagggactagggaggagataagaccgtgaatctataagcccagtgaagctgggaccagtgatgaatggacatgtgtccaagaagggaagtgtttctcaggtgaagctgatcatatcaccaaactcaccctatcccactccaagtttctatagtgggatctattctttttccaaaaatttcagaggtgactttcattaatacagaatatttgggtttcattgaaatagtactctgggatgtgaaaaaccaaattcacacaccaatgaatttggtttctaaatccattaagggagccatccttttttttttttttttcttgagactgagcctcgttctgtcrcccaggctggagggcagtggccggatctccgctcactgcaaccttcacctcccgggtttaagaaattctcccacctcagtctcctgagtaactgggactgcaggcatgtgccactgctcctggcaatttttttttttttttttttagtagagatgaggtttcgcaatgttagccaggctggtcttgaactcctgacctcatgtgatctgcccgcctcggcctcccaaagtgctgggattacaggcaagagccaccaagcccagtgagggagccatctttcttgtgagagaattgagcccttttttgtcatattcactgaatttatatgaacttccatgagtttaggtcctttgtattcttatttctgtacttctttttattagtgtaggtattattgcaaaggacactaaactttatttttgtttttgatcaaaccacaagatatttgttctactggttttcttttccccttatgcaatgtagttactgaattgtaaaaaatatatatgttctttagctttgtaaaaatgtggaaaattaggaaggcatttgaatagtgattgtggctcttttcttgtggtttttcactatgaatatattctttagactgaactgcactggctcaaatcttcactctcatttttctagctatgtgacctaggacaggtaccctaagcattgtggttttaatgttgttatagtgagcacccaataaatattatctgttatcattcttattattttagtttaattgcatttattttatgctgaatttcttccagagccataggtaawttttttcttcagtttcttctgggatatctttttcttctgtgcaacctcatcctcaggtttaggaacaatttgttccttatcagtaaagatcatcttgaatgtggcagtggggggtcatgtaagggttaatccaataatgagctctgcaagacgcatggctcatcttggatgctttgtttacttggataagcttaatgatgagagaatctacatctaaattgttatatttagcattattctctgcattttaaagcacrtgcagcaaaaatccagcaccctatttgggccaccgaccttgtgtccagccccactgctcggccctgggcacacttgccagcccctccattgcaatatcgaaatggtgcacactgcttccataaagtgacatccttcagacacttggtggctctttgtatatgcatacattgatggcctgggtagtttcacgaatgtcctttaagtgaacaggaaaactgaaacctcttgaattgcatgattttgtggtgtttctgggtcaagtgaataaagaagaattttcacagatcaccttaggcctcttagaggaagagctatcatcatcattagtagagtttaagactcctgcaggacaagatgtgtcacctggagacctttgccatgttcgtgccaatttactgagtgcatgaaagatcatttacaccaaaatctttatcatgtattatctgtgacagacaygccattatcatttttattacattgatttcctttgttattttgtcacccttacttacttggtttggttgacccttagatttgaaatttttctacaaatatacaagactaaagttgaaatcttacgtttcttctccctctctttctccttgatttaaagtttatggataggttgaattatttgattggtcttctcaaagaaataactgtggaatttgtatattcttttcactgtttcattttccgtttcgttaattgcagcttatttttgccttaatgatttcatcctagtttcttttggttgatttgtagctgcttttgcaacttcgttagaggactattacacttctttacatttgatttttcttaatgaagcattgagggctcgagtaaaagatttcttttacttaggttttggtaaaaattgctgttcttttcattgcttttagataatttaaatatcagtttttaaatttctcctttgatgcagtgactgtctataaggctgttacctaattctgatattgttaataattttgtagtcatctccctcttattttttcaagttattttgtattataataagaatgtttcttttttttttttttgaaggaaaaaataaatttattgctcattaagtggaagtggatcatcataaaggtcttcatcctcattgtctccatgctgagtgggctgaggaggaggaggaaggggagggattggtcctgctgtctcagcgtggcagaggcagaagaggatgagaaggtggaagggccagcgggagaggcaggcacactcggtgtaactttatggaaatatatcatcatttttgtttgacttttttcctttctcatttctctgaaaatgtttctgtacagtaccaattcttcttccaccatttgctttagtttcagtgcccaaaccatagaagggtccatgtggtaaaaaaagtcaaaactgacttttttttttttttttgagttggagtcctgctgtcacccaggctggagtgcaatggcacgatgttggctcactgcaacctctgcctcccaggttcaagcaattctcctgtctcagcctcacaagtagctaggactacaggcacacgtcaccacacctggctaatttttgtacttttagtagagatggggtttcaccatactggtcaggctggtctcgaactcctgacctcaggtgatccacccgcctcagcctcccaaagtgctaggattccaggtgtgagccactgcacctggtcaacaatcttttttttttttttttttttaatttatttttttattgataattcttgggtgtttctcacagagggggatttggcagggtcatgggacaatagtggagggaaggtcagcagataaacaagtgaacaaaggtctctggttttcccaggcagaggaccctgcggccttccgcagtgtttgtgtccctgattacttgagattagggattggtgatgactcttaacgagcatgctgccttcaagcatctgtttaacaaagcacatcttgcaccgcccttaatccatttaaccctgagtggacacagcacatgtttcagagagcacagggttgggggtaaggtcacagatcaacaggatcccaaggcagaggaatttttcttagtgcagaacaaaatgaaaagtctcccatgtctacttctttctacacagacacggcaaccatccgatttctcaatcttttccccacctttcccgcctttctattccacaaagccgccattgtcatcctggcccgttctcaatgagctgttgggcacacctcccagacggggtggtggccgggcagaggggctcctcacttcccagtaggggcggccgggcagaggcgcccctcacctcccggacggggcggctggccgggtgggggggctgacccccccatctccctcccggacggggtggctggccgggctgaggggctcctcacttcccagtaggggcggccgggcagaggcgcccctcacctcccggacggggcggctggccgggcggggggctgacccccccacctccctcccggacggggcggctggccaggcggggggctgaccccccccacctccctcccggacggggtggctgccgggcggagacgctcctcacttcccagatggggtggctgccgggcggagaggctcctcacttctcagacagggcagctgccgggcggaggggctcctcacttctcagacggggcggccgggcagagacgctcctcacctcccagatggggtctcgccgggcagaggcgctcctcacatcccagatggggcggcggggcagaggcgctccccacatctcagasgatgggcggccgggcagagacgctcctcacttcctagatgtgatggcggctgggaagaggcgctcctcacttcctagatgggatggcggccgggtgaagacgctcctcgctttccagactgggcagccaggcagaggggctcctcacatcccagacgatgggcggccaggcagagacactcctcacttcccagacggggtggcggccgggcagaggctgcaatctcggcactttgggaggccaaggcaggcggctgggaggtgtaggttgtagtgagcsgagatcacgccactgcactccagcctgggcaccattgagcactgagtgaacgagactccgtctgcaatcccggcacctcgggaggccgaggttggcggatcactcgcggttaggggctggagaccggcccggccaaacagcaaaacccggtctccaccaaaaccagtcaggcgtggcggcgcgcgcctgcaatcgcaggcactcggcaggctgaggcaggagaatcaggcagggaggttgcagtgagccgagatggcagcagtacagtccagcttcggctctgcatgagagggagaccgtggggagaggcagaggcagaggcagaggcagaggcagaggcagaggaggcagaggcagaggaggcagaggcagaggaggcagaggcagaggaggcagaggcagaggcagaggcagaggcagaggcagaggcagaggcagaggcgcctggtcaacaatcttaagtccaataagaatgtttcttatgaagacactacttaaaaaattcttaataggttaccttgatggtctaatacagaattgtccaatagaaatataatgtaagccacatacataatttaaacttttctagtgggcatgttagaaaccagcaaaaagaaaccactgaaattaattttactaaggcattgtttaaccagacatatcacaaatattatcctttcaacatatattcgatataagattatgacttaactatttgacatagttttttcttgctaagtcttcaaaatctagcatatatctgacatttacagcatatctcaatttggaatagtcacatttcaagtgctcaatagtcatatgtagttagtgactaccatatggtcaatgtttacaaatgtaaacattgtaagagacttacattttcttcacatagtttgttgttatcattaaataataatccttaaaatccattttattggataccagtattgctactcctatgttattttttcaattccccatctcttttaatttgaaaatgatttgtaggcaggtgggtggctcacacctgcaatttcagccctttgggagactgatgcaggaggattgtttgagcccaggagtctgagagcagcctgggaaacgtgctgagactgcatctctacaaaaaatcaaaaaattatccaggtgtgatggcgcacacctgtggtcccagctactcaggaggctgaggcaggaggattacttgatccgaggaggtggaggctgcagtgtgccatgttcacaccacctcactccagcccgagtgacagagtgaggccccatttcaaaaaaataaaaatttctttggcatatggaaatcttgtttaaaaagtttagaaaacattttttaaaactccaatatgaaaagctgggtgcagtggcatgcgcctrtggtcccaggtacttgggaggctcaggtgggaggatcattgagctcaggagtttcagcacctgtggttttttgatttatttatttaaaacacaacaaaaaccaaaattgcttccatctcatagtcttttgatgtcagcattctgattctgtccactcttaatcttattctttccactgaatgtaagctcatttctttaacagaaatttcctttttccttattaattttggaatttcatggtacttttccacttttagggagatgcagtgcagcgtcttcaagtctcccactcttacgcctgtctccttcacttgtaagagccctygtgattacactgtcctgcccagatacccaggacaatctccccatcttaaaactcttaatttaatcatatctgtgaagtctcttccacctgtaacggaacatattcccaggtttgaggaagtacaatgtagatacttttgtggggctgtgattctgcctaccacagacactaagcttaaagtgaaacccacatcttattcaaggcttggaggttttcctctattcgrccatttaaatttaatttttgttccttttctccatagtcttctattctccaggcttcagagctatcagcttaccattcaattatctccttttttcctgatcttccttttttcatttttaaaaaacaatacctttcaaagagcaaaagttttagattttgatgaggttctttctagcaaagttttatcatttgttgtttttgtaccctaaggaatctttaccccaagatgtgaagattagtttctgtgttctcttacaaacattaaagaattccagtttgtgtgtttaggtctgtgagattggcagaggggaacaagaccacacaggtcagtctttcaggatgcttttttctgtctctggactttgctggggtgacctcactgacacccatggcttccacatatgcggatggctccaagtctatctgtgcagcccagacccctcctcatctccagaccctggaagctgatgacttgggcagctccttctgtttcccaggcaccaggagctcctccctccccatagttctgctatccttagggcccctaggtctctggagtaccaccgtcttccaagatacatgggcctcctcagggtctgggagtcccagacatgtgacaagaaatcagatgacttcactgtctaaataaaacactactacttggaggtagaacatgggagcccatgaatgtgggaagagcacactaccaggcgtgttccacccgtcacctgggctcatcatgagggtgcttaggaagcatatagttttaagggggttggaggaatagttcagaggctgagaggttgcacccacagctgagaatccctttctagtgctctatgtccttacaaattcccaggaatcatcctctactggacagttcccaaagcccttgcagaccttccttttctgtgccatcctgcgtgtgctgcccttgagctgggtgtcccccagtagacgcttccattcactgcctgtcccatgggttctgtccaaaggtggaatctgttatcaatgtggagtaatttcctccctaagggaagcctcagcctcaccagcaatggcagacacggccaggcaagaagacacaggggcagtgagatagaaagtgcacaccccagacagcctgcccacatcatcctgaggtgaccaggacaaggtggcatcagcaatcttgtgagcacagcacatgtgggagtgactttctggagtaggataagcctcattgggcttgaggcccttgtgagtgctcagggtctctcctttagaaaggcacatatttaattctccatcttgaaatttggactagggcccccacaaattgtgcagcccattctgttctggaggaaccattcttatcagaacttggtgctggattgacttggagaagagcctgaccataatcttcaggatgaaataaaggcctggatgactgaaataaagactggagccttcggcattcagaagaggaattcagactgtgcaagatctgaggccaggctccagctcccccagtcccttggtgagcaggagctccctgaacccaccrtgggtcyttgctagggttgtcttgcccatgtgtgctttagatagcagcacctcttcttccatggtgtatatggagaatcctcaacaaagtcttcccaagaatctgatcatcacatcttgagctcagcctccctgcagctttttctatattgacagccacttcagagagagtcctctytgatccttacaagaaatatcctggtgcgaaaaacgaccaaaaccacatagccagcctccacgctgttcagagaaagctggcttagcaatgttgtatggtttttggatgcgctgcgttactcatacatgagaagaaagtttcaagggttagcaaatagggtcacatccagcagagagcatatgactgggggctagggcaatggtgactcctcagacctcagctgctgcctgataaacatggttaacagagaagtaggagacagtgacatgaaatgggtgttcacagccttgtgttgggaattggatgagaaacaagagcttgaacttggatgttccccagagtgagcacagggtcagacgtgtttttcaagatagtcrtgatcggtcttttccagggtggggcccacagtgaaaaacagtgatagattaatggttaataattaactagaggagggcactctgtcttccaattacacgttgatttgctaagtggctcagtgacaaggtaattaagaygaagaaagcaaatgtagcaggcacagcgtggggtggacagtcagctgtccgtgtcttctgctgagatggccacaggactccaggttcccctgccgyggctggccacaggactgctgcttctcctcagtgtccagccctgggctgaragtggaaaggtgttggtggtgcccattgatggcagccactggctcagcatgcgggaggycttgcgggagctccatgccagaggccaccaggcagtggtcctcaccccagaggtgaatatgcacatcaaagaagagaactttttcaccctgacaacctatgccatttcgtggacccaggatgaatttgatcgccatgtgctgggccacactcaactgtactttgaaacagaacattttctgaagaaatttttcagaagtatggcaatgttgaacaatatgtctttggtctatcataggtcttgtgtggagctactacataatgaggccctgatcaggcacctgaatgctacttcctttgatgtggttttaacagaccccgttaacctctgcgcggcrgtgctggctaagtacctgtcgattcctactgtgttttttttgaggaacattccatgtgatttagactttaagggcacacagtgtccaaacccttcctcctatattcctagattactaacaaccaattcagaccacatgacattcatgcaaagggtcaagaacatgctctaccctctggccctgtcctacatttgccatgctktttctgctccttatgcaagccttgcctctgagctttttcagagagaggtgtcagtggtggatattctcagtcatgcatctgtgtggctgttccgaggggactttgtgatggactaccccaggccaatcrtgcccaacatggtcttcattgggggcatcaactgtgccaacaggaagccactatctcaggtctgtattggtgccttcatccaatcaatgttccaggcaaaacactttttwaaaaaatgtatttatttaaaattgcttccatatttacttatctttccaaatatttcatttctgcttctccttgtcataatagccttcagtgagataaactgttaaggggtctctagtagcgtatttcaggttttaaatggtcactgagaggaagaggaagtagacacgaatgtttgtaaaaggatggacaaggactggtgtgactcatagagactgttggtttgtaaaggcaccatcttcatggttgtgcatgtccttcagcttggcaggaacagggacactacgtttggaactgatccatcctggattttttgctagcatgattttcaggggaaagatgatgcaacagtaaattacaattgttgacatgataatttttagttgtcccatcttgcaaatgatagacaggtgaccacaggagacctaggcactcacatgaaatagaagtgtcagagaggttgactcagtggaagtggggcaatgaagttgggatggatgtctgtgattagagaatgacacacgaagttcagtttccagacagggatctgtgctgtcaagagattttctggtcaggatttggggtctggtgcatgatgtggggacatctcagagttcggaaagcaaagtaatggttgcatctcaaatgattcttctacttggaatgctgaaattatcaagaaatggcggaaggggctagggaggagataagactgtgaatctataagcccagtgaagctggggacagtgatgaatggacatgcgtccaagaagggaagcatttctcaggagaggctcatcacatcaccaaacccaccctactgcactccaggtttctatagtgggatctactcctttaccaaaaatttcagaggcagctttcattaatccagaatatttgggtttcgttgaaatggtactctgggacctgaatattgtttcttattccttgctgtgccatgtacatcgtgagagaatcagcctttttatgtcatattcaccgaatgtgtatgaacttccatgatttagatccttttgtattcttatttctgtgccttttttataaatgtaggtattattgcaaaagactctaagcttcatttttctttttgatcaaacgacatgatttttttatgcaatgtaattattcaattataaaatacgtgtttatttagatttgtaaaaatgttgaaaagtgggatggcatttaaatagtgactgttgcccttccagtttttctttcttttttttttttttattatactttaagttctagggtacatgtgcacaaattgcaggtttgatacataggtatacatgtgccatgttggtttcctgcacccaccaactcgtcatttacattaggtatttttcctaatgccatccctcccccagtcccccaccccacaacaggccctggcgtgtgatgttccctggcctgtgtccagtgttcttgctgttcagttcccacctatgagtgagaacatgcggtgtttggttttctgtccatgtgatagtttgctgagaatgatggtttacagctttgtccatctccctgcaaaggacatgaactcatccttttttatggctgcatagtattccatggtgtatatgtgccacattttcttaatccagtctatcattgatggacatttggattggttccaggtctttgctattgtgaatagtgccacaataaacatacgtgtgcatgtgtccttagagtagtatcatttataatcgtttgggtatatacccagtaatggtatggctgtgtcaaatggtatttctagttctaggtccttgaggaatcgccacactgtcttccacaatggttgaactaatttacactcccaccaatggtgtaaaagtgttcctatttctccacatcctctccaacatctgttgtttcctgactttttaatggtcaccattctaactggcgtgagatggtatctcattgtggttttgatttgcatttctctgatgaccagtgatgatgagcatttattcatgtgtctgttggctgcataaatgtcttcttttgagaagtgtctgttcatatcctttgcccactttttgatgaggttgtttgtttgttttttttcttgtaaatttgtttgagttctttgtagattctggatattagccctttgtcagatgggtagattgcaaaaattttctcccattctgtaggttgcctgttcactctgatggtagtttcttttgctgtggagaagctctttagtttaattagatcccatttgtctattttggcttttgttgccattgcttttggtgttttagtcatgaagtcctggcccatgcctatgtcttctaggccatgcctatgcctaaatgatattgcctaggttttcttctaggatttttatggttttaggtctaacatttgagtctttaatccatctggaattaatttttgtataaggcgtaaggaagggatcctgttccagctttctacatatggccagttttcccagcaccatttattaaataaggaatcctttccccattgcttgtttttgtcaggtttgtcaaagatcaaatggttgtagatgtgtggtgttatttctgagaccactgttctgctccattggtctatatatctgttttggtaccagcacccatgctgttttgttactgtagccttgtagtacagtttgaagtcaggtagcatgatgccaccagctttgttttttttttttttttgcttaggattgtcttggcaatgcaggctcttttttgattccatatgaactttaaagtagttttttccaattttgtgaagtcattggtagcttgatgggtttggcattgaatctataaattaccttgggcagtatggccattttcacgatattgattcttcctatccatgagcatggaatgttcttcsatttgtttgtgtcttcttttatttcgttgagcagtggtttgtagttctccttgaagaggtccttcacatcccttttaagttggattcctaggtattttattctctttgtagcaattgtgaatgggagttcactcatggtttggctctgtttgtctgttattggtgtataggaatgcttgtgatttttgcacattgattttgtatcctgggactttgctgaagttgcttatcagcttaaggagactttgggctgagacaatggggttttctaaatatacaatcatgtcatctgcaaacagggacwatttgacttcctcttttcctaattgaatgctctttatttctttctcttgcctgattgccctggccagaacttccaacagtatgttgagtaggagtggtgagagaggtcatccttgttttgtgccagttttcaaagggaatgcttccagttttcgcctactcagtatgatattggctgcgggtttgtcataaatagctcttattattttgagatacttccatcaatacctagtttattgccagttttaggcatgaagggatgtttaattttgttgaaggccttttctgcatctgttgaaataatcatgtggtttgtcattggttctgtttatgtgatggattacatttattgatttgcatatgttgaaccagccttgcatcccaaggatgaagccgacttgatcgatgtggataaactttttgatgtgctgctggatttggtttgcagaattttactgaggatttttgcatcgatgttcatcagggatatttgtctaaaattttctttttttgttgtgtccctgccaacctttggtatcaggatgatgctggcctcataaaatgagttagggaggattccctctttttctattgattggaatagtttcagaaggaatggtaccagctcctgtttgtacctctctggtagaattcggctgtgaggaaggggaacatcacatactggggcctgttgtggggtagggggagcggggagggatagcattaggagatatacctaatgttaaatgacgagttaatgggtgcagcacaccaacatggcacatgtatacatatgtaacaaacctgcacattgtgcacatgcaccctaaaacttaaagtataataataataataataataaaaagaatttggctgtgaatccatctggtcctggactttttttggttggtaggctattaattattgcctcaatttcagagcctgttgttggtctattcagagattcaacttcttcctgctttagtcttgggagggtgtatgtgtccaggaatttatccatttcttctagattttctagtttatttgtgtagacgtatttatagtattctctgatggtagtttgtatttctgtgggatcggtggtgatattgcctttactattttttattgcgtctatttgattcttctctcttttcttctttattagtcttgccagaggtctatcaattttcaaaatccatctcctggattcattgatttttttgaaggtttttttgtgtctctatctctttcagttctgctctgatcttagttatttcttcccttctgctagcttttgaatttgtttgctcttgcttatctagttcttttatttgtgatgttagtgtgttgattttagatctttcctgctttctcctgtggggatttaatgctataaatttccctctacacactgatttaaatgtgtcccagagattctggtatgttgtgtctttgttctcgtcggtttcaaagaacatctttatttctgccttcacttcgttatttacccagtagtcattcaggagcaggttgttcagtttccatgtagttgtgcgattttgagtgagtttcttaatccagagttctaatttgactgcactatggtctgagagacagtttgttgtgatttctattcttttacatttgctaaggagtgctttacttacaatcatatggtcagttttagaataagtgtgatgtggtgctgagaagaatgtatattctcttgacttagggtggagagttctgtagatgtctattaggtctgcttggtgcagagctgagttcaggtcctggatatccttgttaacctttggtcttgttgawctgtctaatatygacagtgggatgttaaagtctctcattattattgtgtgggagtctaagtctctgtgtaggtctctaagaacttgctttatgaatctaggtgctcctgtattgggtgcatatatatttaggatagttagctcttgttgttgaattgctccctttaccattatgtaatggccttctttgtctcttttgatttttgttaaagtctgttttatcagagactaggattgcaacccctgctttttttttgctttccatttgtttggtagatcttcctccatccctttattttgagcctatgtgtgtctctgcatgtgagataggcctcctgaatacagcataccgatgggccttgactctttatccaatttgccagtctgtgttttttaattgcagcatttagcccatttacatttaaggtaaatattgttatgagtgaatttgatcctgtcattatggtgttatcgggttattttgcccgttaattgatgcagtttcttcacagcatcgatagtctttacaatttggcatgtttttgcagtggctggtactggtgtttctttccatgtttagtgcttcctttaggagctcttgtaaggcaggcctggtggtgacaaaatctctcagcatttgcttgtctataaaggattttatttctccttcacttatgaagcttastttggctgcatatgaatttctgggttgaaaattcttttctttaagaatgttgaatattggcccccactctcttctgtcttgtagggtttctgcagagagatctgctgttagtctgatgggcttccctttgtgggtaacccgacctttctctgtggctgcccttaacattttttccttcatttcaactttggtgaatctgacaattatgtgtcttggagttgttcttctcgaggagtatctttgtggtgttctctgtatttcctgaatttgaatgttggcctgccttgctaggtttgggaagttctcctggataatatcctgaagagtgttttccaacttgtttccattctccgcatcactttcaggtacaccagtcaaacgtagatttggtctttccacatagtcccatatttcttcaaggctttccttgtttctttttactcttttttctctaaccttgtcttctcactttatttcattaatttgatcttcagtcactgataccctttcttccagttgctctaatcagctattgaattttgtgcatgtgttatgaagttcttgtgccatggttttcagctccatcaggtcatttaaggtcttctctacagtgtttattctagttaggcattcatctaaccttttttcaaggttcaaccttccttgcaataggttcgaacatgcacttttagcttggagaggtttgttactaccaaacttctgaagcctacttctgtcaactcgtcaaagtcattctctttccakctttgctccattgctagcaaggagctgtgatcctttggaggagatgtgcttatgcgctatggtttttagaattttcagcttttctgctctagtttccccccatctttgtggttttatgtaccttaggtctttgatgttggtgacctacagatggggttttggtgtagatgtcctttttgttgatgtttatgctgttcctttctgtttgttagttttccttctaacagtcagatccctcagctgcaggtctgttggagtttgctggaggtccactccagatgctctttgctttggtatcaccagtggaggctgcagaacagcaaatattgcagaacagcaaatattgctgcctgatccttcctctggaagcttcataccagaggcgcacccacctatatgaggtgtctgttggcccctactgggaggtgtttcccagtcaagatacacagaggtcagggacccgcttgaggaggcagtctgtccattctcagagctcaaatgccatactaggagaacgagtgctctcttcagagctgtcagacagggatgtttaagtctgctgttccccacatgttcagaakttgtctgctgccttttgttcagatatgccctgcccacagaggtggagtctatagcggcagtagcccttgctgagctgcggtggactctgttcagttccagcttcctggatgctttgtttacctactcaagcctcagcaatggcggacacccctcacccagccaggctgccgcctcacagttcaatctcagactgctgcactagcagtgagcaaggctccgtgggcatgggagctgctaagccaggcaggggagagaatctccttgtctgccagtttataagaccttgggaaaagcacagtatttgggtgggagtgtcccgtttttccaggtacagtctgtcatggctccccttgtctaggaaagggaaatccctcaccctcttgcacttcctaggtgaggcgacgccctgccctgcttcggcttgccctcagtgggatgcacccactatccaaccagtcccaatgagatgaaccaggtacctcagttggaaatgcagaaatcatccatcttctgcgtcgatcatgctgggagctgcagatcggagctgttcctatttggccattggtgctgaagcttccgttctcctctccaacacctcctttttttttccttttctcttccagtttttcaatgtgaacatattctctagagttaactacattggctcaaatcttcactatcatctcagtggagcagaacaaattgggaactgtggcacaggtcactcttgctatgccccttaagaattccacattaacaaagctaattttcgagtgtggtaaagaacaggctagtgtatttagtagtgagtccattgactgtttcccaacatgaggtcacactagatttaatatggtttggctctgtgycccccaccaaatctcatcttgaattgyaatccccataatccccacgtgttgaggacaggacatggtgggaggtccccacctcctmatctcatcatagtgagtgagttcttatgagatctgatggttttataaggggcccttatcccttcacttgcaagctattcctctttctctctttcatgtaagacgtgtctttgcctctctctcactttctgccaggattataagtttcctgaggcccctccagccacatggaactggagtcaattaaagctctttcctttataaattacccagtcttgggtatgtctttatagcagtgtgtgaatggactaatacagtaaattggtgtcatggagagtggggtactgctataaaactacttgaaaatgtggaagtgacttggaactgggtaacaggcagaggctggaacagtttggagagctcagaagacaggaagatgtgggaaagtttggaacttcctggagacttgttgaacggttttgaccaaaatgctgataatgttgtggacaatgaagtccaggctgagtctcagatagagatgaggaatctgttgagaactggagcaaaggtcactcttgctaagctttagcaaagaaactcgtggcatttttgcccctgccctagagctctttggaactacgaacttgagagagatratctgaaattggaacttatgtttaaaagggaagcagagcataaaagtttggaaaatttgcagcctgaccatgtggtagaaaagaaaaacccattttatggggagaaattcaagccagatgcagaaatactagctaaagaaatttgaataaataaggaggarccaaatgttaatcaccaagacaatggggaaaatggctccagggcatgtcagagacctttgcagcagaccctcccatcacaggcctggaggcctaggaaggaaaaatggtgttttaggctgggtccaggcccccactgctgtgtgcagcctcaggacttggtgccctgtgtcccagtggctccagccatggctaaaaggggccaaggtagagctcaggccattgcttcagagggtgcaaacctcaagccttggcagcatcgatgtggtgttgggcctgcgggtacacagaagataagaatttaggtttgggaacctccacataaattttagaggatgtaaggaaatgcttggatgtccaggcagacgtttgctgcatggatagagtccttatagagaacctctgctagagaagggtggtaaagaaatgtgaggttggagcccccacasagagtctccactggggcaytgcctagtggagttgtgagaagaaggccacagtccttcagaacccagaagggcagatccaatagcttgcactgtgtgcctggaagagccacagacatcaatgccaccctctgaaagcagccaggacgagggctttaccctgcaaagccacagggttggagctgcctgagaccgtgggagcccatttctggcatcaccttgatctagatgtgagacatgaagtcaagggagattattttggagctttaagatttaatgactgccctgcctggttttggacttgcatggggcctatagcccctttgttttggccagtttctcccatttgaaatgggaacatttacccaatttctgtacccccattgtgtcttggaagttactaacttgtttttgattttacaggctcatgggggaagggacttgacttgtctcagatgagaccttggactatggacttttgagctagtgctgaaatgagttaagactttggaggacagttgggaaggcaygattggtttttaaatgtgaaaagacatgagatttgggatgggccagagggcagaatgatatgatttgactgtgtgtttccacccaaatctcatctcatattgtaatttccataatccccatgtgttaaggttggtacctggtgggagctgattgaatcatatcggcagttttccccatgctgttcttgtcatactaagtgagttctcatgagagctgatggttttataagggactctttctcctttactcacaagcttttcctctctgtctctcgcctgctgccatgtgagacatgcctttgcttatctctcaccttctgtcatgattgtaagtttcctgaggcctccccagtcatgtggaactgtgagtcaattaaacctctttcttttataaattacccagtctcrgctgcgtctttatagcaggctgagaatagactaatacaagattggtggtgattgaagttatactgaaagggtttaaaggagagtctgagaaaaggaaatgaatctgcatttattgagaaagttgatgagaaagtggaattagaaattcctagaaaggtaagttgttgtgtgaattatttcccaaaatggggaagtctctctacctgtttggagacagaaagtggaatcagaggagaagaagatgatggacagaaaggatcattccctcttccagatgctttccagtgtgtgatgtaagctgaactaaaatcagctgtgttgaactccagccagaaaaaatgtccggcattttgttttttgggaccctaatgaaatggttacaggtctccaggtctcttggggctcacagggtcatgcctttccttgcccagtgtacttggtragaaggtacaggtgtttccatggagggtgttcattttagggatttcaagagggtcatctttgcaccacaggaaatgcccccttttacactctgaaaaccttatcaaaccgttgtataaaagatgaatacccacataacaggctctagcactgttctgtttttgagctgagacattttaaaaggagatttttcaattctaaaaattctttaaataaaatgctcttgcagggacaacatagtaggtcaacattgttcccatctccacaaaaagttttttttttaattagctaggtgtggtagcatttctgtagtcctagctactgggaatgctgaggaggaaggatcacttgagcccaggaattcgtggttacagtaagctatgatcttgcctaggtaacagctacagagcgagaccctgtctttaaaacaaacaagcaaacagacaatcaagctttacacttctataaaagcaacactttccatttatgacagcactaatccaggatatatcaaaactgaacttgtgtttgctttcaactgttaaaactagccagagttgttacagacccactacctctgagtgacactggtatgccactctttgctgaccactgaacaatgggatttatgtacccaattgtgtagatacacaccaactcattctactctacccagagtagtgatttccaacacacaaaaccacaatgaaactgcccatgcctttctaccactttgaaactcctttcatccctgaactgctccaaaagcaaacctactcagcaaactactcagtgagtatcttcacacatgtaagttccctcgtctgatgtacaaaaaactgaactcatttttcaaaagccttaacagtctgtcttattctgatacttcttktatggttattgtatgagaatcaactacccaggcacctcggagyatgttgatttcagagttcagtgtcagaccccatgagcccctgtgggatggtgccagctgactgccatgttcctgctgtttattgcttgggtgccattacatgcagagtggactctgagggttctagagcatatccaaacccatatcacactctttgttggttaatgatgtgttcaggccatgatttttctgtaaaaaattaccagcatgctgctcttaatttttttcagcctatccagttcagttgccttttgctctcatgccttatgcaaacctttcctcagaggtgaccctagaagaagggaccctttgtgatggaaaaggtcytcatttggggcataacctgtgccaacagaaaggtactttctygttgtgtttatggtgcctcacccaaaaaatattacagatacacttggctttcatcaacctaatttgatatgtcccaagcatagcaataggatagttctgtgtggccttatggagatcctttttttacatttccaggacccactgccaagaccagcttggtcgtggagaccctaacccagcagcgctagacgaattaaagacacacacacagaaatatagagtgtggagtgggaaatcaggggactcacagccttcagggctgagagccccaaacagagatttacccacatatttattgacagcaagcctgtgataagcatcatttctatagattatagattaactaaaagtattccttaygggaaacaaagggatgggctctggctaattatctgcagcagaaacatgtccttaaggcacagatggctcatgttattatttgtagtttaggaacaccttaagcggttttcctccctgggtgggccaggtgttccttgcccttattccagtaaactcacaaccttcagcataggcatcatggctatcatgaacacgtcacagtgctgcagagattttgtttatggccagtttaggggccagcttctggccggaattgggggcttatccccagcaacctaccatagttggagaaccacgttcaggctgaagacagtcctagtataccaccgaccaaccatgtaaccccaaggtttgtcctcagccttcagagggaacatgcttccaccgatttcagctcagtgatatgggattcaaatgtctgacctccaaaatattaagataataaatgcatgttgttttgaaccatcattaaattaagccagaagtattgatattatttgtagatttcaccactacacactaaacaataaagtcaaatgatttagagcaaaccacctggctcacactttcccaacggaaaaaggtaatgctcaaagtgctgaactgaacattctgtcctaccactagcaaataatcattgtctgcctcaggcttaagtttaataaatagcaaattgcatacagatattttacaaygatygaaagacaaacagaggtcctatccgtgyagtcccaacrataagaacaggyrttggcatraagtgtttataaattcttgggtacagctgttctgaaagtaaagttcactttcaatcctaaaaaaagtccgctattcctccagatgtgcttaaagtcaaatgtggactggaattacttggtgtcaatgsggagyaactgctctwtgcyrtttattatgaaggactttaactcaactctccatcttcctccacttccaccctttcttggccattctcaatgattctcttggtggtgatttttttaccatcaactatttcagtggaagtcgacatggacttgaagctgcctgtcccatcactaccgtaggacatgcagaaggaagaaaggcccccacttcccagggagccaaaggaacgaaatcctgtatcaaaagaagaaaaamcacccccaaaagctggaaattcactgaaggcagagaaaaggggtgcagacgctctgcttctgcttccccagcagttcctcygaccccccmaaaatattctccagcgggtttcccaagaggtcaaaggagaatgggtccyggccgccgaagaaytccctgaagacstcggctgggtcgcggaagctgaagacgtactcgaagggktcctcgaagggcctgccgcctgtgcagccgccctccgcscccgcctcgccatagcggtcatagatatcgcgtttcttggcgtccgacaacacctcgtaggcctcggccacctgcttgaatctcctctccgcttcctccttgttctcagggtttttgtcggggtgccacttgagcgccagcttgcggtacgccttcttgatggcctcggatgaggcctgccggggcacgtccagcacctcgtagtagtccaccatgctggatggccagaacggcccaccaggcactggcacagcgagcggcaaggctgccagcacccaggcgcaggcccgagtgctcggagacctgggccgcctggagagacgccccttatgacgcagccacatctcattggtcgaggcctatgagcgcctcgcatcccaagatgcagtgcttctgggactggccctgctctctgtgaggctctgtgaggccctgtgatgctccaagaccaggccccgcccactccggcctccaaccagccatggtctccaaaaaggatgggaaaaagaggttggggaaaagagagggccttgactttggctgcctgaagaactgtttttcttaaagtaggctttatatcagtctttttcctcggccacaggagggaagagggtggtgggagtgagtttagtctgactggggctgaagacatcctgttgtttaggactgcagttctccaacgttccagccccggtgcccatttgcttttgttcatgtggattatatctatcatacgtactgcattagagattaaaacagaattaaaaagacatattaattgggcaatttagtaagaataaacccatgacacaatagcaaatcttatttttatgtaamttttattaagacaaaatgtagtgagaagagtggcatcgttttacagtttttgcatctctctttagtacttggctctatagagaggtggattctcatgtcagcttctgtattcaatctactgtgatattacacatcacccatgtagcttctggaaaactccactgtacacttgtgagagaatgacggtgaaaaaatcaagtagcattattatggaaatagttttaactttgcaaaattctcctgaaaaattcttggggatccctaggatttcctggctcatactttgagaatcgctagtctagcagagtagtccttggtattctgaagggattagtttaggacaaccctcctctccataccaaaatctagatgctcaagctccttttataaaatgacacagtatttgtatataacctaccaatatccttctttaagcctctagtcatctcttgattacttttacctaataaatgtaaatgctatgtaaatagttgttttacagtattggttttttatttgtattatttgtattgttttttcattgctcttccccccaaatatttttaatctgctgttggctgaatctgcagatgtgaagcccaagtatatggagggtcaaatgtgcatgttattcacttttcttgactgctaaaacaaccagggagatcctctcagacaaaaggaaatacagcactatttactgtatcgaaaccattaagacttgcaggccgtgtgtatagcactggggataaacgtgggatgcagtgattatttccactagaactgctatatcatgaccatgaattttgggggaatttttttgagatctgagttctcttcacctccttattctctttttgacactggattcttttctttgataaattgtgaggcaatacactagtaaaggtcactcagttctaaggggaaaatgattaaccaaagaacattctaagatttcctatagggtattaggtctaatggggatgtgttatgtcaccagaacaaacttctaagtttatatagcctctagtgacataacctgagacccggacttggcacttggtaagcacacaatgaacagtcatagaaagctggccgagggtagagttcagtgtgaacaaagcaatttgggaacatcaaagcaagtttggagaacaacaagtgatccagaatggctggagggtaagaggcagagggagggggcaagcagaaggggtggagaggaggaatgagcttagacaggggggctggggtctatcccagagttttgagagcaaggcagaggactctgaattttcttctgtgcccaggaagctgctgaccaaggttccagaagtgttggtggggtggcgtttttcagggagcagctgaggcagtgattcagaagggacagctgggggttgggcaactgggggacaggggccctgaaatgggaccatgacagctgggtctgagagacagtggtagaaacatccagattcagcacttacttgctggcttggatgcagggtctagaacgaaaagagaagaggagtcacttctatacagaaacatgtccagagtgcttactgtctgcaaaactgtggactggcacctgagtgatagcatgattccaaagccaaaatcttgcctgtaaggaatatatgtataggatatagctatactctaatagcaaggacagatatgcaaactgctaaaagatacaaggcagaacagaacaaaacgctgtggggattcaaggaaggtggctttgtttcccttggagggccctgtagatgatctacagggcaatggacatgtttatgttgctcctttagtaacaagtcccttcattctgatttgatgaaaggagctgggagtgtgtccaatggtgacctattaacttatgtcttcagcttaaaaagaaagtaccttcaaaagggttccagaaacactttccatggacatgtcactcttyagtagcccccaaagcaagaccatcatattgctgccctgctgtgtgacttcttagcccctagagcaccacaccctgtaattgcctagttgtgagtttgtctctgttcacctgacccctcctttcaggcaaggaccatttctaacttggctttctgtccckagttcctagmatagtaggtagggctcacacattccataaatatttggtggataagggaattagcaatggattctgctttggttccaaagcagagattaattggattgcttagtagtggttttctgttgtaattcatgagcgtgaatgtggattgcctactattgcctaccactgttggggacctctcagacctcagctgcagcctgataaacgtggttaacagagaagtaggaggctgtgacatgaaatgggtttccacaggcctttgttgggaattggatgagaaacaagagcttgaacttggatgttccccagagcgagcgcagggtcagatgagtttttcaagtaggagtgatcggtctttcccgaagtgggacccataatgaaagacaatgattggttaatcggtaataattaactaggaggagagcactctatcttccaattacatgatgatttgctaagtggctcagtgacaaggtaattaagatgaagaaaacaaatgtaggaggcacagcgtggggtggacagtcagctgtccgtgtcttctgctgagatggccacaggaccccaggttcccctgctgtggctggccacaggagtgctactccttctcagtgcccagccctgggctgagagtgggaaggtgctggtggtacccattgatggcagccactggctcgcatgcgggaggccgtgcgggagctccatgccagaggccaccaggcrgtggtcctcaccccagaggtgaatatgcacatcaaacaagagaaatttttcaccctgacaacctatgccatttcatggacccaggatgaatttgatcgccttgtgctgggccacactcaactgtactttgaaacagaacattttctgaagacattttctaraagtatggcaattwtgaaaaattcatctttggtctttcataggtcttgtgtggagctactgcataatgaggccctgatcaggcacctgaatgctacttccttcgatgtggttttaatagacccaatttacctctgtggggcagtgctggctaagtacctatcaattcctgctgtgttttttttgaggaacattccatgtgatttagactttaagggcacacagtgtccaaatccttcctcctatattcctaagttactaacgaccaattcagaccacatgacattcctgcaaagggtcaagaacatgctctaccctctggcccygtcctacctttgccatgctctttctgctccttatgcaagccttgcctctgagctttttcagagggaggtgtcagtggtggatcttstcagccatgcatctgtgtggctgttccgaggggactytgtgatggattaccccaggccgatcatgcccaacatggtcttcattgggggcatcaactgtgccaacaggaagccactatctcaggtcggtgttygtgccttcatccaatcaatgttccaggcaaaacagtttttaaaaattgtatttacttacaattgcttccatatctacttatctttctggtgcttttatttctgcttgtcgtaatagccttcagtgagataaactgttaaggggtctctagtagcrtatttcaggttttaaatggtcaatgagaggaagaagrggcagacatgaatgtttatcaaaggatggactaggactgatgtgactcatggagactgttcgtttgtaaaggcaccatcttcatggytgtgcatgtccttcattgggaaggagcagggacactacattgagacttgacccatctggattttttgtttgcacaattttcaggggaaagatgatgcaacagcaaattacaattgttaatgtgataatttttagtggtcctgtcttgcgaatgatagagaggtgaccacaggagacctaagcactcgcaggaagtagaagtgttaaagaggttgactcagttcagtggaagtagagcaacgaacgtgggatatatgtctgtgattatagaattacacactgagttcagtttccagagagggatctgtgctgacaaaagatttttctggtcaggatttggggtctggtgcatgatgtggggacatctcagagttcggaaggcatagttttggttgcaggtcaattgggtcttctacttggaatgctgaaattatcaagaaattgtggaagggtctagggaggagataaaactgtgagcgtataagcccagttaagctggggacggtgatgaatggacatgtgtccaagaagggaagtgtttctcaggtgaagctgaacatatcaccaaacccaccctatcccactccaagtttctatagtgggatctacttctttaccaacaatttcaaaggcagctttctttaatccagaatatttggggttcattgatgtggtactctgggacctgaatattgtttcttattccttggtgtgccatgtatttcatgagagaattcagcctttttatgtcatattcactgaatgcatatgaacttccatgacttgatccttttgtatttttatttctgtacttctttttattaacataggtattattgccaaacactctaagcttcattttttaaaatcaaaccacatgatttttttattggtgattttctcccttatgcagtgtagttattcaattataaaatatgtgtttattagatttgtaacaatgttgaaaagtgggatggaatttaaatagtgactcttgcccttttcttccagtttttcaatgtgaacatattctctagtgttaactacattgctcaaaacttcactgtcatctcagtggagcagaacgaattgggaactgtggyacagatcactcttgctatgccccttagagaattagagaacactagcaaggctaattttcgagtgtggtaaagaacaggctaatgtattcaatagtgaggccactgactctgtctcaacatgaagtcacactagrtttatcatgatttggctctgtatcccccaccaaatctcatcttgaattgtaatccccataatccccacgtgtcaaggacaggatctggtgggaggtgmttggatcatgggggcagtttcgcacctgctggtctcatcatagtgagtgagttcttatgagatctgatggttttataaggggccattgtcccttcacttgcaagctcttcctctttctctctttcatgtaagacgtgtctttgcctctctctcactttctgccaggattataagtttcctgaggctcccccctccagccacctggaactgtgagtcaattaaagctctttcctttatgaattaccgagtcttgggtatgtctttatagcagtgtragaatggactaatatattaaattggtgccatggagagtggagtactgctataaagatacttgaaaatgtggaagtgactttggaactgrgtaacaggcagaggttggaacagtttggagagctcagaagaagacaggaagatgtgggaaagtttggaacttcctagagacttgttgaatggttttgaccaaaatgctgataatgttgtggacaatgaagtccaggctgagtctcagatggagatgaggaacttattgggaactggaacaaaggtcacccttgctatgctttagcaaagagactggtggcattttgcccctgccctagagatctgtggaactttgaacttcagagagatgatctgaaattggaacttatgtttaaaagggaagcagagcataaaagtttggaaaatttgcagcctgaccatgtggtagmaaagaaaaacccattttatggggagaaattcaaaccagctacagaaatactggctatagaaatttgcataagtaaggaggagccaaatgttaattgccaagacaatggggaaaatggcttcagtgcacatcagagacctttgcagcagaccctcccatcacaggcctggaggcctaggaaggaaaaattgttttgtgggctgggtccatgctccccctgctgtgtgcagcctcaggacttggtgccctgtgtcccagtggctccagccatggctaaaagaggccaaggtagagctcaggccattgcttcagagggtgcaaacctcaagccttggcagcatcgatgtggtgttgggcctgtgggtacacagaagataagaatttaggtttgggaacctccacataaatttgagaggatgtaaggaaatgcttggatgtccaggcagaagtttgctgcatggatggagcccttatagagaacctctgctagagaagggtggtaaagaaatgtgaggttggagcccccacacagagtctccactggggcactgcctagtggagttgtgagaaggcggccaccatcctccagaatcccaaatagtagatccaatagcttgcactgtgtgcctggaaaagacacagacactcaatgccagcctctgaaggcagccaggaggagggctttgccctgcaagccacagtgtccaagttgcctgagactgtgggagcccacttctggcatcagcatgacctagatatgagacatgaagttaaaggtgataattttggagctttaagatttaatgactgccctgcctggttttggacttgcatggggcctgtagccccctttttttggccagtttctcccatttggaatgggaatatttacccaatttctgtacccccattgtgtcttggaagttacttttgattttacaggctcatgggggaagggacttgccttgtctcagataagactttggactatggacttttgagctagtgctgaaatgagttaagactttggaagattgttgggaaggcacgattggttttgaaatgtgaaaagacatgagatttgggaggggccagagggcagaatgatatggtttgactctgtgtttccacccaaatctcatctcaaattgtaatctccataattcccatgtgttaaggatgggacctggtgggaggtgattggatcatgtgtgcagtttcccccttgctgttctcatcctactgagtgagttctaatgagagctgatggttttataaggggctcttcctccttcactcacaagtgaactcttcctctctgtttctctcttgcttgctgccatgtgagacatgactttgcttatctctcaccttctgtcatgattgtaagtttcctgaggcctccccagccatgtggaactgagtcatttaaacctttgtcttttataaattaccccgtcttgggtatgtctttatagcagtgtgagaacagactaatacaagattggtggtgattgaagttatactgaaagggtttaaaggagagtctgagaaaaggaaatgaatctgcatttattgagaaagttgatgagaaagtggaattagaaattcctagaaaggtaagctgttgtgtgaatgatttcccgagatggggaagtctctctacctgtttggagacagaaagtagaatcagaggagaagaagatgatggacagaaaggatcattccctcttctagatgctttctagtgtgtgatgtaagctgaattaaaatcagctgtgttgaactccagccagaaaaaatatctggcattttggttttttggaccctactgtgatggtcacaggactccaggtctcttggggctcacagggtcatgcctttccttgcccggtgtgcttggtgagaaggaacaagtgtttccatggaggaaattcattttaggggtctcaagagggtcatctttgcaacagaggaaatgcccctttttccattctgaaaacctgatttatcgaacccttttataaaagatgaatacccacatataggcctctagcagtgttatgtttttgagatgagacattttaaaaagcgatttttcaattctaaaaattctttaaataaaatgctcttgctgggacaacatagtgggtcaacatcattcccatctctacaagattttttttaaaaaaacattagctaggtgtggtagctgttgtcttagttactgggaatgctgaggaggaaggatcacttgagcccagaaattcatgtttactagtggggtatgatcttgcctaggcaacagctacagagagagaccctgtctctaaaacaaacaaacaaacaaacaaacaataaccaaacaagctttacacttctgtagaaggaacacttcccatttatgacatcagtaatctaggatatatcaaaatttgaactttgtgttagctttcaactgttaaaactagccagcgttgttacagatccacctctgagtgacactggtatgccactctttgctgaccactgaacaatgggatttatgtaaccaattgtgtagatacaaacccactcattctatcctacccagagtggtgatttacaacacaaaaaactaccatgaaactgttcccatgccttcctcccacctcaaaactccttttattcctgaacggctccataagcaaacccatccccagcaaactactcagtgagtatcttcacacatgtaagttcccttatccggatcactaaaaaatgaactcatttttcaaaagccctgacagtctgtcttattttgatacttcttgtatagttattatttaagaagcaactacccaggcaccttggagcatgttgatttcagagttcagtgtgagaccccgtgtgcccctgtgggatggtgccagctgactgccattttcctgctgtttattacttgggtgccattccatgcagattggactctgagggtactagagcatatccaaacccattgtcacagtatttgttggttaatgatgtgttcaggccatgatttttctgtaaaaaattaccagcatgctgctcttaatttttttcagcctgtctagttgttgcccttttgctctcatgcaaacttttcctcagaggtgaccctagaagatgggaccctttgtgatggactaccccaaggcaatatgccccaaaaggtcttcatttggggcataacccgtgccaacacaaaggtactttctcaattgtgtgtatggtgcctcacccaaacaatattacagatgcacttggctttcatcaacctaatttgatatgccccaagcacagcaataggacagttttgcgtggccctttggaaacgcttttctttacatttccaggacctaccatagttggagaaccacgttagggctgaagacagtcctagtatatcattgaccaaccacataaccccaaggtctgtcctcagccttcagaaggaacatgcttcttacaccgatttcagctcagtgatatgggattcaaatgtatgacctccaaaatattaagagaataacgtgtgttgttttaagccaccaagtttgggtaatttgttacagccatgataggaaacgaatgcatccactttgccaggtttacctgcttttataaagcctgggtttaaccttttatctaaataatggtcaactcttcctacatcacgagcatttatgtgcaattaaaagccatcattaaattaagccagagtattaatatattcatagatttcaccaccacacagtaaaacattgaagtcaaatgatttagagcaaaccacctggctcacactttcccaacggaaaaaggtaaggctcaaagtgctgagatgaacattctgtcctagcactaggaaataatcattgtctgcctcaggcttaagtttaataaatagcaaattgcatacagatatttacaatgatcgaaagacaaacagaggtcctatccgtgyagtcccaacaataaagacaggcattggcataaagtgtttataaattcttgggtacagctgttctgaaagtaaagttcactttcaatcctaaaaaaagtccgctattcctccagatgtgcttaaagkcaaatgtggactggaattacttggtgtcaatgsggagyaactgctctwtgcyrtttattatgaaggactttaactcaactctccatcttcctccacttccaccctttcttggccattctcaatgattctcttggtggtgatttttttaccatcaactatttcagtggaagtcgacatggacttgaagctgcctgtcccatcactaccgtaggacatgcagaaggaagaaaggcccccacttcccagggagccaaaggaacgaaatcctgtatcaaaagaagaaaaaccaccctcaaaagctggaaattcactgaaggcagagaaaaggggtgcagaccctctgcttctgcttcccagggagttcctctgaccccccaaaatattctccagcgggtttcccaagaggtcaaaggagaatgggtccyggccgccaaagaactccctgaagacctcggcggggtcacggaagctgaagacstactcgaaggggtccttgaagggcctgccgcctgcgcagccgccctccgccctcgcctcgccatagcggtcatagatatcgcgtttctacgcgtccgacaacacctcgtaggcctcagccacctgcttgaatcttctcaccgcttcctccctgtcctcggggtttttgtcggggtgccacttgagcgccagcttgcggtacgccttcttgataccctcggacgaggcctaccggggtactcccagcacctcgtagtagtccactatgctggactgccaaagagcctgcggggcactggcacagcgagcggcaaggctgccrgcacccgcgcacaggtcagaggcttggcgacctgggccgcctggagggccgccccttatgacgcagccacatctcattggccgaggcctktgagcgcctcgcatcccaagatgcagtgctcctgggactggccctgctctctgtgaggctctgtgaggccctgtgatgctccaagaccaggcccsgcccactccggcctccaaccagccatggtctccaaaaaggatgggaaaaagaggttggggaaaagagagggccttgactttggctgcctgaagaactgtttttcttaaagtargctttatatcagtctttttcctcggccacaggagggaagagggtggtgggagtgagtttagtctgaccggggctgaagacatcctrttgtttaggactgcggttctccaacgttccagccccggtgcccatttgcttttgttcatctggattatgcctatcatatgtactgcattagagattaaaacagaattaaaaagacatattcattgggcaatttaagaagaataaacccatgacacactaacaaacctttttatgtaactttttttgagacaaaatgtagtgagaagagtggcatcgttttacagtttttgcayctctctttagtacttggctctatagagaggtggattctcatgtcagcttctgcattctatctattgtgatattacacatcccccatgtarcttctggaaaactccactgtacacttgtgggagaatgacaatgagaaaatcaagtaacattattacggaaatagttttgactttgyaaaattctcctgaaaaattactggggatccctaggatttcctggctcatactttgagaatcgctagtctagcagagtagtccctggtattctgaagggattagtttaggacaaccctccttccccataccaaaatctagatgctcaagctccttttataaaatgacacagtatttgtatataacctacccatatcctcctttaaacctctagtcatctcttgattacttttacctaataaatgtaaatgctatgtaaatagttgttttacagtattggttttttatttgtattatttgtactgtttttttttcattgttgttccccccaaatattttcaatctgctgttggctgaatctgcagatgtgaagcccaagtatatggagggtcaaatgtgcatgttattcacttttcttgactgctaaaacaaccagggagatcctctcagacaaaaggaaatacagcactatttactgtatcgaaaccattaagacttgcaggccgtgtgtatagcactggggataaacatgggatgcagtgattatttccgctagaactgctatataatgacgatgaattttggggggactttttttgagatctgagttctcttcacctcctccttattctctttttgacactggattctttgctttgataaattgtggggcaatacactagtaaaggtcactcaattccaaggggaaaatgattaaccaaagaacattctaacggttcataaagggtattaggtgtaatgaggatgtgttatctcaccagaacaaacttctgagtttatataacctctagttacataacctgaaacccggacttggcacttggtaagcacgcaatgaacagtcatagtaagctggccaagggtagagttcagtktgaacaaagcaatttgagaacatcaaaggaagtttggggaacagcaagggatccagaatggctagagggtaagaggcagagggagggggcaagcagaagggctagagaggaggaatgagcttrgacaggtgggctggggtctatcccagagttttgagagcaaggcagaggactctgaattttctgtgcccaggaagctgctgaccaaggttccagaagtggtggtgaggtggggttattcaggtggcagccgatgcaatgattcagaagggacagctgggggttgggggacaggggggctggggccctgaaatgggaccatgrcagctgggtctgagagacagtggtagaaacatccagattcagcacttacttgctggcttggatgcagggtctagaacgaaaagagaagaaaagtcacttctatacagaaacatgtccagagcgcttactgtctccaaaaccatggactggcacctgagtgatagcatgattccaaagccaaaatcttgcctgtaaggaatatatatatatatatatatatatatatatatatatatatatgtatatatgatatagctatagtctaatagcaaggacagatatgcaaactgctaaaagatacaaggcagaacagaacaaaatgctgtttttctgggattttggaaattcaaggaattcaagggattcaaggaaggtggctttgcttcccgggagggtcctgtagatgatctacagggcactggacatgtttatgttgctcctttagtaataagcctgtcattctgatttgatgaaaggagatgaaaggagctggkagtgtgtctgatggtggcctactaacttatgtcttcagcttaaaaagaaagtagcttcaaaagggttccagaaacactttccatggacgtgtcactctttagcagcccccaaagcaagaccatcatattgctgccctgctgtgtgatttctcagcccctagagcaccatcccctgtaattgcctggtcatgagtttgtctctgtctacctgacccctcctttcaggcaaggaccatttctaacttgactttctgggcctagttcctagcatagtgactgccatccagtagggctcacacgttccataaatatttggcagatgagggaattagcaatgggttctgctttggtttcagagcagatattaattggattgcttagtagtggttctctgttgtaattcatgagcatgaatgtggattgcccactattcagattagtaagtatttcttggtcaagggcagagctgtggccacaaaccatccaggtacacagcagaagcagcctcaaaaagcttggaagctctgcatgatgcaggaaagtcataaaatcattacagtggtgacttatgtgtttatagcccctttactgtctataatctgcaaatgaactcacacagcattgggactttggaagaattatcacccttaaggtttaaattaaactgtgaatttcagaatttctaataaggacacaacaaagagtgaaagcattgctatgtctattctgcttgcccagaatcttggtcctaaaaaatgaagagtgtttgggtgtggggaggagcttcagtgtgcatgtgcatgcaaagtacctactctaaggagaagaatgagagggtaccctaattacctgttaatatgtcccataggacaccaaaactctagttagctgtttctctatgatcctctaagcacatccccaagtatggctggccagtgatgtgtatggttcaaatgttgggatctgtgcagttatcttggaattgtatagtacagcagtatatcccccccaaaaagagtgtaatacttccaattctggctgcacaatacttgccccatagtccatggtcaataaatacaaatttgagttgtttttgctcatctttcccttttgacttcaamtcagtcatcagaatttccccaaatgcctttcccctggatcttgggccagtggaatgagtacaatttaacttaattgaatttgcttatctatttggtttcctgttgtgaacaaaagttctctgaaaaggaatttggaagaaagagactttgttctagtgaacagtttgcaaaccagggagttacagcctctggtacgcaatgaaggtgagttccacagaacacaaggcaggcaggtttcacggcaaaaagttccttcccaggttcccaatcaggtccatttatgcaaatgaaggatggaaacttgcttagttcttattggtcactgcagctgcattctgattggttgatgaagctragccctgagtggctgaggtgggtgagctttaattggttggttcaggtgagcgctgaaaatctcaactataaaaaggtacaggttttcaggatactcagagtaaccgtgtgacctgtagtaagcaaagggccagttggctctattttaaatccaggcccagttagccactcaagatctatcttacaggactggctctttcaggttcacactaataaaggcctgtccttggggaagacttctgttcacatgcgctccagtgaatttccctttctggtcattctctaccccagcacgccccccacccccgmcccgccccacccacccacctgttcatttccttcttagcatgcttcacgatttctaagttcctgctcatgtgtttaaattgtgagtctggctcacctcatggcgcgtgctcgtgtggtgggctctgctgcagcctcaagaccccacactgtgctggactcaataaatattgttggacgaaggaatgaaacacatgatacaagtgagcaggcagtaccgggggagctgtggagtgggcactcttacaggtttccatggcgaaagcgggggtacagttgtgttcttttctttctaaaaggctttctaaaaagccttctgtttaatttytggaaaagaagcctaacttgttcactacatagtcgtccttcttcctctctggtaacacttgttggtctgtggaaatactaatttaatggatcctgaggttctggaagtactttgctgtgttcactcaagaatgtgatttgagtatgaaattccagccagttcaactgttgttgcctattaagaaacctaataaagctccaccttctttatctctgaaagtgaactccctgctacctttgtggactgacagctttttatagtcacgtgacacagtcaaacattaacttggtgtatcgattsgtttttgccatatatatatatataagtaggagagggcgaacctctggcaggagcaaaggcgccatggctgtggagtcccagggcggacgcccacttgtcctgggcckgctgctgtgtgtgctgggcccagtggtgtcccatgctgggaagatactgttgatcccagtggatggcagcsactggctgagcatgcttggggccatycagyagctgcagcagaggggacatgaaatagttgtcctagcacctgacgcctcgttgtacatcagagacrgagcattttamaccttgaagacgtaccctgtgccaytccaaagggaggatgtgaaagagtcttttgttagtctcgggcataatgtttttgagaatgattctttcctgcagcgtgtgatcaaaacatacaagaaaataaaaaaggactctgctatgcttttgtctggctgttcccacttactgcacaacaaggagctcatggcctccctggcagaaagcagctttgatgtcatgctgacggaccctttccttccttgcagccccatcgtggcccagtacctgtctctgcccactgtattcttcttgcatgcacwgccaygcagcctggaatttgaggctacccagtgccccaacccattctcctacgtgcccaggcctctctcctctcattcagatcacatgaccttcctgcagygggtgaagaacatgctcattgccttttcacagaactttctgtgcgacgkggtttattcccmgtatgcaacccttgcctcagaattccttcagagagaggtgactgtccaggacctattgagcyctgcatctgtctggctgtttagaagtgactttgtgaaggattaccctaggcccatcatgcccaatatggtttttgttggtggaatcaactgccttcaccaaaatccactatcccaggtgtgtattggagtgggacttttacatgcgtatattctttcagatgtattactttggatcgattaactagccccagatatatgctgagyaagcattctgagataatttaaaatgccctcttttgttaatttttgactcctaggtttgagtctgtctttggcatcatcttctggatgatttcttggtatctgagatttcgggaaagcattccttggacattttactctgtgtgctccagtggatagtaatcaattagaaacaacaagctgttaaatgccataggcacagaatgctgggtttggggcaccctgcagaaaactcagttgaagcctgcaccttgccctggattcagtcaggcaggcaatgttcaggactgatgaaatcattctttgatgatgatagatcctggaaatgaaagttgcctttgtgaccctggttaaagctccagtttctaaatattctgataagaagctaaatcctgcagtccgttctcttctaatgagtgaatcaccagacagtcaggttctgacatgatacagaaaggttgtaggtttcattctcaagctattaggtttatttttcccctacagagtttgaagtatgcaaaaagtagcattcacatcctcatcgaaatctcagcagaggatagaaaagaacaggagaggctccttcagatggagcgttagggaattactctttgaggaggtgacatttcagagagcgttcattcacttatcctgcaaagattggctgaggatctactggcagcccaggcacttcccaggtgctgcgtctggctcccattaaggggactgatatcaccttcggaggtgaccttatttccactatacctccaatgtgatttgtattttattttttttaattttctgtgcattttccttcatagcacatcaaatatggcagccatttcacttagatagttgttgattgtccgcttcacatcatgagccatgtggggacctgtgtgactttgcattaatcacatccactgtatgcggcgtcctcaacacctgccaatgggtctgcatgtatttggcgccccataaatctcagcacctaaggcacagaataggcacccaccgaatatgtgttacattaatgaatgagaagaaaggtgccaaccgaggtctagttaatgggtcgagagtaatccacaatagctctttttagttctttgtactccagctattacataccaatatgtatatagaaacatatgtaaaattttttggttgctttttctacaaaatagagtaacagtgtattcccactgcccacttaccgataatgtcatggatatcactccagttttaaatgctattactttttaaactatgaaatagtatttcatggtacttgtgtaccacagtgtattctgctggagatctagtctagttccccacagaggaacattacaatttgtattccaggagttttgttgttgtgacctcaaacacttcctttaaaaagataagctattttgtagtttaaaaaacatttgttctgtttctttctcattcatcttttcttaagtattttacacggttttttttttttggtcactactgtgaatgtgttatttttttgcatttctatctctagctgattatctactcattactcagctatctcatcaaaatattgattttcataataaaaaataataggcagtcatttgctgataaagaaattttggtttcttctcttataaattccatgccaaatatcagggctattgaatttattagaatctctaaaaacagttgaataattctggcaataggaaagatgcccgtcttgctgctattttagtggaaattgattatcatttcattattttgcattatgttagccattgttttctgaacaggctttattgatttagataatttccttctttgcgtgaggatgtttgtaggagaggcaccgaactttatcagctgcctttctggcatttattgatataaccataaaagtctaagtggtgaactgtgttgactacatatttgttgttgccttgtttggtgcagtcaggcttaggtgtgaaaatatgtttttaaattgtaccttttagtaacctgttttgtcttgttgcatgttttaatctgaaattccactttttggatattaatattaccacttctgtattatttttgtttacatttccctagcacatctttagtactcctttgtcttcaagctttcttcctttttaaacaacatggcactggtatttttaatccagtcaggcagttgctttaataagtgcattttgcctatttgaatctaacaattaatagatttgattgtaactctctcagtttactttatgtttagttgactttgccattctcctttttccggatttctactggttggtcaagttactgttcttattttctctttcttcctttgttaactaaaaatgccactctgcactaccattcctcttgtgttgatggtcctattctcaatactcttgataaaactcctgaactttaagaataaagataaaacttttattgcacaaagaagtccatagagaaagcacaacctggcattggcgtgtctttggtgtgtctgaaggaaaagagatagtggaacaacattgggagaaaaggaatgaaactcaagaattccaagatgttcctcccctgccagggtaagatagcagtggttcacagacaatcgcaatgctgggtctgagaaaaataactaaacagaagattagtgaggaccaaggcttcgagatggccaggagaggaaagcttgggagcagggaaggttgagatatatgtgggttactgggaatgcgtgatggtgaagtcacagatgacccacatgktgtctaagtgctaaagaagaattctgggaaaatgaaatgcatttgggaagggaaaatckaattaaaagcctaaactaaaaatacaaaattcttggtaaagtttaggagttatgttaaatgtctcattttggctggtgaagtctcatcagaacagggaaattctctcattcaggggcatctcatcttttctttgaagggaatcaatggtgggggattggagtgttattttcagttaatatgttgcttcactctttggtcattccggtaactgtgaagtcagggtgaagtttaagggaagctttgccaagtaggggatggacttcacctttattgagcctcatagtagctggctcaggtaggagttggccgtgatgacaacttctctgcagtttgccctgcgtgaatctccagatgaacttttgtgccatttaaactttcgtgatctcctgctatttaacttcgaatgtttatggacctgtgggttcaattttgtgtgaatcacatcctgctgattgctgagtgggcgtgtgggagggtgtgcctggaggagaacttagactcggccttttccagatragcttcagtgtaagagtgggtttcatgaagagcaaaggtcctaggaaatttaagtaagccatttaccaaygctcagaagaaagaacttgaagagcacttggaaatgagctgtgtctccccaagaaagagggagagaaagaggggagagatgtggtgcagaccctagggaggaaggagttcagaaaaaccatcctcagggtgttcttgctacaaaccaaaaaaygcagcatggtggtggggaggatgactctgtcctccctgacttttagatgagssmaagggaaaaggcaaagacaaagcccttaagagccagaggactcacgagggcctggggctggtgagagtggcsgggagagagggctcaccttgggagaaggatggtcagtgtctggggctttcctggtcatgttccaaawyaggcttggcaggagtyctgctgkgcaaattgcgtttgctgagccctgtcagaggtctcctgtgtctcacatytagggtgaccagcatcctggcttcctcaggactgttcaggttttagcactgaacatcacatgtcctagggaacccctcagtttgggcaagccctgccacatcacacaatcatattagtgccctcagtattctttgcaaacataaaaccatagactcagtaatcccattactgggtatatacccaaagaaatataaattattctactataaagacacatgcacatatttgtttattgcagcactattcacaataacaaagtcatggaaccaacccagatgcccatcaatggtagattggataaagaaaatgtggtacatatacaccatggaatactatgcagccataacaaggaatgagatcatattctttgcaaggacatggatgaagctggaagccatcatcctccacaaactaacacaggaacagaaaatcaaacaccgcatgttctcactcataagtgggagttgaacagtgagaatgcgtagacgcagggaggggaacaacacacaccagggcttgtggsggggtgaggggtgaggggaggaacttagaggataggtcaataggtgcagcaaaccaccatggcatatgtatcccagaacttcaagtaaataataataataataattaataataataataataataaataaacccataaagccatttgagagattcttgggggattcattggaccactgaaaatctacagtgagaaaagaattgccatgttgatgaaacaggaaractttccttgtccccctcacagagcatgtgacagcgggaggggctcactttctcagtgcgccactgctcaaacctctaggggagcatacagacgggcaggttgtggggctctgacctcaccggcagtgtytagaggtggatgtttacagctcctgaagctccagtgggcgkgggttatggccttcttttagttttgccctctatagtcagcttgtgttaaccagctcaattacaccctctaccttgtcgcaaggacagagggctttctgtatcctgggggcttgccttggtgtaccagaagaatcgaatcccacctgggcttggagaatgagtgcaaggatttattgagtggatgtagctctcagcagatgggggaagccagaaggggatggaatgggaagggtttcccctggagtcagaccgctcagtggcccgggctcggtggccygggctcggtggcctgggctctcctccgactgcctcagccaaactccgcgttgttctgctggtcagtggcctgccggtgcctgttggtgagttcttctcaatgtccagctgtycttgcgtccctccgctgatgtgctcctcccgatgtccagctacctgtgtgtctgcctgctagggtcttggggtttttataggcacatgatgggggcgtggcaggccagggtggttttgggaaatgaaacatttaggcaggaaaacaaaaatgcctgtcctcacctaggtccatgggcacaggtctgggggtggagccctcgccagggaccacaccctcttctacccagcacttcccttccctacttccatatcatttaaagggaccacgcccttcccagctcttcccttctgtatcactgatgccttgctctgtgttctctaagtggaattatcactgtgtgtatgtacaggtgtgtgcatgtgtgtgcatgtacctgtgcttttcttttggaaaactagcacattacctggattttgcatctcaaggataattctgtaagcaggaacccttcctcctttagaaggaagtaaaggagaggaaaatgmtgtaaaacttacatattaataattttttactctatctcaaacacgcatgcctttaatcatagtcttaagaggaagatatctaattcataacttactgtatgtagtcatcaaagaatatgagaaaaaattaactgaaaatttttcttctggctctaggaatttgaagcctacattaatgcttctggagaacatggaattgtggttttctctttggratcaatggtctcagaaattccagagaagaaagctatggcaattgctgatgctttgggcaaaatccctyrgacagtaagaagattctatacyatggcctcatatctattttcacaggagcgctaatcccagacttccagcttccagattaattctcttaattrgaaccttagatttggcttttccctgccacttcccaactattaatccaaaggttttttttgttgttgtggttgttgtcattgttttcaatttgactctcaaatactctattaaactatgatccaccacactcagaagtatcattttctctaagagactcaaaagtgtattagggagaatttatttaaaaataaaataaatgggatattgtttcttcatrttaaatagaagtatttctccaaaaagctgttggttagaacactgaatttatgtcttacatttctgctcttatagttcygcatccacttgtttcattaagcaaactttcccttaaagtgcaggaaagtgaaaaaatcctaagtgcacagcttgataaattatcacaaattcacgtagtgcatacacccttgtaactaaacctccaaaacaagatgccggaagttgccagtcctcagaagccttcacagttactgatcctcccactctgttaaagactgttccttcagaggaccccygttttctagttagtatagcagatttgttttctaatcatattatgytctttctttacgttctgctctttttgcccctcccaggtcctgtgryggtacactggaacccgaccatcgaatcttgcgaacaacacgatacttgttaagtggctacccyraaacgatctgcttggtatgttgggcggattggatgtataggtcaaaccagggtcaaattaagaaaatggcttaagcacagctattctaaaggattgttgagcttgaaaatattatggccaacatatcctacattgctttttatctagtggggtatctcaacccacattttcttctgcaaatttctgcaagggcatgtgagtaacactgagtctttggartgttttcagaacctagrtgtgtccagctgtgaaactcagagatgtaactgctgacatcctccctattttgcatctcaggtcacccgatgaccsgtrcctttatcacccatgctggttyccrtgktgtttatgaaagsatatgcaatggcgttcccatggtgatgatgcccttgtttggtgatcagatggacratscaaagcgcatggagactaagggagctggagtgaccctgaatgttctggaaatgacttctgaagatttagaaaatgctctaraagcagtcatcaatgacaaaaggtaagaaagaagatacagaagaatactttggtcatggcattcatgataaaattgtttcaaatatgaaaacatttacgtagcatttaatagcgttgtttcaaatataaaaacaaatacataaaaatctggatttttatttcttcyttttttttttttttttttttgagatggagtcttgctctgtcacctaggctggagtgcagtggtgcaatcttggcttactgcaacctccacctcccacgttcaagcagttctgcctcagcctccgtgtagctgggattacaggtgtccaccaccacgcccggttaatttttgtattttttagtagagaaagggtttcaccatgtttgtcaggctggtcttgaactcctgacttcaggtgatccacctgcctcggcctgccaaagtgctgagattacaggcatgagccagcgcgtctgacctggatttataaataagataatttagaggttattattcactttataaaaggattctttagtttctatataatttatcatataatttatttagaattttatttcccccattagatttaaaactccaatttayataaaaagttgccataatagacatctgatccataagtttcctgcacagaaagaaatactccattataagaagcatagtatctttaagagaaaaacaactcaaatgcttagaagtacagctttttgcagcactggaacctgtgagaaattttgtccatggagtttatgaatgaaggagctataagatatcacagacaaagtcttagaataagagcaaaggaaaatttgctcaaatgtggccctgaaaacgattcaaagggcaaatgatttctggattaaagttagtatattactgtcaagctcactggtaataggcttattagaaccttatgggaagaagtggtggccagtggtagatttcatccgacaatagatactgtgtgcatatgtgcgtgtgcgtttgtgcatgtggctgtgctcatgtgtgggtgcacacgtgtgcattcatatgcgtgtgtgtgtgtgtgcgtgtgtttatgagagtgtccattgctttctcccatggttacctcctttagaaagaagcagcagtcaggaagacagatgtgaagagctggagcatgttcagatgagaggagacggaacacggggacacaccagcttgagcaagggacaacaggggaggactgatgactgacttcccacctttgaggtgctaatgtgtgtgtggtggcactggataaaagatcaatgttggctaggcaccatggcacacgcctgtagtcccagccactctggaggctaaggcgggaggattgcttgagcccagaagttggaggctgctatgagccgtgatcatgccactgcactccagcaacctgggcaacagagtgagaccctgtctcaaaaaaaaaaaaaaaaatgaaaagtccacataacctgagcatcatgtgcccagagcgttgggtggtgtggtcccattccttccttccagcggcttcttctggccacctcaatgtcaggatgtcctgctcacatatcaataccattaaaacctgacttctttccckgcactgttgaagctccttcttgaggctcacattatggatataattttgattctttcttcagtggtatagataactacttgtaacctaagaacaacttggtgaaagtcctctaatacattattttttaaaaaaacacaaatcaatgagctcaacttattaactaactttcatctattcatttttgagccatccctgtctgattgtgaatctccatgattccaacactctgagctggggatagtgcctacacaaaataaaaagaagtggaaaattttcaaacatcagtttatgctgacaaccaggccataataggtgctcaattactattgaatgaatgaatgaaagttctggccaggtacggtggctcatgcctgtagtcccaacactttgggaggccgaggcaggtggatcacttgaggttaggagttcgaaaccaacctgaccaacatgaagaaaccttatctctaccaaaaaaatataaaaaaattacccaggcatggtggtgtatgcctgtaatcccagctatttgggaggctgaggcaggaaaatcacttgaacctgagaggcggaggttgcagtgagctgagattgtgccactccactccagcctgggcgacagagtgagactccgtcttacttaaaaaaaaaaaaaagaaggttccaagaaaattcatcttaaggtttatgtaaaaggaagatgatatttaacatgattcatggccaagtactaatattacattataataatgtttccaaataacattatagatatgtttaaagacagtgtattaggctgttcttgcattgctgtaaagaaatacccaagactgggtaatttataaagaaaagaggtttcattggctcgtgtttctgcaggctgtacaggaagcttagtgctgacatcacttggctgccgggggaacctcagggagcttttactcatggcagaaggcaatgcgggagcttgcatgtcacatggcaaaagcaggagcgagagagagttgggggggaaggtgccacacactttttaatgaccggctctcacaataactcatgaaaactcactatcaggaagacagcactaaagcacaagggatccgaccccatgatccaaacacctcccaccaggccccatctccagcactggggattacaattcaacatgagatctgagtgtggacaaatatccaaactgtatcagtcaacagcgatcataattagtcctgaataggagtgcctttttttttctttcttctcccttttcttttctacttcctcctccttttccctctcctcttcaatctcctcttcattcctgtagcaccaagggttgaagcacctaacccgttttggattgagatgttctgattgggcaatgaacactgtccagaataaacagaaatccattttgcactaagtggctgcacagaccctgcctcatgctaaatctagcacccagatagtttaatgtttcaatgactgaattacaaatatatcatcaccttggatttggcacttacaaatggctgttaatttggccagaggtggttgtttacaacttcaaataggagactattcataatttctgacgtgacattttcctttctttattttactgtatgaaaatataatgaaatttctcacaaaatatcactaaaaagaaaagaagaagagtaggaagcaaggttaaaatatttctaaaatataattttggtctttctttttctcccttccttcctccgtccctctctcctttcctctctccctccctccctccctcccttcctcctttccttgcttccttccctccttctcttccttctttttcaagagatcaataacatttattaagaataagtttcttaattataacctttcaggtgataatagtaacacagcctgggcaacacaataagaccttgtttctacaaaaaatttaaaaattggccagacatagtggtgcatgactaattccagctactctggaggctgaggcaggaggatggcttgmgcccaggagttggaggctgcagttagccatgcttgtgccactacactccagcccgggcaacagggcaagactctgtatctaaaaacaacaacaacaacaataatagaaacaggtttcctttcccaagtttggaaaatctggtagtcttcttaagcagccatgagcataaagagaggattgttcataccacaggtgttccaggcataacgaaactgtctttgtgtttagttacwaggagaacatcatgcgcctctccagccttcacaaggaccgcccggtggagccgctggacctggccgtgttctgggtggmgtttgtgatgaggcacaagggcgcgccacacmtgcgcccygcagcccacgacctcacctrrtaccagkaccattycttggacgtgattggtttcctctwggccgtcgtgctgacagtggccttcatcacctttaaatgttgtscttatggctaccggaaatgcttggggaaaaaagggcgagttaagaaagcccacaaatccaagacccattgagargtgggtgggaaataaggtaaaattttgaaccattccctagtcatttccaaacttgaaaacagaatcagtgttaaattcattttattcttattaaggaaatactttgcataaattaatcagccccagagtgctttaaaaaattctcttaaataaaaataatagactcgctagtcagtaaagatatttgaatatgtatcgtgccccctcyggtgtctttgatcaggatgacatgtgccatttttcagaggacgtgcagacaggctggcattctagattacttttcttactctgaaacatggcctgtttgggagtgcgggattcaaaggtggtcccacsgctgcccctactgcaaatggcagttttaatcttatcttttggcttctgcagatggttgcaattgatccttaaccaataatggtcagtcctcatctctgtcstgcttcataggtgccaccttgtgtgtttaaagaagggaagctttgtacctttagagtgtaggtgaaatgaatgaatggcttggagtgcactgagaacagcatatgatttcttgctttggggaaaaagaatgatgctatgaaattggtgggtggtgtatttgagaagataatcattgcttatgtcaaatggagctgaatttgataaaaacccaaaatacagctatgaagtgctgggcaagtttactttttttctgatgtttcctacaactaaaaataaattaataaatttatataaattctatttaagtgttttcactggtgtcgcatttatttcttgttaagttgcattttctaattacaaaagtaatgcatgattatgacagaaagtttggaaaatatagaggttcacacacacacgccttcattgcgtgtgcatgcataaatgcatgagaaaagaaaaataaccagtaatcacatcgcccagaaataaccccagttacaattgtggcaaatacacatacttataaatattgcagatatattaagtatacctagtatttgctaacactctttcttctactctgtcatgaagattctcccaaggtgtttttgtataatatttaattcattttcagtggccaagcagtattctacttcatggatataccaggatttatttaaccataacttctggttggattcactcttattattttgtttaattaaaaaaaaaagacctcggctgggcacagtggctcatgcctgtaatcccagcactttgggaggccgaggtgggtggatcacctaagatcgggagtttgagaccagcctggccaacatggcaaaaccccgtctctactaaaaatacagaaaattagccgggtgtggttgccagcacctgtaattccagctaattgggaggctgaggcaggagaattgcttgaaccggggtcagggggttcggaggtcggaggttgcagtgagtccggatcatgccactgcattccagcctgggtgacacagccagactctgtctcaaaaacaacaacaacaacaaaacaacaacaacaacaacaacaaaaatctcactggacatcctagtagctaaggctttccacatattcatgattacttctgttggaaagtgctttacaacaaattgctagttgtctcagtctgggttcccctgagatgaggattcaagggccaggagtttatttaggaagtaaaggaaacactgatagaggagtggcagagtgagaaggggtgatggtcatccacagctggctctcttgtggtcaatcggagcttaatcctgctgggtgactctgggagccagtggagaaaagacaccccagacttatcccaatgaggaacacggctgttgggtgcctgagtacttgcctcgtcagggattgaaacgtactcccaggtagtagtaatttctctgcccttccattaggccacaaagggggctctgacagagagagctgacgagaaaaaacacacgcccttgtcactgaagaggtacacaggggatctgtgtggggcaccacctgcactgctaccctggacaaatagcttaagaaatccccacactgcatccccaaacttactatcagcgtgtgagggagacaggttcccacaccctcattagcacaaagtactatcttgaaaaagaaagcctgtcagtttgataggagaaaagcaggatcttgtttacaatgtgcttttattattgttattattagagattgtatttcttttcaagctgatgagccgtctgtgtttattttttggaggataccctttgcccactttcctattggagtgtattaccctgaggatttggtaagagtgcttattgcattcaccagaatgtcctttttgtcatttactgtattttctctacttttttttttttgccttgttttactttttttgttttgtattacaagcagaagttttaaatttgtaagcttcaaattggagctggggtggtgcagagcgaagatttcagctggttccctgaccccagctccatctccttccctaggcagtggctggaacacattctgtccactatttccctctctacatccttgaggctgtgcagtcacccctcaactacgttcaccctccttcaaagcccttcctggtccacccggggaccatctcccggcctcactgcccctagctccttgacgccccaacctctctcagggaccccaagttgccatgacctctagccagctcatgttcatttgcaccttcgtgtctgcagcactgaggcactcttgtttacaagtgagagaacccaactcgggataccttaagcataaacagtatttttgtaaggagacaggcttctgacgacgcgaggctcatagccaggcctgcgctgggtggagcctccccttctcactcctgtccctgttgggtcagagtgccagctttcctcttccctctcctccgggtcttttcggcccctcagtccccatattcctctgccctagctcccaagatcccacaagagacagactggattctctctggcctggagtgccaccttcctgaaagtcagaatctgattggtccagctggatcaggtgtcctctccctgtccaatcatcaatgccgagagggattacggagagaaaaacatggctcccaccatcccattgctgtggctgcttgggccacgggagagggaaccttgtgagccgggcagaatccaccctgtagagactgcctctgggtgagtcatatggtttggctgtgtccccacccaaatctcatcttgaattgtaattcccattacccccatgtgtcattagagggacctggtgggaagtgatttgaattatgggggcagttatctccatgctatttgtgtgatagtgagttctcacaagatctgatggttttatagggggcttttccccctcttgctcatacttcctcttgcctgccaccatgtaagatgtgcccttgctcctccttcaccttctgccatgattgtgaggcctccccagccatgtggaactgtgagtccatgaaacctctttttctttataarttacccagtcctgggtatttcttcatagcagtatgaaaatggactaatacagtcagcttctgcacaatatttccattttcccacattatgtcttgggccttttgtgtatttaagctcacaggatgctacgaataaagcgttttcttatttcctgggtagttcccatagaagtagtggtgcaacgtgccatagagtgacagcacctaagagaagctgattttgtgagtggattgtgagttcaatattgttgtcataatcagaaaaaaatgtatttactttttttttttttttttttgagacggagtctcactctgttgcccaggctggagtgcagtggtgtgatcttggctcactgcaacctccgcctcctgggttcaagtgattcttcctacctcaccctcctgagtagctgggattacaggcacatgccaccccaccacacccggctaatttttgtattttttagtagagacagcgtttccccatgaaaaaaagtattttcaatttggaaagccaagcagagcccccttcttcctccttggtctcactgtcttcatgtcctctgtagataacatgctcaggggcctcttacttttggccatggcttacacactcgacctgtgtgtaatttaaaaatgacccctttctccactcctcctgattgccatatccttcacaatgtgactttgcaactcttctcatgaaaaggaggaatctatttctccagcctgtgggtcctggctggcctgtgacctgccctggctgacagagtgtggcaggtgatgagcactggtttcaagtctaggcctcaagaagccttcatattcccgctcactgtctcagaaccctgtccagctgctatgagaacagcctgggtgagccctgctgcacaatgtccccatcaccctagtcatttcagccaatagcgagccaatggccagccctctagctgtctgagatacatgggtgagactctagttgtgcttggctggacagagcacagatccacagacccacgcaggtgactcatacacttgtgaactataataatcggttgttttcagtcattaagttttgaggtggtttgttacacagcaattgctgacacattcacttctggctctaaatgtatcacttttcatgtgttgagtctgaagaccttcagaggacagagatgtgttccacctaccctatatccactgcagcatggaaagccatgcttagctgcacacagtaggcgtgcagtctgggcctgtggaatggacttggcaaccacatcacctcagtgatctttcaaacggaaaagaaggctcagtggggagtgggaggaggtagtgcagaggggcagtcctgtgaaagaaggggcatgggatagctgcttgtgtctatttcatgttgatcaatgtatctccaagtgcagaacaaggaataacgcaggaattttatgaggaagaaatgttgggcatgataagaaagctcattttctaaccatctgaattccatgaagtagaaagaggctggtcctgagagtaatgagctccctcgtattggaggtgtccaagcacaggctgaggaactcccatttggctggatgggcaaacttggagtggaaattccacwtaagcaaccttggccctagatgtctctgagttttgttcctgttgtcttgcagtgcatagaaagatttcccaaaggccaatatttcattgttgtacctatgatctggatcatctctcctagctataaatgacagggaaatcctttgggctccacttttggtttaggaaatcagggtgcctcctctcctacctgtctttgatgttctttatcttgtaagtattgtgctagtggaaatccaatttcttatcctgcaagtyatccagtccccgggaaggaggagtgctctccccagggcctctcagtctgcccctcctctcctctccaactgtcctgaccacacctccccacccagggctcacatgactgtgttcccctgggacttggttgtaagccatccccacttctaccatctccctttcccaaacaggcccctgtacttcagcacacacatgtgaataacagaaatgttgaatgacaacatgatgtggagttttcaccccagagccctgtgcactcttcaaagacctgggttgatagagactcagggaggcagttggatctcaaagttccgagggtctgggatctaacggtgatagttctagtgaaaccctcccacccttccaggagacccattcctataagaaatatgactgaagagcccagctgtctcactttgataaccaattcttccatttgcatttccattgatgtgtattgggccaagagcagagctttttcttgtggttaatatctgtttaatccagaagaagaccctaaggaaaggtcagtatttaggtcccagagtagctctttaaaatcctttaaaggaaaagagagtatgggatagtaaagggccatgggatggatctttgaggatcaaggaacttgggacaggaggagaaaggatctgagagcctttcttccaccatctcgacatctatgttggtgtttctcaatttttaagaagctgtggatgttgagagaaccccttaaaggagttatgagagatactgatatgaatttctcattagccattaattatcagtgtgtagaagagagggcgagagggctctattaaactaaggatattatctattgctgtgtaacaaattatcataaactcagtggcttaaaagaacatccattgattatctcacggttccactggccaggagtctaggcatggctttccttggtcctttgtttagggtctcagagactgcagtcctttctggagttcagcttcctcttccaagctcatgtgcttattggagaattcagtttcttatggttgtaggactgaggccctcagttccttgctacgtggccctcaccacaggcagtttgcatcatggctgtttacttttcaaggccagtagaatgtttctgttcaatctgataagagggaatctcatgtggcatagtgtgatcatgggaatgacatcccaccatctttgccatatgatgtaatccactcgagagagggtcacccatcacctttgccatattctgttgattagaaggaagtcacaggttccacccacacaccctcaaggggatggctttatggaagggtgtgggtcgttggggtcatcttaaggtgtgtgt

SEQ ID NO: 94839 - DNA, 12917 bp, Homo sapiens
tatcaaaactgaacttgtgtttgctttcaactgttaaaactagccagagttgttacagacccactacctctgagtgacactggtatgccactctttgctgaccactgaacaatgggatttatgtacccaattgtgtagatacacaccaactcattctactctacccagagtagtgatttccaacacacaaaaccacaatgaaactgcccatgcctttctaccactttgaaactcctttcatccctgaactgctccaaaagcaaacctactcagcaaactactcagtgagtatcttcacacatgtaagttccctcgtctgatgtacaaaaaactgaactcatttttcaaaagccttaacagtctgtcttattctgatacttcttttatggttattgtatgagaatcaactacccaggcacctcggagcatgttgatttcagagttcagtgtcagaccccatgagcccctgtgggatggtgccagctgactgccatgttcctgctgtttattgcttgggtgccattacatgcagagtggactctgagggttctagagcatatccaaacccatatcacactctttgttggttaatgatgtgttcaggccatgatttttctgtaaaaaattaccagcatgctgctcttaatttttttcagcctatccagttcagttgccttttgctctcatgccttatgcaaacctttcctcagaggtgaccctagaagaagggaccctttgtgatggaaaaggtcttcatttggggcataacctgtgccaacagaaaggtactttcttgttgtgtttatggtgcctcacccaaaaaatattacagatacacttggctttcatcaacctaatttgatatgtcccaagcatagcaataggatagttctgtgtggccttatggagatcctttttttacatttccaggacccactgccaagaccagcttggtcgtggagaccctaacccagcagcgctagacgaattaaagacacacacacagaaatatagagtgtggagtgggaaatcaggggactcacagccttcagggctgagagccccaaacagagatttacccacatatttattgacagcaagcctgtgataagcatcatttctatagattatagattaactaaaagtattccttaygggaaacaaagggatgggctctggctaattatctgcagcagaaacatgtccttaaggcacagatggctcatgttattatttgtagtttaggaacaccttaagcggttttcctccctgggtgggccaggtgttccttgcccttattccagtaaactcacaaccttcagcataggcatcatggctatcatgaacacgtcacagtgctgcagagattttgtttatggccagtttaggggccagcttctggccggaattgggggcttatccccagcaacctaccatagttggagaaccacgttcaggctgaagacagtcctagtataccaccgaccaaccatgtaaccccaaggtttgtcctcagccttcagagggaacatgcttccaccgatttcagctcagtgatatgggattcaaatgtctgacctccaaaatattaagataataaatgcatgttgttttgaaccatcattaaattaagccagaagtattgatattatttgtagatttcaccactacacactaaacaataaagtcaaatgatttagagcaaaccacctggctcacactttcccaacggaaaaaggtaatgctcaaagtgctgaactgaacattctgtcctaccactagcaaataatcattgtctgcctcaggcttaagtttaataaatagcaaattgcatacagatattttacaaygatygaaagacaaacagaggtcctatccgtgyagtcccaacrataagaacaggyrttggcatraagtgtttataaattcttgggtacagctgttctgaaagtaaagttcactttcaatcctaaaaaaagtccgctattcctccagatgtgcttaaagtcaaatgtggactggaattacttggtgtcaatgsggagyaactgctctwtgcyrtttattatgaaggactttaactcaactctccatcttcctccacttccaccctttcttggccattctcaatgattctcttggtggtgatttttttaccatcaactatttcagtggaagtcgacatggacttgaagctgcctgtcccatcactaccgtaggacatgcagaaggaagaaaggcccccacttcccagggagccaaaggaacgaaatcctgtatcaaaagaagaaaaamcacccccaaaagctggaaattcactgaaggcagagaaaaggggtgcagacgctctgcttctgcttccccagcagttcctcygaccccccmaaaatattctccagcgggtttcccaagaggtcaaaggagaatgggtccyggccgccgaagaaytccctgaagacstcggctgggtcgcggaagctgaagacgtactcgaagggktcctcgaagggcctgccgcctgtgcagccgccctccgcscccgcctcgccatagcggtcatagatatcgcgtttcttggcgtccgacaacacctcgtaggcctcggccacctgcttgaatctcctctccgcttcctccttgttctcagggtttttgtcggggtgccacttgagcgccagcttgcggtacgccttcttgatggcctcggatgaggcctgccggggcacgtccagcacctcgtagtagtccaccatgctggatggccagaacggcccaccaggcactggcacagcgagcggcaaggctgccagcacccaggcgcaggcccgagtgctcggagacctgggccgcctggagagacgccccttatgacgcagccacatctcattggtcgaggcctatgagcgcctcgcatcccaagatgcagtgcttctgggactggccctgctctctgtgaggctctgtgaggccctgtgatgctccaagaccaggccccgcccactccggcctccaaccagccatggtctccaaaaaggatgggaaaaagaggttggggaaaagagagggccttgactttggctgcctgaagaactgtttttcttaaagtaggctttatatcagtctttttcctcggccacaggagggaagagggtggtgggagtgagtttagtctgactggggctgaagacatcctgttgtttaggactgcagttctccaacgttccagccccggtgcccatttgcttttgttcatgtggattatatctatcatacgtactgcattagagattaaaacagaattaaaaagacatattaattgggcaatttagtaagaataaacccatgacacaatagcaaatcttatttttatgtaaattttattaagacaaaatgtagtgagaagagtggcatcgttttacagtttttgcatctctctttagtacttggctctatagagaggtggattctcatgtcagcttctgtattcaatctactgtgatattacacatcacccatgtagcttctggaaaactccactgtacacttgtgagagaatgacggtgaaaaaatcaagtagcattattatggaaatagttttaactttgcaaaattctcctgaaaaattcttggggatccctaggatttcctggctcatactttgagaatcgctagtctagcagagtagtccttggtattctgaagggattagtttaggacaaccctcctctccataccaaaatctagatgctcaagctccttttataaaatgacacagtatttgtatataacctaccaatatccttctttaagcctctagtcatctcttgattacttttacctaataaatgtaaatgctatgtaaatagttgttttacagtattggttttttatttgtattatttgtattgttttttcattgctcttccccccaaatatttttaatctgctgttggctgaatctgcagatgtgaagcccaagtatatggagggtcaaatgtgcatgttattcacttttcttgactgctaaaacaaccagggagatcctctcagacaaaaggaaatacagcactatttactgtatcgaaaccattaagacttgcaggccgtgtgtatagcactggggataaacgtgggatgcagtgattatttccactagaactgctatatcatgaccatgaattttgggggaatttttttgagatctgagttctcttcacctccttattctctttttgacactggattcttttctttgataaattgtgaggcaatacactagtaaaggtcactcagttctaaggggaaaatgattaaccaaagaacattctaagatttcctatagggtattaggtctaatggggatgtgttatgtcaccagaacaaacttctaagtttatatagcctctagtgacataacctgagacccggacttggcacttggtaagcacacaatgaacagtcatagaaagctggccgagggtagagttcagtgtgaacaaagcaatttgggaacatcaaagcaagtttggagaacaacaagtgatccagaatggctggagggtaagaggcagagggagggggcaagcagaaggggtggagaggaggaatgagcttagacaggggggctggggtctatcccagagttttgagagcaaggcagaggactctgaattttcttctgtgcccaggaagctgctgaccaaggttccagaagtgttggtggggtggcgtttttcagggagcagctgaggcagtgattcagaagggacagctgggggttgggcaactgggggacaggggccctgaaatgggaccatgacagctgggtctgagagacagtggtagaaacatccagattcagcacttacttgctggcttggatgcagggtctagaacgaaaagagaagaggagtcacttctatacagaaacatgtccagagtgcttactgtctgcaaaactgtggactggcacctgagtgatagcatgattccaaagccaaaatcttgcctgtaaggaatatatgtataggatatagctatactctaatagcaaggacagatatgcaaactgctaaaagatacaaggcagaacagaacaaaacgctgtggggattcaaggaaggtggctttgtttcccttggagggccctgtagatgatctacagggcaatggacatgtttatgttgctcctttagtaacaagtcccttcattctgatttgatgaaaggagctgggagtgtgtccaatggtgacctattaacttatgtcttcagcttaaaaagaaagtaccttcaaaagggttccagaaacactttccatggacatgtcactctttagtagcccccaaagcaagaccatcatattgctgccctgctgtgtgacttcttagcccctagagcaccacaccctgtaattgcctagttgtgagtttgtctctgttcacctgacccctcctttcaggcaaggaccatttctaacttggctttctgtcccgagttcctagcatagtaggtagggctcacacattccataaatatttggtggataagggaattagcaatggattctgctttggttccaaagcagagattaattggattgcttagtagtggttttctgttgtaattcatgagcgtgaatgtggattgcctactattgcctaccactgttggggacctctcagacctcagctgcagcctgataaacgtggttaacagagaagtaggaggctgtgacatgaaatgggtttccacaggcctttgttgggaattggatgagaaacaagagcttgaacttggatgttccccagagcgagcgcagggtcagatgagtttttcaagtaggagtgatcggtctttcccgaagtgggacccataatgaaagacaatgattggttaatcggtaataattaactaggaggagagcactctatcttccaattacatgatgatttgctaagtggctcagtgacaaggtaattaagatgaagaaaacaaatgtaggaggcacagcgtggggtggacagtcagctgtccgtgtcttctgctgagatggccacaggaccccaggttcccctgctgtggctggccacaggagtgctactccttctcagtgcccagccctgggctgagagtgggaaggtgctggtggtacccattgatggcagccactggctcgcatgcgggaggccgtgcgggagctccatgccagaggccaccaggcrgtggtcctcaccccagaggtgaatatgcacatcaaacaagagaaatttttcaccctgacaacctatgccatttcatggacccaggatgaatttgatcgccttgtgctgggccacactcaactgtactttgaaacagaacattttctgaagacattttctaraagtatggcaattwtgaaaaattcatctttggtctttcataggtcttgtgtggagctactgcataatgaggccctgatcaggcacctgaatgctacttccttcgatgtggttttaatagacccaatttacctctgtggggcagtgctggctaagtacctatcaattcctgctgtgttttttttgaggaacattccatgtgatttagactttaagggcacacagtgtccaaatccttcctcctatattcctaagttactaacgaccaattcagaccacatgacattcctgcaaagggtcaagaacatgctctaccctctggcccygtcctacctttgccatgctctttctgctccttatgcaagccttgcctctgagctttttcagagggaggtgtcagtggtggatcttstcagccatgcatctgtgtggctgttccgaggggactytgtgatggattaccccaggccgatcatgcccaacatggtcttcattgggggcatcaactgtgccaacaggaagccactatctcaggtcggtgttygtgccttcatccaatcaatgttccaggcaaaacagtttttaaaaattgtatttacttacaattgcttccatatctacttatctttctggtgcttttatttctgcttgtcgtaatagccttcagtgagataaactgttaaggggtctctagtagcgtatttcaggttttaaatggtcaatgagaggaagaagaggcagacatgaatgtttatcaaaggatggactaggactgatgtgactcatggagactgttcgtttgtaaaggcaccatcttcatggttgtgcatgtccttcattgggaaggagcagggacactacattgagacttgacccatctggattttttgtttgcacaattttcaggggaaagatgatgcaacagcaaattacaattgttaatgtgataatttttagtggtcctgtcttgcgaatgatagagaggtgaccacaggagacctaagcactcgcaggaagtagaagtgttaaagaggttgactcagttcagtggaagtagagcaacgaacgtgggatatatgtctgtgattatagaattacacactgagttcagtttccagagagggatctgtgctgacaaaagatttttctggtcaggatttggggtctggtgcatgatgtggggacatctcagagttcggaaggcatagttttggttgcaggtcaattgggtcttctacttggaatgctgaaattatcaagaaattgtggaagggtctagggaggagataaaactgtgagcgtataagcccagttaagctggggacggtgatgaatggacatgtgtccaagaagggaagtgtttctcaggtgaagctgaacatatcaccaaacccaccctatcccactccaagtttctatagtgggatctacttctttaccaacaatttcaaaggcagctttctttaatccagaatatttggggttcattgatgtggtactctgggacctgaatattgtttcttattccttggtgtgccatgtatttcatgagagaattcagcctttttatgtcatattcactgaatgcatatgaacttccatgacttgatccttttgtatttttatttctgtacttctttttattaacataggtattattgccaaacactctaagcttcattttttaaaatcaaaccacatgatttttttattggtgattttctcccttatgcagtgtagttattcaattataaaatatgtgtttattagatttgtaacaatgttgaaaagtgggatggaatttaaatagtgactcttgcccttttcttccagtttttcaatgtgaacatattctctagtgttaactacattgctcaaaacttcactgtcatctcagtggagcagaacgaattgggaactgtggcacagatcactcttgctatgccccttagagaattagagaacactagcaaggctaattttcgagtgtggtaaagaacaggctaatgtattcaatagtgaggccactgactctgtctcaacatgaagtcacactagatttatcatgatttggctctgtatcccccaccaaatctcatcttgaattgtaatccccataatccccacgtgtcaaggacaggatctggtgggaggtgattggatcatgggggcagtttcgcacctgctggtctcatcatagtgagtgagttcttatgagatctgatggttttataaggggccattgtcccttcacttgcaagctcttcctctttctctctttcatgtaagacgtgtctttgcctctctctcactttctgccaggattataagtttcctgaggctcccccctccagccacctggaactgtgagtcaattaaagctctttcctttatgaattaccgagtcttgggtatgtctttatagcagtgtgagaatggactaatatattaaattggtgccatggagagtggagtactgctataaagatacttgaaaatgtggaagtgactttggaactgggtaacaggcagaggttggaacagtttggagagctcagaagaagacaggaagatgtgggaaagtttggaacttcctagagacttgttgaatggttttgaccaaaatgctgataatgttgtggacaatgaagtccaggctgagtctcagatggagatgaggaacttattgggaactggaacaaaggtcacccttgctatgctttagcaaagagactggtggcattttgcccctgccctagagatctgtggaactttgaacttcagagagatgatctgaaattggaacttatgtttaaaagggaagcagagcataaaagtttggaaaatttgcagcctgaccatgtggtagaaaagaaaaacccattttatggggagaaattcaaaccagctacagaaatactggctatagaaatttgcataagtaaggaggagccaaatgttaattgccaagacaatggggaaaatggcttcagtgcacatcagagacctttgcagcagaccctcccatcacaggcctggaggcctaggaaggaaaaattgttttgtgggctgggtccatgctccccctgctgtgtgcagcctcaggacttggtgccctgtgtcccagtggctccagccatggctaaaagaggccaaggtagagctcaggccattgcttcagagggtgcaaacctcaagccttggcagcatcgatgtggtgttgggcctgtgggtacacagaagataagaatttaggtttgggaacctccacataaatttgagaggatgtaaggaaatgcttggatgtccaggcagaagtttgctgcatggatggagcccttatagagaacctctgctagagaagggtggtaaagaaatgtgaggttggagcccccacacagagtctccactggggcactgcctagtggagttgtgagaaggcggccaccatcctccagaatcccaaatagtagatccaatagcttgcactgtgtgcctggaaaagacacagacactcaatgccagcctctgaaggcagccaggaggagggctttgccctgcaagccacagtgtccaagttgcctgagactgtgggagcccacttctggcatcagcatgacctagatatgagacatgaagttaaaggtgataattttggagctttaagatttaatgactgccctgcctggttttggacttgcatggggcctgtagccccctttttttggccagtttctcccatttggaatgggaatatttacccaatttctgtacccccattgtgtcttggaagttacttttgattttacaggctcatgggggaagggacttgccttgtctcagataagactttggactatggacttttgagctagtgctgaaatgagttaagactttggaagattgttgggaaggcacgattggttttgaaatgtgaaaagacatgagatttgggaggggccagagggcagaatgatatggtttgactctgtgtttccacccaaatctcatctcaaattgtaatctccataattcccatgtgttaaggatgggacctggtgggaggtgattggatcatgtgtgcagtttcccccttgctgttctcatcctactgagtgagttctaatgagagctgatggttttataaggggctcttcctccttcactcacaagtgaactcttcctctctgtttctctcttgcttgctgccatgtgagacatgactttgcttatctctcaccttctgtcatgattgtaagtttcctgaggcctccccagccatgtggaactgagtcatttaaacctttgtcttttataaattaccccgtcttgggtatgtctttatagcagtgtgagaacagactaatacaagattggtggtgattgaagttatactgaaagggtttaaaggagagtctgagaaaaggaaatgaatctgcatttattgagaaagttgatgagaaagtggaattagaaattcctagaaaggtaagctgttgtgtgaatgatttcccgagatggggaagtctctctacctgtttggagacagaaagtagaatcagaggagaagaagatgatggacagaaaggatcattccctcttctagatgctttctagtgtgtgatgtaagctgaattaaaatcagctgtgttgaactccagccagaaaaaatatctggcattttggttttttggaccctactgtgatggtcacaggactccaggtctcttggggctcacagggtcatgcctttccttgcccggtgtgcttggtgagaaggaacaagtgtttccatggaggaaattcattttaggggtctcaagagggtcatctttgcaacagaggaaatgcccctttttccattctgaaaacctgatttatcgaacccttttataaaagatgaatacccacatataggcctctagcagtgttatgtttttgagatgagacattttaaaaagcgatttttcaattctaaaaattctttaaataaaatgctcttgctgggacaacatagtgggtcaacatcattcccatctctacaagattttttttaaaaaaacattagctaggtgtggtagctgttgtcttagttactgggaatgctgaggaggaaggatcacttgagcccagaaattcatgtttactagtggggtatgatcttgcctaggcaacagctacagagagagaccctgtctctaaaacaaacaaacaaacaaacaaacaataaccaaacaagctttacacttctgtagaaggaacacttcccatttatgacatcagtaatctaggatatatcaaaatttgaactttgtgttagctttcaactgttaaaactagccagcgttgttacagatccacctctgagtgacactggtatgccactctttgctgaccactgaacaatgggatttatgtaaccaattgtgtagatacaaacccactcattctatcctacccagagtggtgatttacaacacaaaaaactaccatgaaactgttcccatgccttcctcccacctcaaaactccttttattcctgaacggctccataagcaaacccatccccagcaaactactcagtgagtatcttcacacatgtaagttcccttatccggatcactaaaaaatgaactcatttttcaaaagccctgacagtctgtcttattttgatacttcttgtatagttattatttaagaagcaactacccaggcaccttggagcatgttgatttcagagttcagtgtgagaccccgtgtgcccctgtgggatggtgccagctgactgccattttcctgctgtttattacttgggtgccattccatgcagattggactctgagggtactagagcatatccaaacccattgtcacagtatttgttggttaatgatgtgttcaggccatgatttttctgtaaaaaattaccagcatgctgctcttaatttttttcagcctgtctagttgttgcccttttgctctcatgcaaacttttcctcagaggtgaccctagaagatgggaccctttgtgatggactaccccaaggcaatatgccccaaaaggtcttcatttggggcataacccgtgccaacacaaaggtactttctcaattgtgtgtatggtgcctcacccaaacaatattacagatgcacttggctttcatcaacctaatttgatatgccccaagcacagcaataggacagttttgcgtggccctttggaaacgcttttctttacatttccaggacctaccatagttggagaaccacgttagggctgaagacagtcctagtatatcattgaccaaccacataaccccaaggtctgtcctcagccttcagaaggaacatgcttcttacaccgatttcagctcagtgatatgggattcaaatgtatgacctccaaaatattaagagaataacgtgtgttgttttaagccaccaagtttgggtaatttgttacagccatgataggaaacgaatgcatccactttgccaggtttacctgcttttataaagcctgggtttaaccttt

SEQ ID NO: 94840 - DNA, 20256 bp, Homo sapiens
gagtggggtctgctcaagtctccctgtcacagcagcccatagcagggtcggggaaattgtcccaggtatatgtaaaggagctttgtttccctgtccctccttggccaggtggtggctgcagccaggtcaactcaaactgggcctgagggcagggcatggcacagtattaaactctcaaaatggttccttgggcctgcaaccagggtaagaagctgtggggaatgtggttcactcacatctcagtctcaacagcagcccgcagcaaggcagaaaggaccctcccatgggtgcctgggagtgctgggtctcctctatacttacttgaagcagcacagcagcagcaaccatttctatagatctccagtatccaggttctcaaaacagcactcagctgaggctgctctaggctcaaatgggattccatgtgggttccattttccagggcaatgtctctgcacaatctttagggagctccgtatgtcaggcccaagacccaagtgggttgagggtttctaccatagccaagatcataaaagcccatttcaaagtgtggagccctgggagtttctctcttataatttcccctcatccaggagccactctcagctttcagtcaatcccctctccttactcacttcctgtgcttcccttcttttctctgttgaatcccttctcttctctgatgaattccagcattctctcctagataatctgtttaaaatggagttcctctccacgaagaaggccatgctacctgcatctggtcagccatcttgatcacctttctacatttaaagagacacagcatgttaaaaaaaaaaaaaaaattagttcccttacgaattgttgtttacctagccctccctgtcaagaagtggtctgcattttaaaggattttaataagatgaaaaatattctagaataaatttgcagtgaccccatctcccattcttcctgtggtaaggaagaccaaaagctattttttttcttttttcttttcttttcttttttttttctaaaggaaacccctttctcctaactcccttcagaatctgctgctttttttcaccccccagtgatttcagggaattgggttgttaaaaatgttttcttcagagttaatagtttttattcacgggatgcttgctccaaaagaagctactcaaccattaccagaagaaactcttcatcagtgcacttggcagctgacatcttcgtcctcttaaaaaataaaaataaaaataaaaattttttaaagttgttcagaaatggtggctcaaacctgtaatcccaacactttgggtggctgaggcgggcagatcacctgatgtcaggagttcaagagcagcctggccaacatggtgaaacaccgtctcttcaaaagtacaaaaattagtcgggcatgatggtggatgcctgtaatcccagctgctcaggaggctgaggcaggagaattgcttgaagccaggaagcagaggttgcagtggaccgagatcgcgccattgcactccagcctgggcgacagagcaagactccgtctcaaacaaaaaaagctgttcatccctgtcatctatccaacttctttcccatctctgggctctaagtcttgccattttcctggtaggcaggaacttcatggccatggatgtgagctgtccaaacactcagaaaaaaagaatcttgactttcttctcttctttgacctcctttactctatttcagccaacattcccatagccccaccctaatccttgtcatcactctgaaatgtgaaacacagacatttcactctctgaccacaaccactaataccccaactcccccactgcttcattgacaatggcctgaggggtatactggccaactaggtcgttggttaaggttccgaagagtgcaaacactatagaaggtcaagtctccctcctattaaaagactttttttctaacattttgaaaacttttgttacatgttcacaaggaagtatttgaagaagagattacaggcagtttttctaatatttcataaagaaaaacaggtggggcctggcagtccaaagtggtgattaacagcatgaaatttactttcacagccaggcatggtagctcacacctgtaatcccagcactttgggaggccgaagtgggtggatcacctgaggtcaggagtttgagaccagcctgacaaacatggtgaaaccccatctctactaaaaatacaaaaattagctgggcgtggtggctggaatcccagctacttgggaggctgaggctggagaatcacttgaacccaggacacagagattgcagtgagccgagaccgcaccattgcactccagcctgggcaacgagagcgaaagagcaaagctccatctcaaaaagaaaagaaagaaagaaaagaaagaaagaaagaaagaaagaaagaaagaaagaaagaaagaaagaaagaaagaaagaaatttacagtcacacaagaccatactaagactctaccctcattagctgtggaatgcggaagcaagtcacttacaaccaactttgggggccttacctaactcatttgcaaaatggagatgataaagccaacctcacagtcttgcaatgaggagtttaactaagattatgctcataaaaagcttcccacagttctggggttttcttcaagcggataaatggagctgggctaggactgttttaatccaaacacagatgagcacaggaaaatatcagatgttgacatgtatgcaacatggcccacaagcctgcatacagacaccagaatgcacacatgagaacatccacatacttatatgtagtcacccaattgtgaatgcatacatacaaacatgaatatgcggcattcatcttgttttacacagaaatgcacatcatagacacccctaaatcatgtgtgcacacatgctgtatgcagagacagacacatagattggcaagcattgagaaacagtggcacaccctgtcaggcacacacacacatgtgcatgtgcagacataagttggaatggatacccattatcaagcacaaacatacaccccacaaagcctggtgcacacataaattcatgtatcaacatggacatacagaaacatacatgcacatagacactaccagaatgacacacagacagttgaataaatgaggataaacatggcagaggcatccaggagaactcactggacaaaatggcacaaaatacaaagatgcaggagcacacagggtgattgagggaaacattgacttgcagggaaggagaaagagaagatagaaagacaggatccaagacaacggtagacagacaggtgggcaaagtcctgtgcagggctccagggccaaccagaataacctgagagtctaatgctggcctgtccttccacagatactgcctaactcagcaccacactccaggaggccatgaaggattaatttcctattcacagctccatggagtaaagcttggctgtgctgaggaaggggtggggaaagaggttcccaaagactctgtccttttcctccttcccaaaggaaaagatctgtgagctttagactagagaatgtaaaagcaaggaatgtgtttagggaacatcttatccatccgcttcatcgtacagaggaaagagaacaactgctattcattgagcacttactgccatgtacctcacctgcattaacacatatacttctcccctaaatagctgaagaggtaagagctgttcttggctccataaggctcagagataaagtcagctattcaaggccacacaacaaagaagggataaggttaggattccaatccaggccttaatcattgcaccatccatccagaaaaggaaactgaggccaagcaaaggaaagggatcttcctgggttttccactaactcactctgaaaggctgtacccaagacactgcccactgggacaagtccctcccacatgatttcagacaccattctctcactccatgctccagggtaatcaacaagtccaaaattgattgacctctatgtccacaaacactagagttctccaaacctgtctctccccaccccctccytggcyagatcatggcaacctgctgatcactcagtgcacttcctagtgccaacctcactgagaaacaaagttcccgaatttctatctcccacctttttaaggaactagaaggaaaaggaggagcccaggcttagggccagcccaggtgcaggctggtgaccaggattagagggattgatatctgccaagctggtgctaatcctccttcccacctcttcccctccaaaatcaacaaacaactttcctctgtcccctttgttctctgatctttgttccctccacacaggtctcagagctcagcatcctagaacactttgagcaagatgtcagtcctgggggggccaacctcacccacctccacttgtccacagttggtgacccagaggagaggtgcaacagtggaaggtccaaacatcagagcctgtcctgtgcccatctggagcccctctcagggtctggctgaggctcatctcagacccacataggaccaatatcaacacctgcctcatgctcatgtcagagcccactgggaccaacctcagaccctatatggtgccactcttatgccctcctgaagcaggactctcttatgccctcaatgacacctgagacaacacacagagccctcttggcaccaaacatgacttcaatattctcctggtgtcaagttcagtgccaacttgtttcccatcctcgcatacacctgggggcagtcccaaagccaacacgatgcctttccctccctggacacacctgatgctgatatcagaacccgccaatgtcatcagtgtgtccactgctgatgccagtcccagcactcacctcctgctaagcctggcctgcacttgactcccagggtgatctaggccagtcaatgaaggggggcgaggagaaagttcacatcccagctccctcacttactccctgtgtgacctcactcaagaggatttatggagtctagatctgctcatcttcaaaatgaggatgatcatgatgaaccaacctcactgttacaaagattcaaccagatcatacacacctagacttaatcttcccatatatgaccatgctcaccaaagggtaactgtcctgtttactaaggaagaatttccttgagggaaggacaggagggctactcatcccttctccactcacacccaccccaggatctgcctctgtgcctaatactggagtttaccccaatctcttctgcgattgttccctctgcctactaatagtagtagcccctgacaaagcaggaatcgcccttaaaggagacttaactcaccctcaaacgtggtcttctcttcccaaacactccctttccactggcaggaaaaccaaatccagaaagtggaactaaagacgcagagcaagagagatgggagttcagggccactcacacatgtcccctgcccactgtctgttttctgtcctctgtagatctttatataaaatgagaaacataaataacaatcatagtattaatagggatgatacaatcaatctagtgggtttccctaagaatctgggttggaaaccagtggagttcttcgtaaattacaacccttgggacacttgagatttttccagcatttgagggttgttattactatttctccagacctagccaatcccctctgccaactggtaacatgaggtactcttctccacgtgtggggaaagttcctctgaaatatggctctcgtcttctgcccctttcccagccagagatgggcagcggaggttctatggcacccatcctggcctcactctgaggttccaatgaggattctgggcatcaagagacagctctgggtcaaagcaaaatcaagtcagtccctgggcccagtgctgggctgctgggctttctgggagcacctgctgggcttgctacacactccacctcccagaaactccacacccacagccctgggtcttcctagccccaagactttcaagtccatatgcctggaatcccccgtcctgagacccttaaccctgcatcctccacaacagaagacccccagatgcacagccacacttccatctcaccctartaaaacccagacctttggattcctctcccgtggaatgcccaaatccacaactttggggtgcattctcactcccagatcccaaatccaaagtccaggtgctcccctgtgcaaatattccaaactcctcagttccacagtttatctgttgcccgctcctaaatccacagccctgcagcaaccctcctgaagtaccagatttagtctggagttcccctccctgttcagcttccctggggtccctctcctcctcccttgctggctgtgtcctaagctgtgtgggattcagggttggggtgtagttgggaggtgaaatgaggtgattatataatcaacyaaagtccatccctctttttcaggcagtataaaggcaaaccaccccagccatcaccatctatcatcccactgccaccatgctggcctcagggctgcttctggtgaccttgctggcctgcctgactgtgatggtcttgatgtcwgtctggcrgcagaggaagagcagggggaagctgcctccgggacccaccccattgcccttcattggaaactacctgcagctgaacacagagcagatgtacaactccctcatgaaggtgtcctaaggcagggagatgggtggcacggggtgggggctgcccagttggctggggctttgtggcaggggattgaccagtgtggaccagagtcttaggaragggagtcttggagtttcagcatcagggtcctagcaggaaagacaggatcttgggatgtccagctccctgactgtgagaacctgggggcgaagcatcccagtacatgatatctcrgtgctgggcccattcagagtggrggctgctccctctaaccactcccacctgcctccaacagatcagtgagmgctatggccctgtgttcaccattcacttggggccccggcgggtcgtggtgctgtgcggacatgatgccgtcaaggaggctctggtggaccaggctgaggagttcagcgggcgaggcgagcaggccaccttcgactggctcttcaaaggctatggtgagggggtgcccaagagggggaaggtggccaggtggatgcaatggtctccgtgtccccagccttctccctgactctcctgcccactggaggctatggcagagccccctgtctggtcttctctccccatctcccttcatcgtggcctctccctgtgcgtccctcacctgtctccagcgtccctgtcgtgattcctccctgcctctctctgccccgtctcctccttctctctcactggagtctcctctttcccctctctctccatctctgaggacatcctgggtttctgttttccagccctggtcctctgtcttcatttgtctttttgtcgctctcggcttctgtgcttctccgtgtttctcctctctctgcttccctctcccacttcttcctctgtcttaggatttcagggtattcctacttccacatctccagcctccaactcctggtaattgtctgtcctccttcccgatcctctctgtttctgtctccatatttttctctcttctccagttcagcttaagaatctttcaccatttttatttcctcctcccagatctccccatatctcacttcccctccctccatctctctctttctctccccactaccttcccttcctccatggagtatccccgtatccctctgtttctctgcatctgtctgtctggcctttctgcttctcttctgattctcttattctttctacccggactctctctctctctctctctctctctctctctctctctctctctctctctctctctctctctcgygctctcgtgtttctctgactgagagtgtagctctcctgggcactcgcgctgaatccatctctctcccacaccactcyctctctacaccacccttggggagccccttggaactggtccgctcctgctaccaccaccccctgacctctctccacccccgcgttcacctccccaggcgtggcgttcagcaacggggagcgcgccaagcagctccggcgcttctccatcgccaccctaaggggttttggcgtgggcaagcgcggcatcgaggaacgcatccaggaggaggcgggcttcctcatcgacgccctccggggcacgcacggtgagtaggggaccccgagtgcgagggcgggracccgcgctttctgcctggggatggggactaggtggggaaaggggcccgcacttccagccctggagtctggcgctgggattcggctcaacagggccctgcctcctggaattctgactctcctcagacctctgagttgactctctccccaacccccttctcccgccacacctgcaggcgccaatatcgatcccaccttcttcctgagccgcacagtctccaatgtcatcagctccattgtctttggggaccgctttgactatgaggacaaagagttcctgtcactgttgcgcatgatgctgggaagcttccagttcacggcaacctccacggggcaggtaactggctgcagcccgccagtgacgcccctaccacaacctgccaactgctcccctacctggagacaggtgccccaaactcccacccccctccagacagtgtcccctcaaaatcagtccccgatattggacaactggacggttgcaccagaacccaggagggatgcccaatacccagtctccaaggacacctggatagctcaacagatgatccccaaaacagagcctgctggcaggatgcataccctcagctcagctctctcacctgggcayatgttcccatccccaacttaccgtaatttstaacagrtgctccytacccagttcttctgaatattttaacacctggacaagtgactgcgtcaacccgcctcctgcatacctgaacacctggtgctgcaaaatccagcccatcataatcatttcacatctacacaaatgtcmcagattagcccactggaatatctggccaagggccctctacttcacccacttaaatrcctgaaaacatggacaggtgccctaaccaataccctaaacacataaatatctagatagattattccctgacacccaaataagtgttccccaaccctttccaatcacacaccttacagaggtgctcccagtgcatcccacttggataggtaaacacctcaacaggtatcccctccacttcaacatcttcaccagccccactttaatacctgaacacctgaacaaaagcccccaatccagacccagtaagtatctggacagctgtctccaaccaagtccacttgaatgcctaaatacctagacaggtgccactcacctcataccagccccacctgaagagctaaacacctggacaggtgtcttccaactcaacttcacttgaatatctgaacacctagatgtgtgctccaatccagcctcatttgcatacctgaaacctggatatatgcctcagttcttctcacctaaattactagaccgtggccctggcacctaatccacgtgaaaacttagatataagtttccatccaaccccactgaaatacctaaacacctggacagatgcctttaactccgttccttccttgctatgaaacaaatccccattcccatcagctcctgccccgtgacagctgtccttcccttcccatcctctctctgcaaccccagctctatgagatgttctcttcggtgatgaaacacctgccaggaccacagcaacaggcctttaaggagctgcaagggctggaggacttcatcgccaagaaggtggagcacaaccagygcacgctggatcccaattccccacgggacttcatcgactcctttctcatccgcatgcaggaggtacatcccagcagccagtgcaggcaggtgcaaagccagggagagggaaatcaggatgggagtggggtgggcagacgacacaggcccattcaaattagccctcgtcataataatccttacaattggccaggcgcggtggctcatgacctgtaatcccagcactttgggaggccgaggcaggtggatcacctgaggtcaggagttcgagaccagcctggccaacatggtgaaaccccgtctctactaaaaatacaaaaatgagctaggtatggtggcatgcgcctgtaatcccagctactcaggaggctgagacagaagaattgtttgaatccgggaggcagaggttgcagtgagccgggatcatgccactgcactccggcctgagtgacagagcaagaccctgtaaaaaaaaaaaaaaaaaaaaaaaaaaaatcctgacaatcccaactacatcaaccactgctgttccatctactgagccctcacccacaagcacgacttrtgcacgtgcattagaatagcaagcacttctacagcactaccgtgtgccaggcactgygttaagtgctttaagatagtccgccatggaacacttataacagctcttgaaggaggttcaatcatggccccaattgtacaaatgaggaaactgaggcccagagagtttaagtgtcttaactgaggtcacacagtgaggaagccatggtcccccaagctcaaaccctggtctctctgagcctaaagctggtgcttttagccaccatgctctctaaccgttcatgtcctggttagcagacacacctctgtggacaggtgacctggctttacattgcagggtccccgcctacctctggatgtcagcctcccatgtgggaaggctttagggaatccaaagctcagggagaaaggatcaagggagggattcctccacagtaagtttcaagatttttarggaagaaataggatgctgttgcttaaaattctgtgcttgtatctcagaaaaactctttttttctgactcttcatcttgccatctctgtactactttctcttcgtctcccctcatccttctctttccaaatattcctatcattaaaaaagtaacagactgggaaacatggcaaaaccccgtctgtacaaaaaaatggctaggcatggtggtgcatgcctgcggtcccagctactaaggaggttgaggtgggaggatagcttgagcccagggtgggcagaggttgcaatgagccgatatcacagcactgccctccagcctgggtgacagaataagaccgtgtctcaaaaaaaaaaaaagaattaattttttaacagttaacaagtgagcctgcatagtcatgtgcatgtgcagttccagctactcaggaggctgaggccggaggattccttgaacccaggagttggagtccagcctgtgcaacttagcaagaccaagtctgtataagaaaaaaaaaaaaccaactgacagctaagttgacaattaaaggatagatgatcagtgaggtaaagaaggtgagaaggaagagcattttgggcaaagccagcagccagggcaagggctggaacctggagcgagtttggcaaatctagggtccctctttccacctttggtctggaccaaagagaggtagctccaaaggaaaagccctagaagggccccaagagcatggagagtgagcttggtctaaaccgccctctccctgcaggaggagaagaaccccaacacagagttctacttgaagaacctggtgatgaccaccctgaacctcttctttgcgggcactgagaccgtgagcaccaccctgcgctacggtttcctgctgctcatgaagcaccyagaggtggagggtaagactggaaagggaggaaagtgaagggccccagaccctcaaaactcccctgagcctggtgcagtgtacccacctatcccagatcccaggaccctgagacgtgccttgctgtccagagacaggacaatattcagctgataggcatcagctgagtctcattagctattaaaatattgaaaatgtctgcactgattggtcagtcactcctgtcccaagcccactgagtgtccgctgcctgctcctctggatcatcccctaagttcctccctgtgcctaccctgtgattctgacacaacctggtttaacaggatcctgctgcaacaatgcgaatggctgatgtctgttctgttatgaatggtctacctccgtgtcatakgtggagctatgtcaaccaccgtgttttacctattcggactatcatccctgctctaagacccctagacacctaaacacattcccctcmtcccccagccaaggtccatgaggagattgacagagtgatcggcaagaaccggcagcccaagtttgaggaccgggccaagatgccctacacagaggcagtgatccacgagatccaaagatttggagacatgctccccatgggtttggcccacagggtcaacaaggacaccaagtttcgggatttcttcctccctaaggtgctgtctcccctccaccaccaccactcagactacggggacttccagcctctctctgtgtccccagaatcctgmccccattagtgttctagactctgtcccactccctcaatcagtcaaaaaagacttccccaaccaccacatctgttccacctttccacttagacagtcctgagtcctgcatctcgccagactctttgtgtcaggagaatacaccccatgttcccaaacttcctgtcttaagaaacagaagccccctttccattaggccttttgccttagggacacaaatctcaggtccctcaaacaccctgcctagtggaacatggaccccatgtctcccaaacttcctgtttcagagacatgaaacttctatcccccaaagctcctccctcagaggtccccaactcctccatgcctgccactcccctcacctggggcascctagttccccctgcagccyctgtgtaytttcaccaatccccccaacctgcctcatyacacacaccttcctcctccctcccagggcactgaagtgttccctatgctgggctccgtgctgagagaccccaggttcttctccaacccccgggacttcaatccccagcacttcctggataagaaggggcagtttaagaagagtgatgcttttgtgcccttttccatcggtaagagaccactgtttgctgccaggccacggctcacaccagcaggggcctctctcacccacctcccctctctgcggtgtagcctggtatttctccagcttggaagttcctgttagaatctaccattgagccgccaccagctgatactcccttaactgccaagcacccaatacctgcgcccaggtaaaagggaaggaaacatcttcccccatagatttatttgtctagggtcacacagcagattcttcagctccctgaaaaggagataatggcacagcacagcagtcatatttgcaagtgtatctggggggtaggggcatctaaacctcccattgctacacctggcatggatcaccccatctatgatggaggcatgacattatgcctttttcaaaacccatagaactgtataacacagagtaaaccctaatgtaaactatggactttggttagtaataatatatcaatattggttcaccattgttatatctcttatagaaggaaactgaagctcagggaggatcggagtctcctctgaaagtctctcaggccataatattccacccctcctccctagagagtgcagccgggggtcagtaggggktgaggctgcactgagagtgggcttcaccttcacccctcctgcctctcctcctcaggaaagcggtactgttttggagaaggcctggccagaatggagctctttctcttcttcaccaccatcatgcagaactttcgcttcaagtcccctcagtcgcctaaggatatcgacgtgtcccccaaacacgtgggctttgccacgatcccacgaaactacaccatgagcttcctgccccgctgagcgagggctgtgctggtgcagggctggtgggcggggccagggaaacggcsggggcaggggcggggcttgtgggaggggcggggctaagaatgggggcagtgggggaaggaaggggagaggtggttagagggaacagaagaaacagaaggggctcagttcaccttgatgatgtccttcagagctgtgatgagaggaagggaaaccttacagtatgctacaaagagtagtaataatagcagctcttatttcctgaacaagtacctccgtgtcagctttgttcaaaaagcgttgcacgctcacctcacttaattgccacaaacctctacgaaggggaaaagcgttcatgcccattttacacgtgacaaagctgcggctcagaaagttgtctctatctgatttctcacaaaacgtaagtgcccagaaaatctttgaacacagatctgtgcccatagccctctagatagattcttaaaaagcaccccttcctcacgtaaaatagcttagtatagcatcacatggcctgaacatccctgtcctggggrgttttccagagacctggcgggcggctgtcctgccttctctgcacactttcctactcggcacgctttgaacaccagggtgtaatctgagctcgctaccaggtaaggccactgtggcccaatcagagtcagtctaggacacaacgagacatgaatggacatacagagtcagtccattgacaattcctttgcagagcagaagtttttaattttaatgacattctgtcattgtatctcttaatgaagaagttgaaggagagaaccactttaatgccgggagaactctggatcaggacataccatacgcatgtttgtgatcatgtgcaggcatgcatgtgagcatatgactgcatattctcctccgtgtatgcatgaaacacattccactatgggtttctgaaggtggggctctcctgatggatctggggtctgttgtaagacccagctaagagtttcacaatcacctgcccactctcaaagacgttagtgtgtgtcccccttagaagctcccttacagcattcacgaaaattaactccaagtttattgtagacctaaatgaaaagtgagtataaacttctagaagataacgtaggagaaaatctagatgaccttaagtttggtgatggcttattagatacaacaccaaaagcacaatccttgaaagaagcaattgataagttctgagtcattaaaataaaaaatttctgctctgcaagataattgtcaagagaatgacaatacaagctacagactgggagaacatatttgcagggaacatacctgataaaggacttacattcaaaatacacaaagaactgttaaaactcaacaatagaaaacaacccaattaaagaatgggcaaaaatctgagcagacacctcaccaaataaaatatacacacagcaaataagcataaggaaagatgctccacatcatgtcagtagcaatttcaaatttaaaaaataatgatataccgttacctacctattagaatggctaaaatccgaaactgacaacaccaaatgctgacaaggaggtggctcaacaggaactgtcattcactgatggtgggaatgcaaaatggcacagctactttggaagacagattggtggtttcttgcaaagctaaacatattttcactatgtgatacagcaatcatgctcttctgtattaacccaaatgaattgaaaatgtatagccacacaaaaatttctgcacagatatttatagcagctttattcatagttgccaaatcttctaagcaaccaagatgttcttcaataagtgaatggataaatgaactgtggtatgttcatacaatgaaatatggctgggcgtgatggctcatgactgtaattacagcactatgggagaccaaggtgggcagatcgtttgaggtcaggaattcgagaccagcctggccaacatggtgaaaccccatctctactaaaaatacaaaaactagccgggcatggtggcatgcacctgcagttccagctacttgggaggctgaggtgggagaattgcttgaacccatgaggcagaggttgcagtgaactgtgatggagcctctgcactccagcctaggtgacacagtgagactttgtctcaaaaaacaagcaaaaaaaaaaaattatttggcaatacaaagaaatcaggcctcagaaagacatggaagatctgaaatgtatgtagctaagtgaaaaaagccagtctgaaaaggccacatcctatataattccaactatatgacattctggaaaaatgaaactatgaagacagtacaaagatagtagttgccaggagtttagggaggaggaagtatgaataggtgcagcacatgtggtttttagggcagataaactattctgtatgatactgaaatgctacatgacattatgccttattcaaaacccatagaactgtacaacagaaaaaataaaccctaatgtaaactacagactttggttcataataatatatcagtattgattaatcattgtaacaaaggtatcatacttacacaagatgtaaggtatataggaactttcttccattccaagatggatgaatagaagcaactccagtctgcagctcctagcatgatcaacacaaaagatgagtgatttctgcaattccaactgaggtacctagttcatctcactgggactggttggacagtgggtgcagcccatggagggtgagccaaaacagggtggggtattgcctcacccgggaagtgcaaggggttgggagatttccctttcctagccaagggaagccgtgacagagtgtacctggaaaactggaacactcctgcccaaatactgcgcttttccaatggtcttagcaaatggcatgccaggagattatatcccatgcctggctcggcaggtcccatgcccacagagccatgctcactgctagtgcagcagtctgagatcaaactgtgaggcagcagcctggatgggggaggggtatccaccattgctaaggtgtgaggaggtaaacaaagcatacagggaagctcgaactgggtggagcccaccggagctcagcaaggcctgttgcctctgtacattccacctctgggggcagggcataactaaacaaaaggcagcagaaacttctacaaacttaaacatccttgtctgacagctctgaagagagcagtggttcttccagcatggtgtttaagctctgagaatggacagactgcctcctcaagtgggtccctgacccccatgtaacctaactgggagacacctcccaggaggggctgactgacatctcatacacacaggtgggtgcccctctgggatgaagcttccacaggaaggatcaggtgccaatatctgctgttctgcagcctccactggtgatacgcaggaaaacagggtctggagtggacctccagcaaactccaacagacctgaagctgagggaactgactgttagaaagaaaactaacaaacagaaaggaatagcatcaacatcaacaaaaaggacatccccaccaaaaccccatctgtaggccaccaacatccaagaccaaaggtggaaaaaccagagcagaaaacctgaaaattctaaaaaccagagcacctcttctcctccaaaggattgcagctcctcaccagcaatggagcaaagctggacagagaatgactttgatgagctgacagaagtaggcttcagaaagtcagtaataacaaacttctttgagctaaaggagcatgttctaacccattacaaggaagctaaacatcttgaaaaaagactagatgaatggctaacgagaataaacagtgtagataagaacttaaatgacctgaaggagctgaaaactatggcacaagaactacatgacacatgcacaagcttcaatagccaattcaatcaagtggaagaaagggtatcagtgattgaagatcaaattaataaaataaggtgagaagacaagattagagaaaaaagagtaaaaagaaatgaacaaagcctccaagaaaaatgggactgtgtgaaaagaccaaatctacgtttgactgatgtacctgaaagtgatggggagaatggaaccaagttggaaaacacccttcaggatataatgcaggtgaacttccccaatctagcaaggcaggacaacattcaaattcaggaaatacagagaacaccacaaagatactcctcgagaagagcaaccccaagacacataattgtcagattcaccaagatggaaatgaaagaaaaaatgttaagggcagtgagagagaaaggttgggttacccacaaagggaagcccatcagactaacagcagaactctcggcagaaattctacaagccagaagagagtgggggctaatattcaacattcttaaagcaaagaattttcaactcagaatttcatatccagccaaactaagcttcagaagtgagggagaaataaaatcctttacagacaagcaaatgctgagagattttgtcaccaccaggcctgctttacaagagctcctgaaggaaccactaaacatggaaaggaacaaccggtaccagccactgcaaaaacaggccaaattataaagaccatcaaggctaggaagaaattgcatcaactaacgggcaaaatacccagctaacatcataatgacaggatcaaattcacacataacaatattatccttaaatgtaaatgggctaaatgcctcaattaaaagacacagactggcaaattggataaagagtcaagactcatcagtgtgctgtatttaagagatccatctcacgtgcagagacaaacataggctcaaaataaagggatggaggaagacctaccaagcaaatggaaagcaaaaaaaaagcagtggttgcaatcctagtctctgataaaacagactttaaaccaacaaagatcaaaagagacaaagaaggccattacataatggtaaagggatcaaatcaacaaaaagagctaactatcctaaatatacatgcacccaatacaggtgcatatatatttatgcacctagattcataaatatgcactagattcataaagcaagtcctgagagacctacaaagagacttagactcccacacaataataatgggagagtttaacaccccactgtcaatattagacagatgatcgagacagaagcttaacaaggatatccaggaattgaactcagctctgcaccaaatggacctattagacatctacagaactctccaccccaaatcaacagaatatacattcttctcagcaccacatcgcacttattccaaaattgaccacatagctggaagtgaagcactcctcagcaaatgtaaaagaacagaaatcacaacaaactgtctcttagaccacagtggaataaaattagaactcaggattaagaaactcactcaaaaccgcacatctacagggaaactgaacaacctgctcctgaatgattactgggtacataacgaaatgaaggcagaaataaagatgttctttgaaatcagtgagaagaaagacacaatgtagcagaatctctgggacacatttaaagcagtgtgtagagggaaatttatagcactaaatgcccacaagagaaagcaggaaagatctaaaattgacaccgtaacatcacaattaaaagaactagagaagcaagaacaaacacattcaaaagctagcagaaggcaagaaataactaagatcagagcagaactgaaggagatagagtaacaaaaagcccttcaaaaaatcaatgaatccaggagctggttttttgaaaagatcaacaaaatatatagaccactagcaagactaataaagaagaagagagggcagaatcaaatagatgcaataaaaaatgataaagagtatatcacaaccaatcccacagaaatacaaactgctatcagagaatactataaacacctctatgcaaatacgctagaaaatctagaagaaatggataaattcctggacacatacaccctcccaagactaaaccaggaagaaattgaatctctgaatagaccaataacaggctctgaaattgagaaaataattaatagcctaccaaccaaaaaaagtctaggaccagagggattcacagccgaattctaccagaggtacaaagaggagatggtaccattccttttgaaactattccaatcaatagaaaaagagggaatcctccctaagtcattttatggggc

SEQ ID NO: 94841 - DNA, 38653 bp, Homo sapiens
gaagggctttgggctgggaagaggagcaggcagaggagttccatgccactcacaggagggccagagcctctgaccttaaaggatttgggttttttcctaccaggggcagaaggaatactaattgtttgcatttcttgaggatccagggaagtctccgtgcattatttcagctaattaagtcagccttatgaggtgtagaaactgttgtttcccatttttatagatgaggaaatcaaattttcatagaaatgcgtctattcatccttttgacatagtgccctaggcagtgctatgcatttgttctttgtcatctgtaacttgagagggtctgagttgaaataaaagaacacatgagccttttcagctggaatatactaatctctggattttggtggtaacaacagaggcaagaggaatgggtagatagctgtgaaaaaatgttgagagtgcttctcagcttcaaggtacattcttatctcccacaggaagtacttctgtttcctgccatgaaacccgaagacaagaaggagaatgtagcaaccactgatacactggaaagcacaacagttggcacttctgtctagaaaataataattgcaagttgtataactcaggcgtctttgcatttctgcgaaagatcaaggtctgcaagggaattcttgtgtgctgctttccatttgacaccgcagttctgttcagccatcagaagagagacaaggaattaaaaatttctttttaatcctgttaccaaataagccatttgtctcttctctttacttttagaatatcaacttttttccccagacttctggcctaatgaatgtttaggattttaccatcttattcatttaacaaatttgtattaatgtctgccctgtgccaggcattattctaagagattggggacacagcagggaacaaaagccaagttcctgcttttgtggaaattgtattctttctttggggtagggagaagaagtagacaaacaaaaaaacaagtaaatacatgttctttctggtggtggtatatactaagaagaaaaatggagcagggtaaggggacagaggtgctattttagaggtggaaggaacagtgctactttatggtggtcaggaagacctctgctgggcatttcagtagaggtctggagactgagctggggaggtctgtgggaaaaggccattcagactaaaggaccatgtttttgaggaatggcagagggtctggtgtgactggacagggatgagtgaaggtcagtgaggggccagatcacgcaggcccctggaagccactcagaaaagtatgtgttttctgagggaaatgagataccatggaaggattttgagcagaggagtgtttttcaaggattattctagtttctgtgtggaggacaagagcaacgaagggagaccagctgagcattcaccatgggctgaggagacagtggctgcgacgtgcatggaccagtggaaatggttacaagtggttgtactttgcctgtgttcctgagggcagaagaatttggtgatgggaatgtgggttgtgagaaaaagaagccaaaaatgatttcaaggttttggacctgaacagctggaagaaagttgccctctactgagatgggaaaaacaggaagttcaggtttcagagggaaggttggaagtttggttttggacatgttaaatttgacatgcctgttagccagatggaaatagcagaatgttgaataatgaatctgaagttttctcattattttcagctccattcaatagagctaagaacgtgacaagggtgtggctgagagcctgccatcaaagtggagcccctctttcctgacacggagacagctgggaagaccttttttcacatgacggaagactttaccttctgcacctcagcaaaacctctgcaagcatcccagtttgggagcagccagtctcctttcacagagcaggtttctgtttctgtagctggtaaaacaacctaagcattcagaattgcctaaatgaactacctcaggcagtgaggaacatccctacccctgctggtgtttaagcagtacgtgaccaggtggcatttcagaagaaacattttcaaatggcacatcctcagaaagggagtggtaactaaaacgggagataatcatctcaccaagggaggtggtggaaggtcaaggacaggtaagggactaggtttcaggtaatactgtcaatgcagacaattgaaaaaggctacaaggattgatgatatgagtgactttacaaagtggtttaatggaaggatggaggcagaatccagctgtctggtcttaaggaggctagggatagaaaggaactgaggcagcagtagacaacttgtatgtgagggttggcaggaaaaatgaccgagtgtgaaagctagaagggacagaagggtcataaagtccccatttctcttcaaacagttgcaggctcacaatttgctaactgctttgctggggtgagcagaaacaggcgtggtctcaaacttcatcaagcatctacacttgtaaagaaaatagatagtaataaatcatcctccaaaattgtataaaatggcagctcaggtaaatggtttgaaggagaggtccacggggtgttgagaagctataatggacatggacctagttagaggaggtttctctgaggacatgagatctgaagggaagaaggctttccgtggtatggcaacaagtgcaaaagccctgtggtaggaagggacatggagaccagtgagagtatagaagcccaaagaaatatggcaccaggtgaggcaggaaggggctggccatgcaggactgtgagcactactatgggatttttgtctgtattttaagagtactgggaagccagtcgggcatggtggctcacgcctgtaatcccagcactttgggaggtcaaggcaggcggatcacttgaggtctggagtttgagaccagactgaccaacagggtgaaaccccgtctctactaaaaatacaaaaatcagccgggtgttgtggcatgtgcctgtaatcccagctactggggaggctgaggtagaattgcttgcccctgggaggcggaggttgcagtgagccgagattgtgccactgcgttacagcctgggtaggagagtgagactccatctcaaaaaaaaaaaaagtaccgagaaggcattcactgaagtattatttaagcagtaaatgtgtagtagtcacaaatctgacaccagatttgcagtttgaaaagattagtcttgctgctctgtggaaaatgaattggagttaagcaagaaaaggtggaaattcagagatgagtgtagcaatccaagaggaatacgatagtggcttttactagcgtattggcatgcaagtggagagaaatggatggattcaagagataggaagtaagatcaacaggacttggtaatggattgcactaaggggattaagggaagggagataacaaggaacatgactcactttttagttacgcaactagattgctagtaataccaatccctgagataaagaaccctagaagaaggtctttgataccccttacccccactggaatatttcttaaaagacagaagaggcagtcacttgcagattaaagatattggagaggaatgaggagcaaagtctttggccttggaggagggccatgtcccatttcctttgaactagagagaaggatggggttgagcaagttgcataaatttttgaggggtaacaaagaaaaatgaattctttcatttttagtaatagagcattcagttactgggtgacaaaggcccctgaagtatccaggcagctatattacttattcccggcaatccaaaggtttttagacctgttctgcccactacactgtagtagtactgtactacagtagccagtagccacatgtgactatccagcatctgaaatgtggctgatccaaattgggatgtattctaagtgtaacacacaccagatttcttaaacttcgcattaaaaacagaacagaacataagtattttttaaaatattgagactcggcagccaggtgcggtggctcacgcctgtaatccagcactttgggaggccgaggcgggcagatcacgaggtcaggagatcgagaccatcctggctaacatggtgaaaccccgtatctactaaaaatacaaaaattagcctgacgtggtggcaggcacctgtagtcccagctactcgcgaggctgaggcaggagaatggcgtgaacctgggaggcggagcttgcagtgagcagagattgcgccactgcactccagcctgggtgacagagcgagactccgtctcaaaaaaaaaaaaaaaaaaaaaaaaaatatatatatatatatatatgagacagacagaccgaccccgggcatcgtgactcacgcctgtaatcccagcactctgggaggttgaggcgggcggatcacttgaggtcaggagttcgagaccagcctggtaacatggcgaaaccccgtctctactaaaaataacaaaaatgagccgggtgtgatggcgggcgcctgtaatcccagctacttgggaggctgaggcaggagaatcgcttgaagccaggagacggaggttgcagtgcgccgaaattgcgccgcttccagcctgggcgacaaagcgagactccatctcaaaaaattttttgattatatgttgaaataatactatttgggatgtatgggttaaataaaatatatatgattgtttctattttgacttttaatgaggctactggaaatttttaaattacgtatatggttcgaattatatatctattggacagtgatgttacagatagaaatacagcatagtcaggagaatcgcttgaaccgggaggcgaaggttgcagtgagccgagatcgcgcctctacactccagcctgagcaacagagcaagactccgtctcaaaaaaaaaaaagaaaaagaaaaaaattcagccgagtgctgcaagatacgtcattctagttgaaggaatatctaagccaacaagcggctcccatcatccggtttcacgcctctctaagacgcagccagggctgcgggacttgaagcgcgggaatctcggccctggcaccgactccccggaaaaactacagggcccggcatgcactgcgcgcctctgggagcgggagccgaaaggaaccggcgctttgtgacgtcacgtccgccttaccggcggattaagctcgctttcttctaggcgcgtttcctgaaggtgggaggggagcgtccgcgaggcgctggggcgacggggcaggtttatccgggctaactttgccgagtctgtttttgagggaagaggttgtgaggatcgtatcttccgggacgcgtttcacgtgggaaggcgctccacgcctggaactgtcagcagccggcgcctgaagagctcctggcgcggggcctctggcctggcagccgcaggacccaatggatcaggcgctcacgctgttctcactgcatggcttcagtgccttgcctggcacctcctatcctgtaactggccgactcggggtcccacccaggcttctccagcggccgggaaggggctctgcttccggaagtgtttaggaagggagccagcgtaaaccagagtcccttcctccaagcatcgctgaagccttttctcccctggcagccgacttccttttctttggaaaggacgtcagtttttttagcttgttgaaactgttcagagatgcggtcttgtgggcaaataaatgcctgtttagctgagctgttattttcagctaagaagttcttcaagttttcaagatctaggagggggtgtaggctcgaattataatggacccagtgtagcaaaacatttattcatttaaacaattgtgcatgctcattcagacgcactacctgagtgagatgatgccgttctgggctgcttcatcttaaagagagtcactgtttcttctggcaacttctacctgccttgcctatcgaggtttgtgaattgcacctctggtttaatttcaggtcgatggccaggtggtcttcataaactatactgccttgtgatgcctccctagaaatgagaggtgagtcccttccaaacgaggattctaggatctcatgctttcttttcttgacaaggcttgccctggccctctgactttcaagtcacagggtctcacttcctgcagatttttgttttaaatcactgtggtctgatttaccagtagcattcactacagtagcgagcctgcacgttgcgctgcaggggattcataacaataccatctttcaaaagctgcatgcactggagctcaggaaagccttttttgtttttttgagagggagtctcgctctgtcacccagcctggagtgcagtggcacaatctcggctcattgcgacctccrcctcccgggttcaagygattctcctgcctcagcctcccgagtagctgggactayaggcacgcgccatcacgcccggctaatttttttgtattttcagtagagacagggtttcaccacgttggccaggctggcctcgaactcctgacctcaggtgagccaccgcgcccggccttcagtttggttttacagtgcttagctatgtctatcacaagctcatcttctactgggaagctttttgtataattgagtccaaatgagatcaggatgtgcctagtgagcattgatagggccaagagtgagagatttccctgcaaagtatcctagggatctgcttgatggttttttaattcatggctttctatgcccattacagccctccccctttcacccccaccaccaggtagctcaaggcaaattaaccaggaaaatcatcaaatgttattttttgtaatagtaatcacagttgaccttaattatgctcaacatagtagcaattgctttttataagtattacttatttaaccctcacagtaaccctaagtattatttaatcttcacaataatctaaataggttagatactattgttatcactattttgacagatgaggaaacagacccagcaaggttaagtagtctattcagcatcacagttaatttgtggcaaagccaaaattagaacccagaaagggtgaatccaaagtccacacccttaagtagagctctatgagaacacgtaactgctgagaaacatttcagtggggatttactagagggcggtagagaaacactctgctgtaggggaaaggagaaaaataaaatgcctggaaaaagaagacagataagaacatctgtccrgaaagataaaccttatacagtgagggtctgcccaaagcaagtgagtctgcaaccctttacatgccktttccartgaaaactggagtagtgaggacatttccttctcgtgtcctttaatgttgagtagaggatgsagactccttagaaatgtatcagatatatracattaagaaaaacttgaaacaataattttggrgattggtagaatttggggtttctttgatctttcattaaagatgaaaagggggcagggagatagtagaagaaaatgatccatagagttccagatagggaaacctcggtctgctccatttgaaagactcgaagcatggatatgagaggctgtagcatcgtgcactggttctcctttccgwacttctgatggttgtggtttttgatcaaggtctcaataccagctcagaccatgtggaccgcggatgagattgctcagctatgctatgaacactatgggatcaggctgcccaagaaggggaagcctgagccaaaccatgagtggacattattggcagcggtggtgaagatacaatctccagctgacaaggcctgcgacacccctgataagccggtgcaaggtgagactttttcttcttggcatsctcctcactgtgagagatggtaaaattatgcattgctgtactgtgagggtacagtcgtgggtagggtgtgaactacgatgttaggcatatgtgcttgtcctctgctaggtgacgcagtacctctgatggcgggagaccgccatgctggaaccgcagaccttggttgagtgggcctctgggaatcccctagaggagtgtgcaggctgatcacacctgaacaccggggaacattccgtttctcagaactcacacgatttgtttttttcccacagtgacaaaggaagttgtgtcaatgggaacaggaacaaaatgcataggacagtccaaaatgaggaagaacggtaagcacgggtgggaatctaaacaaagatttagcttgaaaccagtgtccatgttttaytctccttgtcagggaagaggggccatgtcagttgaggtgcatggcatttgtttcctactgactatcmgtccagwtggaaggaccgtactcacttggagaatggaaatccaccatcaaagcggaggcctctaggaacatgctttccgaataactgaaagttaaccagtattttcatgctcaaaccacaragtccctgggtttagctattccacattaggtctggaaggctttgggactctatagcaggtagaggatgcagcttgagtggcttctgaagcccaagaaagcaatctttttttttttttttttttttgactcggagtctcgctctgtcacccaggctggagtgcaatggggcaatctcgattcactgctctgcaacctccccttcctgggtttaagcgattctcctgcctcagcaggcacccaccatcacgcccagctaatttttgtatttttttagagacggggtttcaccatgctggccaagctagtcttgaactcctgacctcaggtgatctgcccacattggcctcccaaagtgctgggattaaaggtgtgagccaccgcacctggtaagcaatcttgaatgacaggaagctttgggcctcaacaagaatatgaaaattccttagagatctgggggtttttatttgtctgtttcagtggtttttttttttttaagagacagggtctcactgaagtacggtggtactatcatagctcactgcagccttgaactcctgggctcaagtgatcctcccacttcagcttcctgagtagctggactataggtgtgcacagctatgcacacctatgtgcagctaatttttttcatttttattttgtagagatttggtctcactgtgttagccaggctggtctcaaactcccagcctcaagctatcctcctgccttggcctcccaaagtgctgggattacaggcatgagctattgcrtccctggccgagatctggggtctttacctcttctagctagcaggttcctctttgagttggcttctaccattctccttgccttaacctcctgtatatgaggaacctgttccaggatcactgtggattggattagatggaattgtaccaccatgagcacaagtaggatacttctgtacaaaagatctagacctttgttctccgaatgaggtttttctataaattaatgtttctcacctgggggtgatttgcatcccagaggacatttcgcaatgtctagagacatttttagttgtcacaactgagggaggggtgctagtgtcatctcatgggtagaggccaggaatactactaataaacagtctacagtgtatggatggaatagatcccccacaacaaaaaattttctggcccaaaatgtctacagtgctgggttgagaaaccstgcacctgatgcattgttattcatgattgtggtaccttctggcaaagctctccaggagctacatgaccatcctgggtgctggtgggactgctgtgttctgcttctaggaaccagaccctctccagcttccatatgtcttcacctggtgtcctatctttgccgcaggagacatcctcaatgatagccatgctgaggtcatagccagaaggagtttccaaaggtaaagccacatctccagagtatggttcagcaggactggggtgggagtcccggaatttactttttttttttttttkkggggggacagagtcttgctctgttgcccaggctggagtgcagtggcatgatctcagctcactgcaacctccgcctgctgggttcaagcaattctcctgcctcagcctcccaagtagctgagactacaggcccgtgccaccatgctcaactaattttttgtgtttttagtagagatggggtttcaccatgctggccaggctggttttaaactcctgacctcattatccacacgcctcagtctctcaaagtgctgggattacaggtgtgarccaccgcgcctcacccagaatttacatttctaataagctcctaggtaatacagatgatattagtctgtaaactacacttttgagtagtaatgtggtctagactagtggttctctcttttttttttttttttttttttttttggacacagggtcttgctctgttacctaggctagagtgcagtgatgtgatctcagctcattgcagccttggcctcctgggactcaagcaagcctcccacctcagcctcctgaatagctggggttacaggcgcatgccaccacacccagctaacttttcctgggtttttttttttttttaaagacagggtgtcactatgctacccaggctggtgttggattcctggggctcaagcgatcctcctgcctcagcctcctaaagtgccggatttacaggcatgagtcacaatcctggcctggactagtggtactcaaacttgattgtacatcagaagaacctagaaggcttgttaaaacccagattgctgagcccaccacagagattctgattcagcatatctagggtggaacctcagaaattgggtttcttctttcttttttatttttctaaaaaaaaaaaaagaaacaaaaatagagtctcactctgtcacccaagctgaagtacagtggcagaatcatagctcactacagcctcaaactcctgggcttaagcagtcttcctgcctcagtctcccaagtagctggggttacagatatgagccaccgaggccagttgaaattggaggtctaacaaattcccaggtgatgctgatgctgctggtacagggaccacactttgagaatcactggtctagagcattctcataattccccatcactaccagtcccattagtctacagtaagctgtcttagtaatcacccaaccagaggctttccccttaccacagagatcggttgttcatcctaataacatcttgcaacccttaggtaccttctccaccaactccagttggcagccaccctgaaagaggatagcatctttgtcccaggaactcaaaaaggagtgtggaaacttagacgagacctcatttttgtgtttttctccagccatacaccctgtaagtatattcaagcctttggattaatgttacatgaactacttccttatgtttgtgttatccataggtaggttttttcctaaaaagcactaatggctgaagtagccacaggtagtcacaagtagccacaagtagtgacagtgcctttttatgacaggctagtgtacctaatcacttctaaaggtttcatctaaagagaagacagaggcaaggggtgcagastctcactcatactattagtcaattctcagaatcaggattaggagcgtaaggctgaaacctcacaagatgtgaagccaacatggggcttggaaatcctatagtgacttatcctaaaactcatttcgttcatttagtcattgaacaaatactttctactatttgtcaggcacgatatgacatactgagtatacagaaatgaataagactagcatattgcttaccttcatagtcttttaggaaatgtagacagtcatggttagttagggtaaattttggtgggttataagggtatgttcaggtgctatggttgcataagacaggaagacctagcctggggtgaagggggtgtcatttccgtcttttgtttttctttcttaaaaattgaaaataacttctaccttttgtggataacaactcaggatggcagcaaaattttctcaccctaaaacctttgaaataaggatataagattaaaccttaaaacttttaagctttaaagctaacacatgcaattagagcagagataagaaatcactatgaagaaatagaatagctgtgtagatttgatcataactcaaattgaaaatatagatacagcttaagaaagaatgaggccaggcacggtggctcacacctgtaatgccaggactttgggagtccgaggcgggcagatcacttgaggtcgagagttccagaccagcctgaccaacatggagaaaccccatttctactaaatatacaaaattagctgggcatggtggtgcaygcctgtaatcccagctactcrrgaggctgaggcaggagaatcatttgaacccgggaggcagaagttgcagtgagccgagattgcgccgttgcactccagcctggatgacccggcaagactcagtcaaaaagaagggaaaaaaaaaaaaagagagagaagaaagaaagagtatgagaaaagagttttaagagtcaaagcccagaaaaatgacaggtaggcagcactcatccttgctcttttcttagccgtaagggccctagtccaaggcccaaaggttgtttcctaatcagctcctctcaagctgtaatatgcacatgaatctcctgaagaacatgcagattgagattcattaggtctggagtggggcctgaggttctgcatttctagccaactcccaaggcatgccagcagtgtgggtccatagaccacacattgagtagctaggaccggggtgatcccagtgacagctatagccttattgtggagaaagaagcatctgaggatcacagcctgatggcctaatccaaacttgtctaacccacggcctgcctggctacatgcagcccaggacagctttgaatgtggcccaagacaaattcttaaactttcttaaaacattatgagatttttcttgcgattttttttttttttttttttttttttttttttttwtwagctcatcaactatcgtttgcgttcgtgtattttgtgtgtggcccaagacaatttttattcttccaatgtggcccagggaagccaaaatactggacacttatgkagtttgattatgcccttatcaaactccttaagtcagtggtcaacaaacaggtactgatctgtgagaacagtccctgaaaaaaaccaagaaagctcaagactatgtagtgaattttgcaaaactaatttctttcactttaaaggaaatgagagtttttttttaagtgatggcgattgaattttttttttttttctcgatctcggctcattgcaatctccacctcccgggtccaggcgattctcctgccttggcctcccaagtaggtgggaatataggcatgcgccaccacgcccggctaatttttttgtatttttagtagaaacagggtttcaccacattggccaggctrgtctcgaactcctgacctcaagtgattcgcccrcctcggcctcccaaagtgctgagattacaggcatgaaccactgcgcctggccggtaattgagatttttaaagatcttccttgatggaataaaaagttggcaaccctctgttcatcttaaaaatcttcaggaaattttgctggtaatcttttaaaatgtgatgtcctcccatggtttgtctgcagagagagagaacattacctagagaatgtgcctctctggctcccttggtatttacatcctatgagtaattaataatttgttggctgggttagctacttcaggctcttatgagttttattagcatgagtcaggctcttgcattcaggcattctgtcaagatccaatttccaagcctgcagagtgggagatggaccctggtgagttctccaaagtcactgtgaccttgtgaggtctctggaagtcagccagccaacctctccagatgtattcccacttctgtatctcttgcctttcccactcttgagttataaagattacagatgtattatttatacactttagaaaagcaacactcatcaggttagtgtttgaagaaatctttcgcttctcaagggagagctgtggttcttactgacctctagttttcttctgtttcctgtaaggacagaggaggtcagaaatctctaaaccagcaagaggaaacactggaaattttggaaacattggtttagactaggtgtgtaatttactttagagtctttactgtggggccatgcatcataaaatctccaagatggggaaattctgagcaatggttgccaaatttcttttcctttttttttgagatggaatctccctctgtcacccaggctggagtgcagtggcgcattcttggctcactgcaacctccacctcctggattcaagcgattgttctgccttagcctcccgagtagctgggactacaggtgcgcgccaccacacccggctaatttttgtattcttagtagagacagggtttcaccatattggccaggctggtctcgaactcctcacctcgtgatccgcccacctcggcctcccaaagtgctgggattacaggcatgagccaccgcaccctgcctgccaaatttctttatgaaataaaccacccacttttgttttccaaagcatcttagggaatagcatttcacaaaatgcacttgggaaaccttgttcattctaagccagtggttctcagtttggaaagttttgctccccaggagacttttggcaacatctggagacattctttattttcatactgggactggtagtcctattggcatttagtaggtagagaccaggtatgctgctaaatattccgtaatgtacaggacagccgccacagcaaasagtgatacagtccaaagtgtcattagtggccgggcacgctggctcacacctgtaatcccagcactttgggaggccaaggtgggcggatcactcgaggtcaggagtcacttgaggtcaagaccagcctggccaacatggtgaaacctcgtctctactaaaaatacaaacattagccagtcgtggtgatgtgtgcatgtaattccagctactcgggaggctgaagcaggagaatgacttgaacccaggaggtagagattgcagtgagcagagatcaccccactgcactccagcctgggcaacagagccagactgcatgtcaaaaaaatgtcattagtaccgtggttgagaaaccctggtctaaacccatttttccaaaaattcctagtgataaaaattagctcagatctttgttaaaatattccattttgcatgcccttctccagaaattccaactcactgggtccaggatagagtcttcaacaagagccctagaggattcttattagggaattgtgtgcatgtgctcttaactcatctcaggtcagctgggagaatagatgaagtcagtagttctcaaacttgagcttgcatcagaatcacctggagagcttgttaaaaacacactgctgggctctgcctccggagtttctgattcagcaggtctactgtgggtcccaagagtttgcatttctgatgaattcccaagagatcccattgtggctggtccagggacctcacttgagaaccatttgtttaagtgggttcattctctgcaggtggggatgcctccatcattccgatgcttgagtttgaagatcagccttgctgtcctgtcttcagaaattgggccmacaactcatcagtagaagccagtagtaacctggaagctcctggaaatgaaagaaaatgtgaagaccctgacagtcctgtaaccaaaaagatgaggcttgagcctgggamtgcagccagggaggtcaccaacggagcagctcaccatcagagttttggcaagcagaaaagtggcccartctcaccaggcatccayagctgtgatctcactgtagagggactggctmctgtcaccagaatagcccctggtagtgccaaagtgayagacgtttatagaactggagccaagtgygtacctggagaagctggagactccggaawgccgggtgctgcgtttcaccaggtggggctgctccgagtgaagccaggccgtggagacagaacacgctccatgtcctgtagtgacaagatggcccgatggaacgtcctcggatgccaaggggcactgttgatgcacttgctggaagagcccatctacctgtcagctgtggtcattgggaagtgcccatacagccaggaagccatgcagagagcactgattggaaggtgagagggtagggagggctcaattggaacagtcattccaagaggcagtctgagggtaaggcctaagagcattaagaatctccataccttttgatccagcagttccacttccaggaatttgtcttaaggaaataattaaagtatttgaacatttagctttgtatataatttttttttgttttttagagacggagtcttgctctgtcacccaggctggggtgcaatggcgtgctctgggctcactgcagccaccgcctcctgggttcaagtgattctcctgcctcagcttcatgagtagctgggactacaggcatgcgccaccaygcctggctaatttttgtatttttagtagagacggggtttcaccatgttggtcaggctggtctcaaactcctgacctcaggtgatccacccacctcggtctcccaaagtgctgggattacaggtgtgagccaccgcgcccggctaataatttttttaaagaagaaaagtaaacaactgaaatgcccagtaataggaaattaagtgttttctttgttgttaaaaatagtattgatgaatggctgggcatggtggctcacgactgtaatcccagcactttgggaggtcgaggggggcggattgcttgagcacagaagttctagaccagcctaggtaacatgaggaaaccccgtctttacaaaaaatacaaaaactagccagatgtggcacgcacctgtagtcctagaatagggcagctgaggcaggaggatcacctgaccctgggaagattgaggctgcagtgaaccaaggtcattccactgcactccagcctgggtgacagaccctgtctcaaataaaataataatatttatgaatatttaatatggaaacatgtctatactgtttaaagaacagtttagaagataaaaagccaattttggtcttaaagtacatccacacataagaaaaattataagaggatgagcgctaaggtattattaataatctctgagttgtattatgggtggtttttttcttctttgtttttaatatattttctgatttttctacagtgcacatacattgccattatatatgttttttaaccctaaacattagtttggggctttcagaatgtttttgtagtgacaaggtttcactgggtctcacccagactggagtgcagtggtacaatcatagtttactacagcctccagttcctgagctcaagtgatcctcctgcctcagcctcctgaatagctaagattacaggcataagccaccacacttggctgatttttaaattttttttgtggagacggggtgttattgggttacccaggctggtcttgaactcctggccttaagtaattctcccaccttggcctgccacagtgttgggattataggtgtgagccacctcacccagccctaaacattagttttaatttttttaaagttaaaagtcaaaagatgaccactcaagtgtggtctccctaaaggaggcagccaaactcagtgctataggaaatgagggcagggcaaagccatggccagggcaagcctcataggcccatatcaaatgtgaagcctcaagatatggtccagcaattccactcctaggtacaacccaaaataaatgaaaacatacattcacacaagtaggccaagtacagtagctcatgcctgtaatcctagcatcttgggaggccatgtcacgcagattgcttgagtccaggagttcaagaccaacctggtcaacatgaggaaaccctgtctctacaaaaaatacaaaactcagccaggtgtggtggcacacacttgtagtcccatctgcatggggagctgatgtgggaggatcaccagagccacgggatgttgaggctgcagtgaaccgtgatttcaccactgcactccatcctagacaacagagtgaaaccctgtctccaaaaaaaaaaaaaagtgtatatgtatataacaaaaacctgtacataaatgttcacaacagcattattcataataaacaaaaagacaaatgtccattagtggatgaatggataaatcaaatgtgatatatccatacaatggactatgattcagctataaaaacgactgaagtactattacatgctgcagcatggatgaacttgaaaatataatgctaagtgaaagaaatcacatattgtataattttatttgtgtaatatctagaacaggcaaatccataaagacagataatagcttagtagttaccacaggctaggtgctgtggctcatgcctgtaatgccagcactttgggaggctggagtgggaggatcgcttgagccaaggagttcaagaccagcctaggcaatatggcaaaatcccatctctacaaaaaatttaaaaattagtcggacatgatggtgcatgcctgtagtctcagctacttgggaggtggaggtgggaggatcgcttgagaccagggggcagaagttgcagtgakccgagatcatgtgactgcactccagtctgagcaacagagaccctatctcaaaaaaacaaaaaatttaagtggttaccagggaatagagagtgaatgctaataggtacgaggtttctttctggggtgatgaaaattccttaaattacattaccatgatagttgtacagttctatgaatatactaaaaacaattgaattatccactttaaatgagtacattttatggtatgtgaactatatccctataaagatgttggttttttgtttttttttaaaaaagccaaccctaggcactgtgcctgggatgttttctgtttttcctattctggtacttgcagttgctatctgcttcattctagaccagcatcatgttggcatctagtttgttcaaagatacaagagaaaaaaatgaagcttttatattataggataattttgggttttggtgtgtttgaaggattccctaggaagcaggtgccaacacattaatgtttctgcttaaacttttcaagtttctcaaagcctatatcaggaatggagtttggtgttacatccctgaagggtgttgacttgattcttagttatccctgcagattgagggagaaggatcttcttccagccatgaggtgcttacaatcttgattctattctgaaacactgtctgcccaaataaataaacaaatccccacacctgctaaggctcaggggtgatgatgtgagccacaatcctagatactgttttctctaggcatgcacctaaactgaatgcattttcccttgtatttaggtgtcagaatgtgtctgctttaccaaaaggcttcggagttcaagaattaaaaatactgcagtcagatttactatttgaacagagccgcagtgcggtgcaggcaaaaagggctgayagcccaggtcgacttgttccttgtggggcaggtaagagatccaggttagacctgccctggagtaactgctcccctgactgagagtggccccagagggtsggcatcctcccagcctaggaaggtagttcaccactctagtggccggtagtgtgggctttagagacacccatagtgggtcasgtttatgctcttgtgacccccggcatgttatttaccctcccttggcctcartttctttgtcttcagattagaagaatatcatttatcagggttattgggaagattcagtgagaaattctgtttaatgcatttactctgtgcccagcaaataataaatgctcagtgattgttagctatcataataataatgaattatgaaccacttagactactgtaccctggaggccaagcatccaatagcagtcattgtctgtgacatcatatccagctctcatgggtctgtagagtcagagaaatatttttattaaaatacttctgactttcacaagaaattgagcagttttaaccctagaatcttatcttttcatagccatcagctggagtgcagttcctgagcagcctttggatgttactgccaatggctttccacagggaacaacaaagaaaacaattggaagccttcaggcaaggtacagcatattggggcaggaggagatggtggctgtgaactcacactctaccactatctaattctagaacatttttattaccccaaaaagaacaaccatacccattagcagtcactacctatccctccctctcctcatcccttggaaacctctaatttacttaatttacttcctgtctccgtggatttgtctagtctggacattttctatcattggaatcctacagtatatgaccttttgtatctggcttctttcacttagcatagtgttttggaggtacatcctgaggtagctgtatcagtacttcattactattcatgacttgaataatatcccattgtgtggatataccacattttgtttgccattcgttcatgaatggacgtttgggttgtttcactctttggctattgtgaatagtgctgctgtgtagaactatgaacatttcatgtaccactttttgcatggccatatgttttcaattttcttgggtatacctaggagtagtgttactgggtcatatggtaattgttatgtttaacttttttgaggaactgctaaactgttttccatagcagctgtaccattttacgttctaccaacaatgtattagagttccaattatcctgaatcctttacaacacttgttattgtcttttttattgtagtcattctagtgggtatgaaatggtatctcattacagtcttttttttttttttttgagatagagtcttgctctgtcacctgggctggagttcagtggcgtaatcttggctcactgcaacctccgcccctggggttcaagcgattctcctgcctcagccttcctagtagctgggactgtaggcatgttctaccacaccggctaattcttgtatttttagtagagaggggtttcgccatgttggscaggctggtctcaaactcctgacctcaagtgatccacccgcctcaacctcccaaaatgctgggattacaggtgagagccatctcacccggcctcattacagtttttatttgcatttacatttccctaatgacaaacggtgttgagcatctttttatgtacttattagccatttatctctctacagcctcgcaagtagctgggactacagatgcccgccaccacgcccagctaatttttttttgcatttttagtagagacggggtttcactatgttggccaggctggtcttgaattcctgaccttgtgatctgcccacctcagcctcccaaagtactggaattacaggcgtgagccaccatgtgctgcctataactggtagtttttgagtgttcacttattgaggtcttcttacatatatttcagcaagttttatagctttatataaatctttcacatcttgtattagatttattccttaaatgtatgttagttatctgtttctatgtaacagattacccccaaaataacagcttaaaacaacaatatacatttattatttcacatagttatgtgggtctggaattgaggagcttagctaagtaattagcttagctcagcaatttatgaaattgcagtccattatggcagccagggctgcagtcatctgaagacttgacgggggctcaaggatcctgttccaaaatggttaccttgcatggctgacagatcagtgtcagctgttggcaggaggcttcagttccttataacaaggacctctccacaaggctaccagagtattcagcttcacgactcagtggctggctccccacagaacaggcaatccaagaragcaaagcagaagccacagtgtcttttatgacctagcctcagaagccagagcctatctgtaatatcttaatggttattcagatcagccctattacgtatgggaggggattgctaaggggcatgaataccaggaggcaagaatcactggggaccattctggagtttggctatcacagatgctattttagatagctttttatcccgttttctggttattactgttgcaattaagcttttgttcctctttgtggcaattactgttggttgctagataaaaacactaaccttaccattatcactagaataataattgtactcctataatcccagcacttcgggaggctgaggtggaggattgcttgaagccaggagttcgagaccagcctgggcaacaaaatgagaccccccccccaatctctaaaaaacaaacaacagcaacaacaacaaaaacccaaaagaatgataattctaattagtctgggaatgcttttgggatttggggatttttttttttttttttttttttgagacagagtttcacccttaccgcccaggctggagtacagtagcacgamcttggctcactgcaacctckgcctcccaggttcaagcarttctcctgcctcagcctcccgagtagctgggattacaggcgcctgccatctcacccagctatttttttgtatttttagtagagacgggattttgccatgttgggcaggctggtcttgaactcytgacctcargtgatccacccgcctcagcctcccaaagtgctgggattacagatataagccaccgcacccagcctttttcgggattttttaaatgtagatcatcatatacaaatacagctgacttttcaacaatgtgggtgttagtggtgccgacccaccttgcagtcaaaaatctgcatataacttttggctctgcaaaaacatcaagcctattgttgaccagaagccttgacataaacaattaacacgtattatgtatgttatgtgtattatatacatattcttaaaataaagcaaactaaaaaaagaaaatgttattaagaaaatcataaggaataggccaggtgctgtggctcacgtctgtaatcccagcactttgggaggccgaggcaggcagataacctgaggtcaggagttcaagaccagtgtggccaacatggcgaaaccgtctctactaaaaatacaaaaattagctgggcgtgatggtacgtgcctgtaatcccagctacttgggaggccaaggcaggagaattgcttgaacataggaggcagaggttgcagtgagccgagatcacrccactgcactccagcctgggccacagaatgagactccatttcaaaaacaaaaaagagaaaagaaaatcataaggaatagaaaatacatttattcattaagtggaagtggatcatcataaaggtctttatcctcatgatcttcatgttgagtaggctgaggaggaggagaagaagaagagggtttggtcttgctagttgcagaggcagaagaaaatctatgtgtaagtggacccacacagttcaaacctgtgttgtccaagggttaactgtagtgtttctttccagccttctgttccttttatttctcttactgtgttgactagaactgacaatatcaaaatcatctgcagatgatgacttggtttttgtttttcacttttctttcttttctgtcctgctggccagaaccttctgtataatgttgaataaaagcggtgatagcaagtcccccttgtcctattcctgattttaaggacatatatttgctataggttttttatagttgcgctttataaatttaagtactcttcccgagtcctagtttgccaaaaggtttttaatcaaaggatgttgaattctaccaaatgctttctttgcgtatattttccccataattatatatatgtatatatgtgtgtgtgtgtgtgtgtgtgtgtgtgtgtrtgtgtgtgtgtgtrtawatatatatatatwtwttttttttttttttttttttttkgmgacagaatctcactctgtcacccaggctggagggcactgggacagtcttggctcactgcaacctctgcctccygggttcaagtgattctcgtgcttcagcctcctgagtagctgggattacaggcatgcgccaccactcccagctagtttttgtatttttagtagagatggggtttcaccatgttagccaggctggtctcgaactcctgacctcaggtgatctgctcattcacctcagcctcccaaagtgctgggattacaggcatgagccactgtgtttggccatccctaattacattgttcttctttaatttgttcatgagagttccattaatttttgctttgttttcatgctaaagtggcctcatcttcctgagtgccagcagccactccagctaaggccctgggagagcagtgtctgagtgctcagggttcccctttaagcagcaattcctgaagtaggctaggttccagccaggtaagggagattttggacagactccataattccctattttacatgtagcagtgatggtcactgtgtccaagctgagggtgtgatctgctaggatgatgcagagtgtggtgtgtaaaagtgagactgcacattgttggtatacacagcatttcccaatttctagatgcagctcatgaattgtatacatgagggaaaagaaggcaaccacgaaggtctgggtgggcttataaagtagtcaacactcacctccttaagtattccaaaccatgacctccacccagaattttgttgtttaggagcaaacgcttgttctccaaaggcctgtgatgcccatggcaggagtccagggattctgcctcaggtggstcgtccaagtggattttataatgacagttcacacagggaacagcactcagatctctgaaacaaagctttccatttcttgtaaacccataggggccagcacccttgaaaggatttagccagaagtgtcttacagatatcctggggcaaaatttcgtaattgcacctcagggtacccgtttgggcttgttactttaatgatcccatggctgatggcatttcytaaggttagactcgtttttatacctcaacctaatcagacatccaggtctggattttctcctcaccaagtacaggtgaaaatgaggggctctggcaccttcaaacctaaaaaccacatgaagcctggcatctttgataggggcttagaacatactaaacacttaataaatcatctttgccttctttttccaaacagatcccaaatcagcaaagtggaactcttcagatcrttccagaagctgctaagcagaattgcaagggacaagtggccacactccctcaggtgatgctgttgacctatgttttctcatatttaggtagacaactgttttgattctggcttctgagtagcaagaagctttggcaggagtggtggttcagcaagccagtggcacttattgttgaccacaagttcttctttccccatagccctatttgcagatacgtgcatgatctgagatgcagaggatgggtagtttggtggtatagagttataaaaaactaaggatagaactggggcttggccattccaggccctcctttgattccacctctagatggagatcactgtggaaatgggagtgctctaagagcaatatattctgttacaagtgttactcctcttttccttttgaacttgcagctccatgacttaaattgctcttcaaacaaaaattcaaagaactttaaaaccactcttgggaacaggtagatgggtgcagtgacattctgacagtgaccacctagatttaggtgaagtttcacaggtgaaggacacagttcccactaaactgtcttcatttcaaacaactaccacaagttaaggaaagccccaaaccacccatacttctgaccaactggctacaaatttgagtgtctccactccccttcacgttcagtcattcactagaacatctctcagaactcagaaaagcactatagttgccattaaagttttattatgaaggctacagatcagtactagccaaaaggagagagatatagggtaagatatgggagggtcgcaaaggcagagcttccatgtcctcaggacatatcaccttcccagcacattgctgcgcatcaccaactaggaatctcactcagacatcagtgtccaaagtttttgttggagtttcattaactattatgactgattgaattattggccacatgatgtgattgaacttaatctccaacctcctcctctcccaagagttcaaactgatatcacgtgtctcagagccctaattctctacatggttggtctttctggcatggccggtatcatcctgaaactatctcgggggcccaccatgagtcacctggttaaacagaaactcacgtgtgatcagcgagatctaccatgcaggacaaagacacttgcagaaactccaaagcttagaggctcccrggaactggtgacaaagaccaagtgaatccttcattatatgacagtggggaaactaaggagtagctagaaacttctatatgaagaggcatcgccatcatgcatactgaagtgatggatctgtggtcagttggcttctttcttgggtttccatatattctatatgtcaaatctgaatttaggtgaggagatacttctaaggcagagttttgctcctgttaaccaggctggagtgcagtggcacaayttcagctcactgcagcctccgcctcccaggttcaagtgattttcctgcctcagtctccagagtagctaggattacaggcacccgccaccacgcccggctaatttttggtatagttagtagggacggggtttcaccatattgaccaggctggtcttgaactactgacctcgggcgatccacctgcctcagcctcccaaagtgccaggattacaggcgtgagccaccgcctggcatgtatgtatgtttgtttgtttgtttgtttttgagacagggtagctgagacaattaagggaagtgttgcatgtgaccaagagcctggtttgtagtagggttttgataactagtagttactgtatttttttttttttgagacagtgtcttgctctgtcgcccagtctgtgtagtacagtggcacaatcgtagcttacaggaacctccgcttcctgggttcaagtgattctcctgcctcagcctcccaggtagctgggactacaggygcctgccaccacrcccrgctaattttgtatttttagtagagatggggtttcaccatgttggccaggctggtctcaaactcctgacctcaggtgatccgsctgcttcggcctcccaaagtgctggggttacaggtgtgagccaccatgcctggcctagaaaacttttaaaccaaaaaagtagacagttgtttttattttatctgattccactaggaccatagaaacctagaattctgttcattcttaactgttttaattcatgttgctttctcgtgaattccctacaaaggagacagagttgctctaggaaagtgtcaaaagtcaaaataaaaatgtaaagataaatctctaaatttaatattttatttgggatacaagaaattcaagacatacagactgggtggtcttcaatatgtctgaagaacaaagggaaggttagaggttttatttttcaaaaaagaaatgtaacatattgttgaagaaggttcattgacatgagtaaagtgaggagctgccaagtgatggcactgggtaaaactattcttaaagtctgcagcaggttggttcagtagctgttagataaaactggcaggcagttttagcagccaggcttgcagagaatgcattcttggagcaatgttatgcgccctgagtgttttttacccctggcttctcaactctgtttcagttgagtatgacaagaataacgtagtttgtatgatcaactttcacaaaagcatactgaactccttctctacctaagtctcattacaagtctgtccagttgcttgctcaggtgtctggtggcccctggggtgggctattcaatgagaacctgtgtatttggtggcctgtgtgcattagggtgcagaagctggatacctaccaggagtacaaggaggctgcgtcctcttaccaggaagcctggagcacactccggaagcaggtgtttggatcctggatcagaaacccaccggattatcaccagttcaagtgagaaggaaatgtttgctctggtagcaggacccttcatcctgaactgccttcctccacgcaggacaagtcttagcttttttggtagttaaatcagggaacattctttctgagctttgcatctctgttgtgtaatacagatggaatctggaacttagagcaagctatacttgattgaagtagctctctgctaaaatggcatctcactaatgacctcactatctgacttccattgtgttttattgcttctctaaaatatgaaatcagagtttggaacatgatgctttgaaagtactctgcagcagctctgttttatgggttcctacattgattcagcaaatatttattgagctgaaatgatgtttgacgctctgcaagttttacagctttgcctagcatagcgaatatatattttgtattcccagcctttctttcttcagggagccattcttttcccattcttcagtgatcctgctctgtgcctcagacttggctgaagctaaccttactccctggctctaggaatagcctgtgagccagccctggactgccctggacttgttctcagaggtatcaggaaaggctttctgttttgatctggagctgtaagggtcacataatcatgggactgccggtggccatcttttcctactacctagagaaagccagcaaagaatgaaggcaacaaaggaaacagccaagagaatcaaagatctagtaacactgtttagatgtctcaattatgtgagacagattcctgttgttattttgattaagcctgtttgtgttggttttctgacttacaattgaaagagttctgtccaaaaagccaaaaggtggccaggcttggtggctcaggcctgtaatcccagcactttgggaagcccaggcaggcagatcrcttgaggtcaggagttcaagaccagcctggccaacctggtgaaaccctgtctctrctaaaaatgcaaaaactrgccgggcatggtggcgcacacctgtrrtcctagctactcgggaggctgaggcrggagaattgcttgaacccaggaggcggaggtagtggtgagcaaagatcgtaccgctgcactccagcctgggtgatagagcaagaccctatctcaaaaaaaaaaaaaaaaaaaaaaaaagaagccaaaaggccctgcagcaaatcagcaatagacccagcagccaatcctgttttaacatcgaatgtttaacactcaacttcagaccttgaatgattgactgaaaatggaagctcccatgttggggttactcaaggtccttattggttcttcagcattttgtggctataaatatttttaaataacagttgtattgagatataattcacagaccataaaattcacccaactaaagtatacattttaaaagtttttaggccgggcacggtggcttacgcctgtaattccaacactttgggaggctgaggcaggckgatcacctgaggtcaggagttcgagaccagtctggccaacatgatgaaaccccgtctctgctaaaaatacaaaaattagccgggcatggtggtkyacgcctgtagtcccagctactygggaggctgaggcaggagaatcacttgaacctgggaggcggaggttgcagtgagtcaaratcatgccamtgcactccagcctgggtgacagagtgagatcctgtctcaaaaaaaaaaaaaaaaaatttttttagtatatccacagagttgtgcaaccatcaattttagaacattttcatcacaaattttgtgcctgtaatagtttcctagagctgtttcttaacgaagtaccacaagctgggtggcttaagacaacagaaatgtattcctggccgggtgcagtggctcacgcctgtaatcccaacactttaggaggccgaggtgggcagatcacgacgtcaggagatcaagaccatcctggccaacatggtgaagcccctttctactaaaaatacaaaaattagccaggtgtattggcgcacgcctatagtcccaactactcaggaggctgaggcagaagaatctctcaaacccaggaggtggaggttgcagtgagccaggatcgtgccactgcactctagcctgggtgacagmgcaagactccatctcaaaaaataagaagaaaagactgtatcccctttcagttctggaggctagaagtccaaacaggttgttggtggggcttctgcttcctctaaaagctttagggcaggggcccccagccccagagccacagaccattacttgtctgtggcctgtcaggaacaaggtcacacagcaggagataagtaacaggtgagcacttgaagtttcatctgtatttatggctgccccccatcgctcacatttctgccgtagctcctcctcctgtcataccagcagtggcattagattctcataggagcgtgaatcctattgtgaactgtgcatgcaagggatctaggttgcacactccttatgagaatataatgcctgatgatctgtcagtgtcttccataacccccatatgggactgtctagttgcaggaaaacaagctcagggstcctactgattctaccttatggtgagttgtataattatttcatcatgtattacgatgtaataataatagaaatacagtgcacagtaaatgtaattcacttcagtcatcccgaaactatccccctatccccaccccggatctgtggaaaaattatcttccatgaaaccagtccctggtgccaaaaaggttggggactgctgctctaaggaagactttttcgtgccttggggactgctgctctgaagaagactctttcatgcttcctccttagcttctgatggctcctggcagtccttggcttgtggctgcatcacttcagtttctccctccgtcttcacatggccttctgtgtctgtgtctcgcatggccttcttccctgtgtctgtgtctttccatggcctacttataaggaccccagtaattggatttagggcctgccctaatccagtctgatttcatcttaactaactagatctgcaaagactctatttccaactaaagtcacattctgaggtttcaggtagacatgaagttttgggggacaccactcaacccattgcagaacccattagcagtcacttcccgttcctcaacgccccctaccccagggcaatcagtaatctactttctgtctgtttggatttgtctattctgaacatttcatataaatggaatcatagaatatgtggtcttttgtgactggcttctttcacttaacatgttttcaagatttatgttgtagcatgaatcagtactttattactatttatggaataaaaatcagttgtatggatataaatgttttgtttatccagtcataagttgttggacatatgggttgttttcactttttgggtcttgtacatagggtttctatgaacatttgtgtacaagtttttgtgtgaacatatattctttttttttttttttttttttttttttttttttagatggagtcttgctctgtygcccaggctggagtacagtggcacaatcttggctcactgcaagctctggattcacgccattctcctgcctcagcctcccgagtagctgggactacagrtgcccgccaccaygcccagctaattttttgtattttttgtagagacggggtttcaccgtgttaaccaggattgtctcgatctcctgaccttgtgatccgcctgcctcagcctcccaaagtgctgggattacaggcgtgagccaccgctgccagcctgtgagcatatattcttaaaatgtttttttaattacagaaataatacatgtatgtcataagaagttatccttgaatttttttccataagaaatccttttagataggaaagaaagaaggccaggcatagtggcacctgtaatcctaacactttgggaggccaaggtgggcggayagcttgaggccaggagttcgagaccagcctggccaacatggcgaaaccccgtctctactaaaaatacaaaaattagctgggcgtggtggcgcatgcctgtagtcccagctacttgggggactgaggcacgagaatcgcttgaacctgggaggcggaggtttcagtgagctgagatcgcaccactgcactcaaacctgggcaacaaagtgagactctgtctcaaagaaaaaaaaaaaaaaaaaggcaatgaccaacatggagaaaccccgtctctactaaaaatacaaaattagctgggcgtggttgtacatgcctgtaatcccagctactcgggagactgaggcaggaaaatcgcttgaacccaggaggcggaggttgyggtgagccaagattgtrccattgcactccagcctgggcaataagagtgaaactccgtctcaaaaaaaaaaaaagcaaaaatatcactacttgaaggccaggatctccagtattctgctttaatcagtttcttttgcctggccccaaatcttacattatgacagcagctgggacacctgggctgtcgggagcttttatctaaaggatgatgcgtctctctcttatgagatcttagtttaaaggataaagacttatattaaaacgtaaaaggataatgttttttatgcctaaattttatgttaaattttcaccccccaaaaaaaccaacaaatttagacttcagaatagagactagaaaaaaaacatgaaggctagagactaaaggcagcttcactttggactgtacctgttttctcaagagctaaaagtaggtgcttaaaccatcctacattttattttaatctctaaaaacccaggtttaaaatctcatctgtgccttacaatcacatctctgcaatcttggcaggctctcagatttcatatatttataaaatgtgtttttactgttttttatttttaacggcaagtgaaaggatttttattttactaatgtttcttaacctatatttggctgataactgcttctaatttttaaatacattttcttttttgaacttgttatggaaatttttagtcacaaatatagactagcacagtggactccctgaaccaccactcaaacttagcaaacgtcagctttattgctgctcttgtttgatctattgcctcgtccccgccaatatttttttctttgaccatttaaagcaaatcctaaccatcgtatttcacccaacagaattaatatccttaatatctaatatgtagtctgctcagttttcccatgttgtctcaaaaatgtattttgactgtttatttgttcaaattaagatctaaataagagccacactgtgcatttgattgatggggtcttttgtctctttaaatctgtaacagttacccttttttctgtgttgaaaggtgggttttttgtcctgtagaatttcccacattttgtatttcactgctcatttcctcccagtgttgtttaaaggttcctgtctccccagtatttcctaaaaatgtgcagttacacaaagagccttgattagattcaggtgcggttgatctgacataagtacttcctgagtgactctgcatctttgttttgcatcatatggagaggaacgtgacatctggtggttccacacgctgtgactgagcaatggggtctgtggtgtcagtctggtcttttccattataaagtaccccactaaccttccacctgatggttctagcagccgtgtcaggggtccctgagaccaccctcatgcttgatgattcacaagatagattcacagaactctgaaaagctgctatacacatcattcctgtttattttagtgaaaggatacagattaaaatcagcaaacggagaaggtgcgtgagcgaagtccagcagaaaacaagcacaagcttccagttgtaccctcaatatgaaccgtgcgtgtttgattctttgacatgggaggggccttgctcactcggtggagagattgttcctcccaaggctagccaattcctggagagagtaaatgactcacctatgactgctcctttcatatgtaaaccaaccaatctggagcccataccccaatctctcctttacaggacgtctcatactctgagccaatatcccatactctgggatatccacctgccctaatcaccgcagggccaggtaccagaaagctagggacagcccctaggccccacagcctgctgaaattattcgaactcgccagtctgtttactcggccttgccccttccttcccatggagatcacaaggctcttactccacttgatcccatcgttccctctacctcctcactgaccctgggcttccagtgtggctccctgtggcgtgccatgccccttttggaatctgtaagtacaacaagctttcttgtcaatggcagtcacctgatctattgccctcaccatacttgaataataataaaacctatattttatatttttttatcttacttttttggagacgggtgtcttgctgtgttgcccaggctagtctcgaatgcttgagctcaaatgatcttcccaccttggccttccatagtgctgggattacaggcatgagccaccacgtcgggccacctaaaacctatattttaaaacactcccccagtggtgtcgcacagacagcacttaatcctcccagcaatgatgtatggcagtatgtgccagttgttgccaattatagaagctcgctgagccttggatgctgctaacgtcgcatgatgcacaggacaactgccctgtccccacccccactccccacaaataattatctggctcaaaatgtcagtcatgctgaggttaagaaaccctgcttctaacaattgtcttttaagtcacttgaaatagttcctctctagttattgctccaaatctgtacataattttactttcagtttttagggataccttttaaaaaattatgtaaaatgtttgtatgattccaaagttgaaactagttttgttttgttttttatttttttattttattttatttatttatttattttttgagacagagtcttgctctgtcacccaggctagagtgcagtggtgcgatcacgactcactgcaagctccgtctcctgggttcacgccattctcctgcctcagcctcctgagtagctgggactacaggcgcccaccaccatgcccagctaattttttgtatttttagtagagacggtgtttcaccgtgttagccaggatggtctcgatctcctgacctcatgatccgcccgcctcggcctcccaaagtgctgggattacaggcgtgagccactgcgcccggcccccttgtttgttttttaaaaaatagagacggggtctcactatgatggccagattggtctttaattcctggcctcaaacgatcctcccatcttggcctcccagagtgctaggattacaggcatgagctaccacacctggctagaactagttttctttgaagaaaggtacactcagagaggtctttcatccttgtcccctccctggttttttcttcactctagcagtagtcataaatccatatcatatatacaacaatttgtatttttgccactgtatcttttggatagtcttagaagtgggattgttgggtcaaagattaaataaacatataattttgcttgatttaaatatatcttctaagttctgtttctaaatacagtgaatccaaagaaagcaaagcacagaacagcattacaaccatgccatttatattaaaaaagcatgaaagaggccgggcgcagtggctcatgcctgtaatcccagcactttgggagactgaggcaggcggatcacctgaggttgggagttcaggagcagcctggccaacatggagaaacctcgtctctactaaaaattaaaaattagccgggcgtagtggtgcatgcctataatcccagctactcgggaggctgtcaggagaatcgcttgaacccgagaggcggaggttgtggtgagccaagatcaggccattgcactccaggctgggcaacaagagcaaaactccgtttcaaaaaaaaaaaaggcatgaaagatatgtaactgtttagcttgtatatactaaagtatctctgaatcgacttacaagaaaccagtcatcgaacaggaaaaaggatggctggggtccaaggagtgggagggagactttttactgaataccttttaaaaaaaattttttttttaattattatactttaagttttagggtacatgtgcacattgtgcaggttagttacatatgtatacatgtgccatgctggtgcgctgcacccactaactcgtcatctagcattaggtatatctcccaatgctatccctcccccctccccccaccccacaacaggccccagagtgtgatgttccccttcctgtgtccatgtgttctcattgttcagttcccacctatgagtgagaatatgctgtgtttggttttacccttttaaaattttgaaccatgttaattatattttttaaataaattttttaaatgaaataaaaattagtggaaaaagatttctctatcttaaactgcattaacaccagaaaacacgtagaggcaatgttgcatagggaagaggaacctcacaagctgctttaggcagctgaattccgcagaattactgtcttctggaatttggctctttcagggaagtttaaactttcagcattgctgtttattctgtgcccataagtgggttctaatgttatgactgtgttgcataatttgtattttcttcataattttcaaaacttggcttgatttaaataattgtataggtttcatgtagtcatttctgcatagggttaaacgccttgttttatggagttgatcagcgccaagcatgagctcactgtctggggaaacaaggctgctatggagataatgaccaaccctggctgccagtgcctctggtcggaagaaatgcaagccctgtctgatttggtagtgtctgtggctgggggaaagctgcctccacctggaccttggcaagactttttggatttaagacagtgttctgagcaagccttagccaaaattttccagctcctaaaacccacttcccttgctggctagttaaatggcttaggacagtgttatcttttcaactgccactgcctcctgagatggtgtctgggaaagccagaggagctgttaaaatgagtcccaccgcagcagaaaagctattgaaaccaggagacagcttccaactggaaaaatacttagtatctaagtgcttactttcaagagctcaagcagctcttcccataggcggctatcccgaaggaatggttgaatacagaaacagccaaggaggcagatattttagacaaagtacatttattttccagaaagagtagtttttttaataccccatattgaagaattgttgaccttcacatcctataaatgtgaatccttttaaacttaaacgtgtctgtactggggctgagactgacttgctgtaacaccatccagatgaatccaaaacaaatctttatacctatggtccaaaagtggtaggaaaattctgtaaagatttaagggcttcaggcaaagttgtttgaattcaatttttatttcttaaaactggggacccaaaatgaatcaaaagggatagatgtcagatgagtggttattgcctgatgtggtgggggatggggagcaggcggttgagttagaaagaggcacaggagcaccctctgggagatggaaacatcctgtgttttgattggagcgttgattatattggtgtaaacatttgtcgaaattaagtctacacgttaatgttcgtgtactttacgtaattatacctcaaatttaaaatgcaaaaaaacaaaaacatagcccttattactttgtgtagtagaataaaactgggcctagatactcaagcaattgtgtcctagtaccagttctgccactaacttctatgtgtatgtggggaaagtatgtaacctctacttataacttctcatctgtcctaccaaattagatcctcgcatttaggatgctcagtttttttcaactgttaggtaggattctcataaaaattattaattggatagataatacaaagagaaattttctctaggaaactgcccattgttgatgtgactacatatggcctcagtcatgttggtgacaagggagggatgaaaataacttttttgttttttagacagagtttcactcttgttgtccaggctggagtacaccggcgtgatctgggcttaccacaacctccacctcctgggttcaagcgattctcctgcctcagcctcccgagtacctgggattacaggcatgtgccaccatgcccggctaattttgtatttttagtagagatggggtttctccatgaaggtcaggctggtctcgaactctcgacctcaggt

SEQ ID NO: 94842 - DNA, 34789 bp, Homo sapiens
  misc_feature (1)...(34789): n = A,T,C or G
ttgttttcaaaaattctttaagctggataggttataaataccaaataagttgaagctgagaaaatgcaagtcaaagagaaccctacttttatgtatacccttatttaatacttgggggttcttattatatgcatgtattaacttgaaaaaataaatatatgttcctctattcttgaagttcagaagctgttgagtgatgaccattttgctagtcagaaatgtgtcactacttttctaagtcaacagggggccatgtactgataataatctcaaagtagactaaagtcatgtactagtttaccgccaaagaaacgctttacataggcaaagatttccagcatcagcaccagctaaagccctcacaaaatcctcttcagatgcagctgactagtacagttatgtgcaaaccatcaggaaatggaaatgagaaaacagcatgttttgtgtaagaaaaaaaaggggtggcagggtgtggattccaacctggtagtgaatttcccgtcacatgtaagctcctcagtgtggtgctggtgtctaagttcccccgggttagaatccacatctcatcccactataaccagctatcccctataaccagctatccctgagttgctgttgatctttctgttgccatctctcccttctcacaccacacacccgccaggctgctgtgtatttctttcttctgcagggttgagaccaagtcgcagggctgtccctggggtatgactacccagatcaggagctacatactggagctgatggaccacttaaacatcatgtaccagacccctgggaaaaaggggacctatagcatccactccaaccgtttcctattaagacagagaaagatgaactaagacatctattagcagctcacaaagatgatagaaattaagatttgaatggctattccaagaacttagtgcttctgttttccaatgcctatcaaaaacaacaacatttcagaatgactaggcaacccaagggttacacacagtgcagaagtcatggggtatttggtggggtagcctggtcaggacagactgttttctgtctgtcactaactgtatgtccaatgaattggaacttctgaccaggagaagggacctctgggtcgggccaggtgagtgggaatgtccatgagtcagatgaggttataaaaagtttggggagcttttgagaaaaacaatctactgaaaagaaagcatagagtaactctaaagagtgtgatctctggcttcattcggcccagctgacgtcctctctcagctctgtgcttactattgacatgatcttgggaaagttctcatctggcctccatgggcctcagcactgtcatcagtaaaatcgggctggtcaaatccctacctcacagggctattgtaaggattactaatgcttacaaagcacttagcacagctaactccacataggaagtgctcataaagttacagttatctgcttaaaaaaaaaagccacaaaagggcatgtgacaggctaatcatcctgttagaaagcatttgaggaaaagcagaagagaggaaatttcagagctagaaagggaactcaggatgcaattaccatgctgagaggatagttctgggaaactggaggtgtccagaatgaacaagaatatcagctggaggactcctctgtggaaagccaggagatgctggagacgctggatatgctggctaatctgcaagccctgagggaagcattttcacctgtggtggaaggaagccctgagataacaagcaaaaacaaaaagctcagctgtttctctaagaactaggaaattaaaggcaaaaactcaagcatgggcagcagttggaggcaccagcaggagccacaggcacggtcagagccgggctcaggaagggctcgctgatggcaagggaaaggcaatgaaagcaccctgggaagaggctgttttgtgctctaagtttatgccaaaccaaatgcaaagacaaatctgaaaagtcacccagcttcaacttctaattttccatatgaagaaaccaagaccctttaaagaggagtaattgtgcagtggttggctatgcatgaacgtgttgggacaaatgcatgtatgtggccactgcaatagacagggtgctggacaggacaggtaaactgaggaaaacctgtgcacctgcagaagagagttttagaaggaaaatccacctcatcaaccttttagtatcgtcatcctggcaagaaaaaataacgggggttagtggcagtaggaaaatgtaaggcaaatgaaatcttcggtttgggggctacttgggggaacatgtattccgtaaccccaaatataccttctatttatagcagaagttgaaagcccaaatgcctttaaggtaaggtaaatatgtgaaccagaagagtgcagggcagctgggtgtggtacagaccagcaaatgggaagggtggaagcgccacataaaggaattcacattcaattttttaaaaacactggccttgccaaaggaaacgcagaagctggctccatttccacatcagcagtttgcaaacactgttctgtacagtgttaacatgtaaaaccaccattaaacacagtgttaaaacatcattaaacatcatactaaaatataaaacatcattaaacacagtgttaaagtatcttcaatggtttaaggctaaatgaaacatatttagtctaaaaaggcctgtgaaaagtcagtttcattttaaaagagatcccagttgagtgggaaatgaaaagtcctgacatttttccatctacatattggtaaaaggaacattttagcacttatatgagatggtttctatctcttccttgaaaaaaaaaaaaaaggagatgatatcctttacttccagcaccaagcatagggtttaaaacattgtattaatggtacctaaatgtttattgagtgaataaataggatttcaaatagaacaaagcactggtcagagacagaacaataaccgagtatcttttgaggttgtaaaatgaagggggtggatcgccagctctaagtctcctcttcttctttgggatttatttttaacccccaacatctttgtacacagccatggacttcagtcttatgacctccctcatctggttgactccagtagagatcagagaacataggcagcctcccaaggacagtttattgcagaactcacttcctgccaggtgcagtggctcacgcctgtaatcccagcactttggaaggccgaggcggatggatcacctggggtcaggagttcaagaccagcctctccaacatggtgaaaccccgtctctaccaaaaaatacaagttagctgggtgtggtggcgccagcctgtaatcccagctactcgggatgctgaggcaggagaatcacttgaacccagaaggcagaggttgcagtgagctgagattgcaccactgcactccagcctgggcgacagagtgagaatctatctcaaaaaaamaaacaaacaagcaaaaaacctcacttcctaagtggtatccaagcagacttagttctctgggaatggggcaaagaaacttcagggagcatgctgatgatccatctaactccctaacttcgtggttcttgagaacaaagaggggacacccacctcacagagttgtgtggggtaaataatgttgtgtaagtaaaaggcttagtgccttttacatacatggtggatattatcatctattatggaaataagtgaataattttttaaatggacctaattgggggtgggggcatgggatagttaggacaacaaattgagaggcccagaaaaaacaaaaatattttgacagcacctataaatcattctggaaaagctgggagtcgataatttttttaaaaaacgaaaattccctacgttcgagtacaaatccttttatatacatctatacacttaggtatgcataaaattcctctggaagaacggttaacaggcaatagtggttacctccagggaggggacttgatctgcaacagcagctggggaaaggcttctaaattttttttgccatgttttttcttggagaaataaagattaaaaaagtaaaatttttgccatgtgtctatattacctattaaaaattcataattcacttctaaatttaatgctactagtttaaaatttctcccaagttttgccacattttgaggaaactgaaattgggaacgtcggctttcagcctttattgagtgttagagtgcttataccgcctcctagtgccagatacccacgactgcggctgctccctgcagccaccgcggggctcactctagacctgttcatctcaccagtgctcaccaggtgaataccttaactagttaacgcattaactaactaaactgttacctattcggatactccaatgccttcaaggtgttttttttttttaatctaggtactgtgaagaatgactttacctcatgcctcattcttgctgaccccagatcacagttgggggtggaggagccaatgaaataatagatcacttgaataacagtatatcctttcaccttttcatttctttttccattttaaacttgacatacttagaagcaaaaggacatttttactttctcagttgtatttcaaacacatgtcactttagccgttaaatttgtattaattcatcaggtgttgcagtaactttcttctctgcatgtgttgaaatggaggttgtttgtccacatacagaatttttttacatgcttttatttgggtaaaattttctgaactgtgtttcagatatttcattgttctgtaggctatttactgtcatactgtacatttttttttcttttgagacagagtttcactctttttgcccaggctggagtgcaatggcacaatctcggctcactgcaacctctgcccccagggttcaagcgattctcctgcctcagcctcccgagtagctgggattacaggcgcctgccaccatgcccggctaatttttgtatttttagcagagacgggggtttcaccatgttggccaggctggtctcgaactcctgacttcaggtgatccacccgcctcaccctcccaaagtgctaggattactggcatgagccaccgtgcaggccatgctgtacattttttaaagtaatgtttttattattttaaaatcaatgtattctcattataaaaatattttggaaaatacagtgaaacatgaagaataaaataaaacaagccttaattccgccatcaataggtaactactgttaacatctctattccctccagttcttctaatgtctatgtttttatatcgttttcatgctgaattttgaagtcttcaaagtacatttctgcttccatttataaatgttaaaagtctgtccttgttaaatattacaaacatattcttattagaaactactgtgttattagaaactgcaaggcatgtttgggtataggggtagaaggtcattttgaacatacccgccaattcagggttagtattggactcctctactaaagccgcatttgtgtcccgttatactggatgtatatcacacaggagatcacactccaggctgaagatcttccaggacttcatcccctgattccataatcttgacgccttggcctttgacaaatatctgagcatcgaatggacttctcagaggcctctctggcagcctaagtgggccatggtgcatgatcccaggtgagcgagaggacggtcagggtcggggcaaaagtgcaagaggcaaaagggacgctaggcaggtttgaaatctgagcgagtggcaacctcgctttttcttatcttacttttcggtggttccacccatttgggtgaacaatctggattacctccttggcaggccaggttcccaacaggaggcgggcctgatgaagggctggtgggcgtgttcccgcccaaggtccgtgttggcccgcgcggtggctgggaggccctccccacgcccaactgcgggtataaagaggcaggctgcggactcggagcagctcggggctgcgcagcgggaaggctcgcctagtcggtccgcatccgtgtcgaccacctgtctggacaccacgaagatgccacccgttgggggcaaaaaggccaagaaggtgagtctccaggggacccgagggcgctctccttcccctcccacctgctctgtatcccagcctytgggagcgcagaggggccctcggaccctgcctggtacccatcatcctcctactccctcccctccctcagcctcagaccagaatgtgcttccagaacttctccagcaggaccccaaggcgcctctgagcctccccactcctgccccacgttcagmgcgcgcccccagagcgcctctgtcccctccagccccagcccagcttggaccagagtgcgccccagatctatgtgatccttgcctctcagacccaaaggcaccctctgagccctccctgacggctgggtgtccccagaactccgagccttccaatatcttctgaatctggcaccccaagaccagaaaactccctagagatactgctcctagccccgcaggcgcgatatcccgtccccacggagcccctccgcatctgtgtccgaggccgccgcgagcgccctctgcacccggcgcgcccagaacagggaggagtgcacggcgctggctccgacatttcccgcctggatctgcaccgcgggtgtcggggccgcctccccgccgggttctcgctgcacccaaggcccaggcgctggttgggtgattgcagattttcacaggcaatttgatgtccgtgatgacagaaaaatgtcatcygaaatgtcagcctcgaaaacatggtttaagaaaaaatgggcagagtggctgtaagatactgaggaagggctgttgatgaaattgtaaaacccaattccagctccagatgaacaagtccatctcttggctatcccagtggcttgttgggaggggtattttcagtccagacggtaggccttcctctaatttggggaacggatggatagatggactgactgccgtggaatgagactggacaggtgggaagagagagagaaggatggagggaggagagaataaacttgaccttttggtcaaatgcccagtcccaggcctggcacgacagaggcccccggaaaatggtagggaggcagatggggccaggccaactgtatcctctgggctgtaaggacagtgagaaaggtccagctctcatcccagtgcctgccctgctggagaaccagctgaggtgtgcccagtttctaaagggatggcctcccaaatcaaaaagacctctacacaaggaagaaggtcaattcggttacagattctaaatgcagcatcgtggatgcatgttgatggcatgagtgggtgttgagatggcaaaggactatggactatcaccagtcaaaggagggtgagaatttygccagtccctaaatgtactaaatgaatagtccacagagactgggaaggatgattcctatagatatagatattttttgtttgtccccattctcatagccacgtaagtctaacttattccccaaactcaaactcagaaaatctaacattttaaagaattatctttgtagaattatctaagcaacagatgaatgtaagatggaaaaaacagtttcctagtaacttgtttccgtgcatatgtcagtgttaaaacaatatatggacaataacatgtctacacatttgagtttaaaattaaaataaatgttacaaagtttgcacatgttcattataaacaaygagggaaagcacaaagaacagtgcctgttaaattctggtgtatattctgctagtttgttgttgaggcaaatatgcacttcttagacaaaaatgggctgatattacatatactgttttgtaatactttttcacaaaayggtatatttttttcatagcacattccaccttttaaaaagtctgtttagcttgggaacagaaaatcctgaagtctagataattttaaaatgcaatagaatgtaagagatcatatttccagaggtaaccactcaacaagtgcatgagccacatagtaattgaatcgccactacccaccctgccacccagcatcagatccttagctatgctgcacattaaaatgctgtggtactaaaatttgaaaacacacacgttcaatgggagctgctaactgcccaaatgtcatgaattattttatccaaataaaagttagtagcaagtcatatctcatttaagtgacccttgttatgttttttatgtaactgtgctggcagtagtatatatatatatatatttatatatatgtatacatatatatattattgttgttgttaattaggtcataatcaaagttgyagttttcagatgtgacatttagatacattgcaatcatgacaaatatttggatttcaaaatgacgtgtgagccatttatatttttgttgtgctttgttatcttatgggctcccataagataacaaggcttcaacactatggcttgaaaatgttttgatctgaaaggtatattagggaacacacagcataatcctaccactttgcttctgtctggtgaaatgtcaattgtttcctctctctgagcaccagctgtccaaatggcatgggaaggggcagtggaggggaagagaatgaaaatgagggaggttctaagaaggtggcaaggaattgggatgcaaaatcctgtgactgcctctcacagatttctggaatcttgttattatgtcagcttttgttttatccactgttattggtagtaagtggaacacactgggtaaatacgtcccaagttattcctttacactatacagtttttttcagggctgtcccaccacccccaatcccatttgaaatcaaatatagatgttatttaagcataaaagagtcaggaagccctatgctccccatctggaaaaccatgtataaattactcagggactctgggtcttaatttctcatttgtgaaatgagagagagatctcaattgaattgagtactatttatttttaaagtctatgattctttgaaattacaaaaaatctattaaactagagaattactttgtaattcacaaaaccctttcaaaatacttaattccaaagttatccatagaacaacaccagggtgattactgcacagtattgtaaatggaataagtatggagattgggctgaaaaatcattcaacaaatactttagttgtctcttccttgttctcatcatagagtacagcatgtgcacactcataacctggactgtatagcatagctactgttgtggaaactgaattttaacaccaaagatagaagtctttgagtgatttggccaccttttcagtcttaaaataaaatggcttaatagcattgctgggcactgtggcacgagcctgtagttttggctgctggggagggtgagactggaggatcttctgagcccaggagttcaagttcctctgggcacatagtgagatgctgtctctaagaaaaaaaaaaaaaaatagcattctatgccatttcaacttctttaacaattttttaaccctctctttagtttgttgatagagtaagrctagtatttaccattttaagaatctgtgcttaagtgcagatttgaggctttacaacaaaatcttttcatttaatccctcagcagacagttcttcaaacacacctcccayggtgttcttcaaatactctttaacgtgttaagaaagacccccccacccacagcacatacaaaggaatacacaaatgtttattttatgagcattctggttgtttgtcttatagatagccataaatgtatatataaaatatacatttttctctgaaaattctaaaataaccacacatctccaagaatatgttagcaaaagtaataaaaatagaaaattatcttaaacactcaagtaactccttttcctccctcatctgtaattttagggcatcctagaacgtttaaatgctggagagattgtgattggagatggagggtttgtctttgcactggagaagaggggctacgtaaaggcaggaccctggactcctgaagctgctgtggagcacccagaagcaggttggtgcagagctctattgtaagttctcataaaggagccgggtgtggaggctcatgcctgtaatcccagcaactcaggaggctgaggtgggaagaccasttgagcccaggagttcaagaccagcctgggcacatagggagacctagtctctcagaagttttttaaaaattagctggacatggtggtgcactcctgtagtcccagctacttgggaggctgaggcaggaggatcgcttgagctattttatgcaaatgattttgtgtatctgcagcgcttttgtaatttagactgagtggtagctagaattgatggaaacccctgaagagtcttcctgcaagctggacttcacctgcaacatttttatatatctcatgcctgggcctgactttttcatgttctgggcaaaaagaaaggagtggttatgctacaggcccacaatcccctgtccaaaccacattttggggtcaaacatatcttggaatccaggaatctggggatgttagaaagttaatacagtacaaatgtagcatattatgtaacactcccaatgggccctgaagcagctcccattgaaacacattaatacatttttgcatcaaaatacatgactacccttactaattgaaacatgtttatcaataccttcatgttggttcaggtcatattttgcccccaaatggttttgctgcaaacttacccaactgaagaaatacttcagaattttatttgaccttttagagtttgctgtggaattttaaaaacttgcatttctcaagctaaatctataaggctaatctccaactatgccatgtacatatataatcatgtatcaatgtacatttagcttctatgattttaaaataagtaatataatgaggagttaaggccataaaatgaaggtaatcaattagtataagcgacgtcattgagtaaaagggactagccctattgtattatgggttagagtaggaaccttgtggtcaggaaaaagtaggtgaaaggatactcaaattaccagcctcattctcttgctaaagtttatgcccaaagttatggttcttgcacccagtggaagcagctttaattcagcaatgaattcaggttatcggggtctggaagagtttgaggaatctgcctttctgataattgcccccaggtgactctaagatggatcatacttagagaatcactgcagttttagaagcatgatgaataatcaagagtgaggagttgtcttcaactgtttgggatcactgccctgtggaaaaatctgataaaattttatagaccttctgcactgtaaaatgtatttatacataacaatttgcacacatttccagggtttttttcatgaaacctctggaactccacccaaggaccatgtgagtggacttcgtagttataaaccatttattcctagtgtccagaaacctagtatataggcctttcagccctctccagccacagcagctctgggtttatctgattgatatatggaactccctatatttttcattggttctgttattaattaaaacaagtttgaagcccgctaatttagggatgcttttgaggtcccactgagaactttctatgatttaaaaaatcatggaaaatctttggctacaagcttacaaatgcattttctaaaatttaaaagcttttttcacttgtgtattcatctctttaaaaacaaaaaccaaggtttctatgttccagttactctactctactagtcgtctgggagacaagagatgagtatagactcatctccagcgtyagcgctgagagctaagaacttcagtgtcctagtaatttcctagcctgtcatatagttgctcctggacctttggatttcataaacctctgaaatttcaaaataattttcagragctgatatattaatagcatgctgatttcttactttgcccagttaattctcctaacgaaaacaaccaagtttttgtgaaatccaagtttcacagtcattttataaaaggagtttttttccactatcttacaatggcagtttttgacaaggctgaaaacaaagatgggttggggaaacttaaaaaaaaagatgcctatgcctcactccaaaccatttaagtcagaatatctgtggatttgacattccaatccgtaattttaatttgcaggggatctaatgggcaaccacagcttaggacagctattttaaaacaaatgataatttcttaaactgaatacttttagctatatggggaaaaaatcccaccatatttcctccagctgataaaactttgccatttggaggcctcacgcctgtaatcctagcactttgggaggctgaggtgggcggatcacttgaggtcagtagttcaagaccatcctggccaacatggcgaaaccctgcctctactaaaaatacaaaaaaattaccaggcgtggtggcaggtgcctgtagtcccagctacttggraggctgaggcaggagaattgcttgaacccaggaagcagaggttgcastgagccaagatcacgccactacactccagcctgggtgacagaatgagactccatctcaaaaaacaaacaaacaaacaaacaaacaaacaaactttgccatttggyattcatccatggaactgtgcttggaaatcttgctccaattcttatttcaccatgctaccagaattatcttttgaaaacactgtattaattacatcatccagttgcttaaaaactatatatttccctgattcatcaactccagccactcaaggtacttgtcattcccccaaatgccatgcctgttcccgctttattatctttgctcaggctattctctctggatggaattcccttccccaccttctctgcctggcagtagcattgaattcttccaagtgcagctcaaatgattcctcatctttggacctccttcgcccccttgccccatgtcctgggtagaaatgatcccttcttcctgcatagcccaaccatgcagtgctgtagtcagttatttctggacagactgtgaagttgtccaaagacagaataatggattgtttatccttgtgtccatgggtgccatccacaaatacagtcaatgaatgataaacaaaataaacaatgaacaagatgagcaaatacaggaatatgagcaccccctgcccacccattcatctagtcatagcaggttcacaggagtttccaagagacttcagatctacctctcatctacccctaagatgtgcaaatgtcaagcaaccagaaattcaagcagttgttttcctgcttgtttatctgagagccatttgaaaatatcgtgtgttaataaacagaaattatacctttcctcattcactctcccagttcgccagcttcatcgagagttcctcagagctggctcaaacgtcatgcagaccttyaccttctatgcgagtgaagacaagctggagaacaggggcaactatgtcttagagaagatatctgtgagtaaaaccagccgtgggacttttagaaggatattgtcgacctattgcatcaacaaagctcccatagagaaaagggttcaacctcttcagagttttgttttatttctaataatacaaaaatgagaggcgtgaataacaaccttaggttttatttagctggaatccccaaaattaacaaagaggcatttagcgaagcagatgaagaagaggtatttaatgattaatgattctcccagtctcttgactaagttgctgagtaaattgggcaaccttacaaattctttcgtccttaatgtttttaaatgtagcatggctagaggaaagatcataggcataataaatcagtaaacctggaatagtgcctgactcaagcatgtctactttgtgatgttgaaccaacccctttaccccatcaaggctgaggtttccaaaattccacgagtgtacagtgctaggtttggggagctttttgtttgttgagcataacaaacaacttttaaagtctaaataattagaaaagaccttattagttatgcatgtatctgttaattgagaatatacatacaaaaacatcctgaattctacaggtatttaaatttaattttaatcttctcaatcataaaagcaaatcatcatcaccaccactactatttgttaggtactcttctaagtgcatctcaggcactggaagataccagataacatccttcaatgtaaaaacttttaccatctcacacatctttggtacaatgtaatgtcatatatatatttattgttactatcactattattagtgttattgttatggcaaactgttcaacttggtaaagctttgaactattccataacagtcattttctggaataagatactattgtaaatatacaactaagatgtgaatgtttgaataataattttatttcaatttcacatgaaaatttagatgtctcatatactcacccattttaggggcaggaagtcaatgaagctgcttgcgacatcgcccgacaagtggctgatgaaggagatgctttggtagcaggaggagtgagtcagacaccttcataccttagctgcaagagtgaaactgaagtcaaaaaagtatttctgcaacagttagaggtctttatgaagaagaacgtggacttcttgattgcagaggtaaagaaagatgtggtgaaagataagacaaatacacctagtacattttctntaccttttgctttcaagagtactgtgtggggttaggtgacaatcataactagcaatagtaatatttagtttttgaaatcgttttccaattcagggctactactaaatttgatttaattaatctgatatggtgtttttcaaactttttgactgcaatttacagtaagaaatcattctatttcattttaaaaatgctaatgggtcacaattcaaagtttgaaaacagtaataatgaagtttttaagcaatagaatacattttcaaattgttttgggaaaggctgggcacggtggctcacacctgtaatcccagcactttgggaggccaaggcgtgtggatcacgaggtcaggagtttgagaacagcctggccaacatggtgaaaccccrtctctactaaaaatacaaaaattagccaggcgtggtggcgggcgcctgtaatcccagctacttgrgasgcggaggcaggagaattgcttgaaactsggaggcaaatgttgcagygagccgaaatcgcaccacagcactccagcctgggtgaaagagcaaaactccgtctcaaaaaaaaaaaaaaaattgttttgggagaaacgagattaaaagtactctaaccttaactgattccagtattttgaacacgttgaagaagctgtgtgggcagttgaaaccttgatagcatccggtaaacctgtggcagcaaccatgtgcattggcccagaaggagatttgcatggcgtgccccccggcgagtgtgcagtgcgcctggtgaaagcaggtgatgatagatttcaatcagtttgtgattagtaagtcttaaaagaacacactagtgcacatctgtctacaaatcagtgtatactactttcgttaacataaaaaccattaatttatttttgtaagaatattgatattattgaatcccagaggaaaagttttaaaaatggctgggcgcggtggctgacgcctgtaatcccagcactttgggaggcagagacgggtggatcatgaggtcaggagatcgagaccatcccggctaacacagtgaaaccccacctctactaaaaaatacaaaaaattagccgggactggtggcgggcgcctgtagtcccagctactcgggaggctgaggcaggagaatggcgtgaacccgggaggcggagcttgcagtgagccgagattgcgccactgcactccagcctgggcgaaagagcgagattccgtctcaataaaaaaaaaaaaaaaaaagaatatcctcagtctatagtttccaatcatcgagaatgttaatagggttctgtggttaaatacatttagaaaatgctgtgttaaaccaaattaagcagatatcttgttttgttttgttttttgagacggagtcttgtcacactgcagcccaggctggagtgcaatggcgcaatcttggctcactgcaatctccgcctcccaggttcaagcgattctcctgcctcagcctcccgagtagctgggattatgggcacccgccaccatgcctggctaattttttgtattttttagtagagacggggtttcactatttggtcaggctggtctcgaactcctgacctcgtgatccacccgcctcggcctcccaaagtgctgggattacaggtgtgagccattgcgcccggccttaggcagatatctttactgtggaacttatcaatatctttgatatgttcacatatattcctagtctccaagaaggtgatgtggtgaacagctacttcctaacttaattgatcatggaacattattttcatggaccaaaccttggaaaaccctgtgctaaattataaaattgttgatgtcaggaacaatgtcctttatttctacttctctataatctcttgcaaggaggcttacacctaaaagacatccaataaatagccaacatattattaatttattaatakaatgaagttaattaagcaaggaaagagaaactctggcagcacaacatccaaaaaaaaagggtagccaaaratcttcaacagcttatagcttagttgatatcaatgatcttcccacttggttccagacttggatattgtggatatatatacttgtgagtatatgtatacacaatctgatgaatatatatatataaaatatataagtatatgtatatatacacacacatattctggctacataggtatacacacacatacaagtatatttacttctggatacttgcatatatccacaatattcaaatctggagcccaatgggaaggtcagggtaagagagaggaatatgggagagacctggatatagatggtattgaaagcctaggacagaaaaggaagtttaaatggggaagaaaagatgaatcagtgcaatcttggaacactccagttgagagttttagccttgaggaggagacagcacagaacatgaagacatttttaaaaagaatattaaacaggacatttattaaaataataaaccagcaaagtagaaacaatacttggacagtgtgtgggaagttgcagaagccaagagaaggggagtgtcaatgaaggaggaagttgtccactaggttgcatactgctgagagcttcagtgagatgagaacagagaagcagctgctggatttggcaaggttgaggtcattggtaaccttaacaaaagctgtttcagaggaatgaaggggagtgaggcctacttggaacaagaatgaagagcaaactgcagacccagcccagcaacagcaaagacacctgccactcaccactggattccatgggttgtggcaccagctctgctgctcctgggagctgaacactggggtcactcatcactcatgctgcatccagaaataatctctcttgctcttgttcttggtatctctatatacaaaatacaaaatcctaggccatgagtccatccaaaaaagtcctttttggttggttggttggttggttggttggttgggttggttggttttgagacagagtttttgctctgttgcccaggctggagtgcaatggcaccgtcttggctcactgtaacctccacctcctgggttcaagtgattctcctgcctcagcctcccaagtagctgggattacagatgtgtactaccacgtccagctaatttttgtacttttagtagagacggggtttcaccatgttggccaggctggtcttgaactcctgacctcaggtaatccacccgcctcagcctcgcaaagtgctaagattacaggcatgagctactgcacctggcccaaaaaagtcctttttgggggtggaaacaatctcagagttcatcaacaggtgaatggataaaacaaaatgtggtgtatccatacaatgaaatatcatgcagctataagaagaaatgaagttctcaaacatgccacaacagggatgaaccttggaaacatcatgctaagtaaactaagccactcacaaaatgacaaatatcatatgattttgtttatatgacatatctagaatgggcaaatccacagagacagaaagtagatttgaggttaccaggggctagcagaaggggaaaataaggagttagttcttaatgggtagagtttctctttggggtatcgaaaaaatgtggaaatagtgataatggttgcacaacattgtgaatataattaatgccacttaaaaatggctaaaatgcgccagatgcaggggctcatgcctacaatcccagcactttgggaggcaaaggtgtgaggatcgcttgaggccagaagttcaagaccagcctgggcaacataatgaggccttgtctctacaaaaaaataaaattttttaaaaaggttaaaatgcccagttttacatgatatatattttaccaccatttttaaaatgcaaaaaaaaaaaaaggaaagaaaagtcctatttgggaattcctcccactttgagaggagagagtaaaagaattataatgtcataatgccttctcaaatcttctggaggaggaaacttccaaaatcatgtctagtgattgccatggtaaatcatctgtggtccaaatatagttaagaacataatgactataaagaaagtttttgaagaaaatgaaatatctaaaacatagtttgttctcactaaatcaaacttcacagcaccaaattttacaagaatactgtaggaagacaatcccatatagttgtgagtctggggaggctgaaatgtaaattaaaagcttgtcaaaatgattgataggctagtaaccacattgagtagctgaagtcaaaggatttttgagattctttttccccaaactattaatcctagacacaaaattccttctagmaaacacgtgtctaaaaaacttttttctaaattacattctgctgctgtgcccaagaaggctaatgaacttattaagttggcctggtgaaaaggaatatttatttacacctcaagcaagcagtatggtaaacacaggtgtagtctagcagctgggagtgttgaaaaattattgtgcttgcaacataatgtccaacgttgaaagtttgactactaaaatttgaagtttaaaaaaattctaataatttttttttgaaaaaagatggatagggctgggcatggtggctcacacctgtaatcccagcactttgtgaggctgagctgggcgkatcacaaggtcaggagatggagaccatcctggccaacatggtgaaaccctgtctccactaaaaacacaaaaattagcctgtcgtggtggtgtgcgcctatagtcccagctactcaggaggctgaggcaggagaatcacttgaacccaggaagcagaggctgtggtgagctgagatcgtgccactgcactccagcctgggcaacagagcaagagtctgtgtctcagaaaaaaaaaaaaaaaaaaaagagatggacagccaaatgtgcacaaattacacttcaattataccagactcttcaaagcactttcacagaaagcacttcctgcctgctagtaatcattctcactcaaaggtaagaggtttgtggggaatgaggacctaatgctatgcttccagttcatcattccaattaaaagcttcctgctgggtgtggtggctcatgcctgtaatcccagcagtctgggaagctgttggatcacttgagctcaggagttcgagaccagcctgggcaacatggcgaaaccccatatctataaamaaacaaacaaacanacaaaaattagccagacgtggtggcacmcacttgtagtcacagcaacttgggaggctgaggtgggaggattgcttgatcacttgaggtggagactgcagtgagctgagatcacgctactgcactccagcctgggcaacagagtgagattgtgtctcaaaaaatgaaaaaanaacttcctgattcctgatgaagagaggagagctggccctgctggtttctggtgcatccctaagtctatcatgttcttcccactcacaggagcatccatcattggtgtgaactgccactkkgaccccaccattagtttaaaaacagtgaagctcatgaaggagggcttggaggctgcccractgaaagctcacctgatgagccagcccttggcttaccacactcctgactgcaacaagcagggattcatcgatctyccagaattcccatttggtaagaccaacatttgatgaatcatctcaatatcttcatttgatatgcatataaactcaagtaaatctatacccagagatcttttgtcatagtgaagagatggcttggtgtctcctcatgtcttgtccctggtttctgtccctgcagccaaaagccccttcgtattagagaagagcagaaggaaaggatggtcccagctagcaaaaaagatctctgaatttaaatataaaatctraggtgaatcagcatctaaacagacaactagtgagtcatactttggggttggtgaggatgcccttcatgggagaatcaacagatatttagttctagttccagctctgttgctaagtcctgtcaccttaggaaaatctttaaattcctctagctctcaaattctttattgggaaaataagatcagaccagttatctctaaggtccttttctccaatttttaatatggctcagctactccagagttttgggattgcaggcaagataccatcatcgagtgactgtatwacaagttttaatgaagagaccaagcagatgaagtgaggggatacttgcagtccaggcagaaggaaaaactttcccagcatgattgggaagagcgggtgggttgatctcacaaattaagccagagtggtcagcaggggcagagcatgcccagcctcctatttccttctaaggtctttacaccctatcctatattttatagggacccttagacaagtaagatattataaaatacaatcactctggaggagccacagaggaagaaaggcaaggcatttgtgttacttactgctgtataacacattaaattaatgcaaaatgtagtggcttgaaaaaccacttcttatctcacagtttctccaggtcaagaattcagggatagcataactaggtggttttggttcagggtctcctaagaggttggagtccggatatttgccagggctattatcacctgaaggcctgttgggagctgggggatctacttcctagctcacttaattggtttttgggagttagtgtcagtttcttgctgtctgttgactgggggcctcagttcctcagctcatgggccttttcactgtgatgctagaaaacatgcttgaaacatgtgatgcttgcaacatggcagctggctttccccagggtgagtgctccaagaaagtgcaaggcagaaaccatgatgttttgtatagcctagactctgaagtcacatgccagttctgccatattctatggatctcacagaccagccctgttataatgcaagaggggactgcacaagaagaaaaacatcaaagggcaggggtcatttggaacctcctgaaggctggataccacagcatgtaaaagtgaacatacaacacaaagtagcaaagttttttcttaaatgtaaaaattgaatattgaaaacaattcatttattgaaaattacatacttgtagctacttatcttgaatttttatgaaaagaatgtataatgcctaatggcataatgccacttattacaggactggaacccagagttgccaccagatgggatattcaaaaataygccagagaggcctacaacctgggggtcaggtacattggcgggtgctgtggatttgagccctaccacatcagggcaattgcagaggagctggccccagaaaggggctttttgccrccagcttcagaaaaacatggcagctggggaagtggtttggacatgcacaccaaaccctgggttagagcaaggtaagcatctttttactaacccaaactaatttagattatgaatatgttcaagtgaggccatttagaagactgcagcaaatttgttgtgtgatgatgaagaatcagtcatccccaaattctctcccagagatgtttacaaagcatccttattaggtgatttctggagattgttttaagaatatagaacgtatttgacctgattttggattttgaaaagaaaaagaaaaatttttttaaaaattgtttttaaatataggctgggtgcggtggctcgcgcctgtaatcccagcactttgggaggccaaggtaggaggattacttgatctcgggagtttgagaccagcatgagcaagatggcaaaactccatctctactaaaaatacaaaaaaaaaaaaaaattagctgggcatagtggtgcatgcctgtaatcacagctacttgggaggctgaggcacaagaattgcttgaacccgggaggcagaggttgcagtgagccaagatcacgccactgcactccagtttgggcaacagagtgagaccctgtttaaaaaaaaaaaaaaaaaaaaagaatatagcatgtaaataaacgtaagtggcaatgaaatgtgattttgtgctctagtaaagcaccattagtgtggtgcacaatactcttaaattgcattgatttttaagagttaaggaccacttaagtatagctaatactgattgttctatatcaagcatgattttcagagctgggaatacggtggcaaataagacaggcaaggtctttgccctcagagtttacattccaatggggaagatgaataatacactagtaaaaaaaaatgtatgtcaggcactgggaagggcagtaggaatatagaaatgagaagccgtggattagagactcacagtctactgggtaaaagaatacgaaagccaatgtattatactgtggtagctgctttagtagatgtatggatagaaaagtaacaagagaagagaatgactatctctgcctaacagaaagatattttaaaagaagggttttggggctggattttgaaggctcaataggctcctaccatatagagaactaggaagcgggtggaggacaggtgctccaaggagaggtagcagttccactctgttcagcagctattaacagagcacagctatctgtcagatgctgttgtggatgctgaggtagcaagctaaacaaggagctagcaatctagcaggcagaacgataagcaggtaatgtccaatgagtatagtaagtccaaggatgaagatgtgcataggtgtgcagggtctgagctaatgtcccaaggggcaaaaggcagagagagggtgaatgaaggatttctaagaaagctgatgcctgagttgaattctgmgagaggaattacattgctagaggaacagccctcaggaaagcactgagaagtggaaagagaatgacacattgagaaactggaagtttgagaatagcagagacagaatttggtgaaagacacctcccaggaggaggaggcagcctctttattcatgctcaggagttatgtaggaccccatcccaaaggcaaagaggagcctgggtggtctcaggtagcccagggcaaggttagattagcaagttagcaagttgtaatcgccatgtgaggaagacttgctaggagggacagcagacaggttgaggcctgagctagaaggaagcaaaggaaatagaagggcagaagtggagcctgcagagtgagaggtgcagaagttatccagggtttggggaagaataaccaaggtgaactcagctggctcatgaggatgtgaggaaggacaggtagtgtaagtggaatagacagtactcctatcccaaattttccctgtacatatattaaaagaagaaattcaaggtgggcatagtgactcacacctgtaatcccagcactttgggaagccgaggcaggcgaatcacttgagctcaggagtttgagaccagcctgggcaacatggcgaaaccctgtctctacaaaaagtacaaaaattagctgtactaattttgtacctatgtggtggcataggcctataatcccagctactcaaaaggctgaggcagaagaatcacttgaacctgggaggcgggggttgcagtgagccaagatcgtaccactgcactccagacagggtgacagagtaagaccctgtctcaaaaaagaaattcaaagtaactttagacttacagattgaggggagggggtggaatttttagtccagattaatgtgtgttttaatggatgcactctgagaatccaaagatggctccctcaatgtgcactcataacagaacaagaaatcacatcagtttttacatcaaagggcaccttctatgacaaaaaccattgttaatgaggcagatgcctctggaggaaacactgtaaaaagccttccagcagaatggaccgcttcccagtccctcaactgcttctgatgtttcttctcatctacaaaagtaaaatacagtgtacagtaaccttttaatcaaaacacagcatcatggatggagacaaagcctgttgctgatggttgttgctgttcagcagctgacacgggtattctagtgatgctactgtgctgcttagttaccctgagcacatgattttttcactgtgttaatggtatgtcatacttttcctgttaagtattaatgtgtggataagtgtaagcaaatgattgtttatcagtagcatataaattcgtagtcaggaatcatggtgaagccaaacaaccacagactgcccacacaggtggctgagattgacacctttgctttttaatgtctgataggcaactttgtgtgctgcrtgaaattatttaaaatattatataatttttaaatggttccatgatataaagaccaaagctaggggaggagtctgttgtctggtgtcatgtgttttgttcacacagggccaggaaggaatactgggagaatcttcggatagcctcaggccggccatacaacccttcaatgtcaaagccagatggctggggagtgaccaaaggaacagccgagctgatgcagcagaaagaagccacaactgagcagcagctgaaagagctctttgaaaaacaaaaattcaaatcacagtagcctcgatagaagctatttttgatgaatttctaggtgtttgggtcacagttcctacaaatacggaaaagggggttaaaaagcagtgctttcatgaatgccatcctacacatattattgctattacctgaacaaaatagaattacaaatannnnnnnnnnnnnnnnnnnnnnnnnnnnnnnnnnnnnnnnnnnnnnnnnnnnnnnnnnnnnnnnnnnnnnnnnnnnnnnnnnnnnnnnnnnnnnnnnnnnnnnnnnnnnnnnnnnnnnnnnnnnnnnnnnnnnnnnnnnnnnnnnnnnnnnnnnnnnnnnnnnnnnnnnnnnnnnnnnnnnnnnnnnnnnnnnnnnnnnnnnnnnnnnnnnnnnnnnnnnnnnnnnnnnnnnnnnnnnnnnnnnnnnnnnnnnnnnnnnnnnnnnnnnnnnnnnnnnnnnnnnnnnnnnnnnnnnnnnnnnnnnnnnnnnnnnnnnnnnnnnnnnnnnnnnnnnnnnnnnnnnnnnnnnnnnnnnnnnnnnnnnnnnnnnnnnnnnnnnnnnnnnnnnnnnnnnnnnnnnnnnnnnnnnnnnnnnnnnnnnnnnnnnnnnnnnnnnnnnnnnnnnnnnnnnnnnnnnnnnnnnnnnnnnnnnnnnnnnnnnnnnnnnnnnnnnnnnnnnnnnnnnnnnnnnnnnnnnnnnnnnnnnnnnnnnnnnnnnnnnnnnnnnnnnnnnnnnnnnnnnnnnnnnnnnnnnnnnnnnnnnnnnnnnnnnnnnnnnnnnnnnnnnnnnnnnnnnnnnnnnnnnnnnnnnnnnnnnnnnnnnnnnnnnnnnnnnnnnnnnnnnnnnnnnnnnnnnnnnnnnnnnnnnnnnnnnnnnnnnnnnnnnnnnnnnnnnnnnnnnnnnnnnnnnnnnnnnnnnnnnnnnnnnnnnnnnnnnnnnnnnnnnnnnnnnnnnnnnnnnnnnnnnnnnnnnnnnnnnnnnnnnnnnnnnnnnnnnnnnnnnnnnnnnnnnnnnnnnnnnnnnnnnnnnnnnnnnnnnnnnnnnnnnnnnnnnnnnnnnnnnnnnnnnnnnnnnnnnnnnnnnnnnnnnnnnnnnnnnnnnnnnnnnnnnnnnnnnnnnnnnnnnnnnnnnnnnnnnnnnnnnnnnnnnnnnnnnnnnnnnnnnnnnnnnnnnnnnnnnnnnnnnnnnnnnnnnnnnnnnnnnnnnnnnnnnnnnnnnnnnnnnnnnnnnnnnnnnnnnnnnnnnnnnnnnnnnnnnnnnnnnnnnnnnnnnnnnnnnnnnnnnnnnnnnnnnnnnnnnnnnnnnnnnnnnnnnnnnnnnnnnnnnnnnnnnnnnnnnnnnnnnnnnnnnnnnnnnnnnnnnnnnnnnnnnnnnnnnnnnnnnnnnnnnnnnnnnnnnnnnnnnnnnnnnnnnnnnnnnnnnnnnnnnnnnnnnnnnnnnnnnnnnnnnnnnnnnnnnnnnnnnnnnnnnnnnnnnnnnnnnnnnnnnnnnnnnnnnnnnnnnnnnnngatggttgccgggtctgtgtggatagaagtagacatgggagacttttcattttgttctgtactaagaaaaattcttctgccttgggatcctgttgttctgtgaccttatccccaaccctgtgctctctgaaacatgtgctgtgtccactcagggttaaatggattaagggcggtgcaagatgtgctttgttaaacagatgcttgaaggcagcatgctcgttaagagtcatcaccactccctaatcttaagtacccagggacacaaacactgcggaaggccaaggccgcagggtcctctgcctaggaaaaccagagacctttgttcacttgtttatctgctgaccttccctccactattgtcctatgaccctgccaaatccccctctgcgagaaacacccaagaatgatcaataaaaaaaaaataaataaattaaaaaaaaaaaaaaaaaggaatcatggtgaagccaaacaaccacagactgcccacacaggtggctgagattgacacctttgctttttaatgtctgataggcaactttgtgtgctgcatgaaattatttaaaatattatataatttttaaatggttccatgatataaagaccaaagctaggggaggagtctgttgtstggtgtcatgtgttttgttcacacagggccaggaaggaatactgggagaatcttcggatagcctcaggccggccatacaacccttcaatgtcaaagccagatggctggggagtgaccaaaggaacagccgagctgatgcagcagaaagaagccacaactgagcagcagctgaaagagctctttgaaaaacaaaaattcaaatcacagtagcctcgatagaagctatttttgatgaatttctaggtgtttgggtcacagttcctacaaatacggaaaagggggttaaaaagcagtgctttcatgaatgccatcctacacatattattgctattacctgaacaaaatagaattacaaatagcacttgataattttaaagtatgttttagaaattttcttaggagcaaaataagtacaaagtaaatcttgaacaggttcactaagcacccaccctgtgaaaagtattatggaaatcactgcwgcacaggaaaagtaattcagatgttaatgccacttgaagaagttggtaggctagcaaagaggatgagacatgaactgtcataaaggactcagcaaccagccagggacagataaagcgctatggaaaggggcttccaagttcttttgaacatgacccttagtaacaaacacaatttatataatgacccagcaaaacacatcacatcttactgtcgaaattaaatgtgtgatccatcctagtattttctgttccattccttttcattctatttcatttataaaacatgctagttgagacttttcaaatggatttttatgacccactactgggtttggatccacagtttgaaaaatattgctacaagacacttaaggagaccatcctgtttaagtttattcttataagtaggtcagtcatatgagacctgatcaataaatatccaatacccagagtcctgctctcagagttcttctgtttcgtgacccacttttctaccagtaaaagacatagaccaatggggaggaggggaggagagatggatatttcagccctctccatcctagtcaacactggatccacctagtgcctctgggccataaggctgagcagagtgagcttgtattagttggtagcttttaaaaaatataataagaaaaaagtagagattctccaaactctagcctggtttcctagattgagaactatgatatttttctctgataatttaatatctactctcctacaaaagctcaagcctgaagatacaagactattagaagaaacatgactaccctcagtgtattagaaaagaggtyatgcagctttctaaacattattgaattgtttgagctgttttkaaattgtaattcttttcagctattaaaaagaagagcaatgagactatattgcttgtattttattcttatcctggttctacaatttgctaagtcttacatgaaacctctatacctcaatttcttcacctatttaaaagaaaaacctacttcacaagtatgctggaattttaaaggagcaggtggcagtatttaaaaggaaaagaggccctactggctctttctggagagccagtcagggaattctagaaaacaaaaataggccaggtgtggtggcttacgcctgtaatcccagcactttgggaggtggacggattacttgaggataggagttcaagaccagtttggccaacatggtgaaaccctgtctctactaaaaatacaaaaattagccaggtgtggtggcacacacctgtagtcccagctattcgggaggctgaggcatgagaatcacttgaacctgggaggcagaggctgcagtgagctgagattgcaccactgcactccagcctgggagacagagtgagactctgtcaaataaataaataaatggaaaggcaaagaaattgctagaattttgttactaagagttaataatccacccctaatccctcaatgcacagaaacagagccaaagcagcacaactttcagaggctgcatatggctagtggaaacaagagtgaactccacttgttttttgtttttttttttttttttttggcaaagttgttatctatcatttctcttatattctcaaaccaagctcagtatttaaagctttcactcacagatgacattttattggacttgctgttctattactgtgtaaaatgcatgttcctttaatattcttttcagagttttgttgccaccaaaatattataacctttaatcatttttatatccatcgttttttaaaatatttttctgaaaaggagctatggtaaagacattcttgaattaaattatatgtcaacactgcctcctagtggtatagttcatattttgaaattgtttttaaaatttcagtccctcctccaaacatgtgcattttatttccagaaatcttgttcattaagagagaaagctcatttaatacctaagagttgatttatgttaaatagacatttctcactggtaaatattttttatggactccgaaccagagggaccttagagatcaaaagtccaaactatccttttaaggataagattaccaaggcaggatgcaaagtcaggaagcacttctcactattccaaggctgtcaagaaagacggctttagcttagccttttgtaggaagggttggggaagctggggggcagtaccagaacagatggtccacaaaactaaggagtcatcctccagccaggaataaaataaaggtctttggcgttactcagagtaaacatgaactcactaaataaactgtttgcagtttgtactctgacacttctacacactgtagcaaaccacctttggataagacagccaagccaacgcagacccctaaaggaaacaagaactgcgcaggaatgaatcaagaacatccgttcccaacttctccagatgggggcagcaggtcgccagcaggaaatgcatgagtaaccttattttgtttgaacttaagttatttcatcaggctaagctctaacagttttggtcagttttttcttaagacatgtggatctttgaatcacatccaggacaacgcacccatcaagaaaagcctttaacaagtttgagtcaggaattaaaaaagaggaaggaagggagaaagggagggaaaaagggagggagaacgggagggaaggaaagaaaggagagagggagggagggaggagagaggcagggagggaggaaggagggcggggagggactgcaggagagcaggcaggcaggcaggctttatgcatctccaactagatccccattttccccagaaacgttttttttttttttccagccttcagcacactgaagggcttgagggctttacagactgttctcccaaatagcctccttgatagtcaataacatccactcagtcagtctggaacctcccacgtgttacctgccaggtcaaggaccctggctcttagataacaaaggaggaagaagtcaatttcaagagagaaaaataggacttatgaacggcttcagaaatagtatgcctggtgggatgttaaacgacagaattagagatagcaaggtataatatttctaaacatcttcaggaaggaatatttagtgtttgaacagaaaatgatgaaaggcaggcaaatgcaaagaattctcaaaaatggtaacaggaagggtaggatcctttggtaaaattggtgggagtgtggtgagagaaaggaatggccagaaaatgcttccggttttcaagcagctggaggcattctgttggcattggatagatgaaaaattaagatgatggaaaatgagagagacagatgtcatcatttatgctgctgtgagttacaggaataataccaaacaagtcatgtacagcaaaacagtaaaaacaggttaatttatatgccatgaaatcaaacgcatgatcattttaacttgtggttagatggttagatgtttacatttaaatttattaaagcttccaggctgggcacggtggctcacgcctataatcccagcagtttgggaggccaaggcaggcagatcacttgaggtcaggagttcaagactagcctgccaacatggtgaaaccccatctctactaaaaacgcaaaacttagctgggcgtagtggcaggcgcctgtaatcccagctacttgggaggctgaggcaggagaatcacttgaacttgggaggcggaggttgcagtgagccgagatcgcaccactgcactctagcttgggcaacaagagtgaaactccatctcaaaaaaataaataaataaaaataaaaataaataaatttatgaaagtttcctatgtaaatacttacatgaaatgtattaagggaaacatttcacttatttttaataaaaagatatttctctaaatgcctgaactatctttagcagtcatcacttgcatgcaaactgttaatgtacccttcagaaattattccagtttgttcttttgggcaggttcagtaagacctctgcttggccccattctgtggttatttgttccaatttactacatgatcttgaaaggaaaaagctgaatatctttttaaatagttcagactttttctcaagtcagcctggtcattcttccaattattctgacttaatgagattttactgttctttgcaaaagttaacgtcctaaacacctgaggtagcttagtggaattcacctatggctcaaaaacactagtggcacatagcagaaaaagcaaggaagacatttagaatcaagactttggggtgcaagtcctagctttgccccamctccctgcagaacattgggtaaatcaccccacttctctgtccttcaattttctcaactgtaggataacaagtttctaatgccttgctggaaaactccacagttgtttgcgatttgatgatataaataaataatagcctcatcattgtcaataaatatttactgaatgccacttggtggtatgtttccagcggactgaaattgttaattaattattcccctggctaaacagacagccgactaaaacaagtaacactgttcagagggcagggaaaatgttactaccctagactcagcctggtgctgaaaaatgaaaatgtcattcctccccacaggtactgttttctaaggagacttgggtctgtggtttttcatattatgaactgtttctattttcaaggttcagaattctttgtagatttgcataagctaaatattctaaaaatcatcaagtgagtaatttttggtttagagtccttcatctacctaggaagggagagagctggcttctcacattttgagaataggagagtggaatttgggagctagacacctcaggatttttttccttccatcaggccattctcagcagcttgatgactcccagatttctctctccagcctggactactccccagcattcaggcacatgatatcagcctggcctgtagacccaagccagcggtccgtggcccggaccctgtacctcaggccccaagccacttcccatggccattcaggcagatgccccaggtctggagcaggtcccacatggatcctggttgtcagaggcaccttcctcaaaattgtttacatcctcctccagtggctgagagcagccagggccagctgtgccatctaggaagggaaccccaagcctggaccagtcagcatgggacccagtcctcatttgtctccttctgagtgttcagtgaccctgtacatccccgtaccatgtccctcacacccaccccactcctggagtgaccaagtgccctaagaagcctaaggctttatgttggtcctggttccaggagggagccctggtgataggatggcttctgctggcaggaactgtattttatcccaagatctggtgagattgggctacccagtatggtgctgacactctgattttggctgactcacatcagacacaggacaagttcaggacctttgccccttgccttgagcagtgaacgtaggccttcattggctctcacctgtgagggttctgactgcagcaatacctatggtctgcagcactcaagcgtaaacaagaatctaacataaaatgaattattgacacttcatgtatatatatatatatatgaatatatattcatatatatgaatatatatgaatatatattcatatatatgaatatatatgaatatacatatgaatatatatatgaatatacatatatgaatatatatattatatacgaatatatatatgaatatatacgaatatatatacgaatatataaacgaatatatacgaatatatatacacgaatacatatacgaatatatatatacgaatacatatacgaatatatatatacgaatacatatacgaatacatatacgaatatatatatacgaatacatatacgaatatatatatgaatatatacgaatatatatatgaatatatacgaatatatatatgaatatatacgaatatatacgaatatatacgaatatatgtgaatatatacgaatatatgtgaatatatatgaatatatgtgaatatatatgaatatatatgaatatatgtgaatatatatgaatatatatgaatatatgaatatatatgaatatatataagaatatatatacgaatatatgtatgaatatatgaatatacatatgaatatacatatatgaatatacatatgaatatacatatatgaatatacatatgaatatacatatatacgaatatacatatgaatatacatacgaatatacatatgaatatacatacgaatatacatgaatatacatacgaatatatatgaatatacatacgaatatatatacgaatatacatatacgaatatatatacgaatatatatacgaatatatgtgaatatatatacaaatatatgtgaatatatatacgaatatatatatgaatatatgtgtatatatatgtgaatatatatgtgaatatatatgagaatatatatgtgaatatatatgtgaatatatatgtgaatatatatgagaatatatatgtgaatatatatgtgaatatatatgtgaatatatatgtgaatatatatgtgaatatatatgtgaatatatatgaatatatatgtgaatatatatgaatatatatgaatatatgtatatatatgaatatatgtatatatatgaatatatatgaatatgtatatgaatatatatgaatatgtatatgaatatatatgactatgtatatgaatatatatattggtatagatatagatatatatgttagtttgagacagtcgttctgtcacccaggctggagtgcagtagtatgagttcaagcaatcctcccatctcagcttcccaagtagctgggactacaagtgcacacaaccaagctgggatgatttttgt

SEQ ID NO: 94843 - DNA, 40829 bp, Homo sapiens
  misc_feature (1)...(40829): n = A,T,C or G
cggagtctcactggtctctgtttgcactacaggcagctcgaaactgtttggtaaacgatcaaggagttgttaaagtatctgatttcggcctgtccaggtgagtgtggctttttcatctttccctccagaagtaaaaatagcacagtatgaaacatgggtaggtgttacagttttaatcctctccttttcttttttttctcattctagcgttttctgccgatctttctattctttttcttcctctgagttatttaagccacctctttcatccttttgttttattgtcatatccctttccttcctttctccctttatctctacctcctcttttttaaatctatttccccaataccttatcttgatctattaatcctgatgactttactccattcctccttctttcttaatcagtctaattcccagtgacaactgcagataaaaggaagggaaggagaagagcagagaaaggaaaggtggatagagaagaggaagggagtacctactagatcttatttcacttcatccttcttgtaaccatattgtcaatcaggaaagctcaatcagatacaaaaacaggaaattcgttaaaagtaacgtttgtagaagatactagttgaggaggagagacttttgagaaagcctgtgtgtgtttgtgacactcttgtgaccgtgccaagaaaacgtaagcaaatatcaagcctccaaatcctaatgcaacaagtcctgaatcccttgcagktatgtcctggatgatgaatacacaagctcagtaggctccaaatytccagtcysktdgtcccyaycsramgtcyygatgtatagcaagttcagcagcaaatmtgacattygggyttttggtaagtggataagattacacagattatacagctcaaaggataagaaatgcaatgggaaaattcacactttgcaacctccacagagatattgttcttgctttcattcttccaatccttggggagtgcttactgtgtgtcagccaccacaggggtttctgaggatgaaaactaaactggacatgatctctgcctttttagaacttaaaccatgttaaggaaaacaattcattcagttttcaacagcttctgaatactgattatgtaccaggcactctgccagaccctataactgcaaagacaaataagatgctgtctctcttctagaggagttaatagtctagtacgaccttgatctccatctagtgtggtcagtactatagcagaaatttgggcaaaatataaaaagcacagagcggggaaccaactgattctaatctttgaggttgatctaggaagactaggacccctgctatccaaaaagactgcaaaccaatttaataatttttttcaccttytagggkttttgmtgtrgrrwatttactccctggggaagatgccakvtgagwgatttactaacagtgagmctgmtgaacacattgccyaagrcctacsthtctacaggnytcatctgscttcagagaaggtatatrccatcahgtacagttrytgrcatkaggtaagtgctttattaggatctcttaaattatttccttgaatctacttgcccatttagctggccattcagccaccaaagactgatagctgcacacattcttttttttcctttttttttttttttaatttgagacaaggtctcgctctttcacccaggttggagtacagtggcgcgatcttggcttactgcaaccttcgcctcccagattcaagcgattctcatgtctcagcctcccaagtagctgggattataggcgtgcaccaccacaccaagctaatttttttttttttttttggtgacacagtcttgctctgtcacccaggctggagtgcagtggcacgattttggctcactgcaacctctgcctcctgggttcaagtgattctcctgccttagcctcccgagtagctgggactacaggcacatgccaccgtgcccagctaatttttgcatttttagtagagacagcatttcaccatgttggccaggcaggtcttgaactcctgacctcaggtgatccacccacctcggcctcccaaagtgctgggattacaggcgtgagccactgagcctggccaattttgtatttttagtagagatggcatttcgccatgttgaccaggctgatctcgaactcctggcctcaagtgatccgcccacctcggcctcccaaagtgctgggattagaggcatcaaccaccacgccaggccttgcacacattctctgaccttggcctgcaacttgatcatctgatggccagaggctttcccaggcccactccgattctcactagagtgtcattagtacactccaatgccagctcagctttagggagtgaggtgttgtggggccatgtcatctagcataagcaggcagccagaggcattcagacaagtgaatgggcattacaaaagaaaagtcatgaaagtttgttcattcctttgtgtgtcattggccctttcttctactttattagctgccaaccgtttctggctgaggtcctaaatgagatttttttttttttttttttgagaccgagtctttctctgtcgcccaggctggagtgcagtggcgtgatctcggctcaccgcaagccccgcctcctgggttcacagcattctcctgcctcagcctctcgagtagctgggactacaggggcccgccaccacgcccggctaattttttgtatttttagtagagacagggtttcaccgtgttagccaagatggtctcgatctcctgaccttgtgatccacccgcctctgcctcccaaagtgctgggattacaggcatgagccacagcgcccggctaaatgagattttttttaaaacctactgcttgaaagggaactaaaacaggtagtgggttttttgtttgctttgttttgttttgctttttaatatggtgcatcgtggggtatgtgggtaggtgtggtattttggaaataaggaaatctgtcctactactattaaactgctttgctcctcttacctcgagttcttcccaagatgccttctctacttttcagtagatccttggcaacctaaatttctagtaggaaataaatgctcaactcttcagagtgtccaacaagtgcatatgtgaatctggagccttcttggtgaggtgaaaagtgggtatctggatccgagcatggctggtttccctcgaacaaatgacagatcacagagaaagtgcagaaagggaggactccttctttcttctgtgtgatgcaggattaagggtgattggctatgctccctcccaatcaggaccttcttactctgctaattaaaaatgatttcagacaggtactttatccacagcctgtttaaaggagtggtcaaaattggatgcatatcagaaaccctaaggagctcttaaaaatgcagattactggctgggcatggtggctcatgcctgtaatcccagcagtttgggaggccaaggcaagcggatcacgtggtcaggagatctagaccattctggccaacatggtgaaaccctgtctctactaaaaatacaaaaattaaccaggcgtggtgatgtgtgcctgtaatctcagctactcaggaggctgaggcaggagaatgacttgaacccaggaggtggaggttgcagtgagccgagatcctgccactgcactctggcctgagtgacagagcgagactgtgtcacaaaaaaaaattcaggtaactgggacttttctccagaaattctgattagctatgcctgaagtggaacccagaaatctctttttaaacttcccaggaaattctgatactcagctaagtttaagaatcactgagtcaaggaatcaagaaattgatgaccattggttctaacagattgagagcattctggcatgaatgttccctgaaccactaaataccaaatacctcgggggcttatgggccatggccatcaaaaagaaccttagtcgtaggccgggcgcggtggctcacgcctgtaatcccagcactttgggaggctgaggcgggggaattaccttaggtcaggaattcgagactagtctgaccaacatggtgaaacccggtctatactaaaaatacgaaaattagctgggcgtgatggcgtgcacctgtaatcccagctacctgggaggctgaggcaggaaaatcgcttgaacctgggaggtggcagtgagctgagctcacaccactgcactccagcctggacaacagggtgagactctgtctcaaaaagaaaaaaaaaaaaaaaccttagtctttttgttaccagtggtaaaaaaaaaaaaaaaaaaaaaaaggtcccaggtactcagaatccctgctcagtaatacagcctgtggttttgaaatattaatcactaaaaattatcacatgggatttctgttctgccaaccacttgaacttgtttggtagccatttttcacttgaggatccaaaataagaatgtgttgtatacagttacataatgaacttgccctcaattttgatcagtgtgattgtcagtttaatttgcaaattgttcttatcacactaataacctgagttactaaagatgaaaagtgcacaaagactttatggagagctgctatttcttttttttttttttttccttttgtaatcgacagggcatgctactgggcatagagcatatatttaataaacatttgctgcttactcattgcatttcccttgaattctggattctagccactctaacactttactttttctttggttttagaaagcagatgagcgtcccactttcaaaattcttctgagcaatattcyagatgtcatggatgaagaatcctgagctcgccaataagcttcttggttctacttctcttctccacaagccccaatttcactttctcagaggaaatcccaagcttaggagccctggagcctttgtgctcccactcaatacacaaaggcccctctctacatctgggaatgcacctcttctttgattccctgggatagtggcttctgagcaaaggccaagaaattattgtgcctgaaatttcccgagagaattaagacagactgaatttgcgatgaaaatattttttaggagggaggatgtaaatagccgcacaaaggggtccaacagctctttgagtaggcatttggtagagcttgggggtgtgtgtgtgggggtggaccgaatttggcaagaatgaaatggtgtcataaagatgggaggggagggtgttttgataaaataaaattactagaaagcttgaaagtctttggtatctctattaatcatgcagcctccctgaagcgccctatctcagtattccagaaagctgctgtgtagcattagtttggcatattcctacactgagaactcgacaggatcctccaggtttaagccctcttgttaactcctgcctctgaatcaaagatgcattaagcaaaaacagtgcctgtcacagcacgcatgcaatgttatttgaatgaatctgaaagttgggcacaaactgccatagcctcatttccctacrtcgggagaggaaaactccatcaaaaaacgaaagccaggggcccaggatagccaactaatcgacccagtcaactaactgacccagtgcacaactctggtagctcagaaaacgcgggctaatttggaagtggacaggggcggagctgtggggccagcacggaatggatcacgtggtctgaagtaacttccttttctcctttcttttctttttggagtaacatctcaacggcacctcggctctgggctgtaagccctgcgatctcaaggcgcaaggctgggcgcaacggcagggttgcggggttacgggattgcggggtccggggagtggaacccgccgactccgggaacgaagcaccggcgccaaggtgtgggaggcggcggggtggagttggacgcctgcctcgcgccgacgcagtgcactcacgggggcggtcccagaggcagctagctgwggttccggttccgtcgcggagacacgtgaaggtcggtgcggagttcgtctctgcaagcttggtcgcyctgggatggattcctcctcctcttcctccgcggcgggtttgggtgcagtggacccgcagttgcagcatttcatckaggtagagactcaaaagcagcgcttccagcagctggtgcaccagatgactgaactttgttgggtgaggagcctggggctgggacctgaacactgtacctactttcyctctgtccttgtaccgcgggactcgcgacaacgtcggggattcggggtggggggcgggcacctggcagcaacccttgattttctcaggttcctgtggcctagccggatgggagragggtgactccgcttctctggggactgtcattccggacctcggctttgttggtgtagaggactgggtatcaaagaagacttatgccactggacacccagcactttcaggcacccgaggttgaagctgcctagtgctggtcaccaagactgatcggagcccccagtactgggattttatttttggcagcccgagtcccagagagtcagtgaatcagtgaatctgctattcctggactcctcgggatttaccttcattacccagttctaaccctctccgctgaaaaatgagtggctccagcccagtaactataaaagtggtgtaatctcttccaacgtacatacttatttgctttcttgttggattgttgtgtaataccaagccgttttgggtctgaaggttgaggaattgagcctgccctgtgaggggactttggcaaaagggtggaaggtatttgcagcttgccaacaacgtgttctgcttgccaaggacagatctcccttaatgtacacaattcacagaattcagaggccaaggatawttttccttggaattagagggtctgaggcttgtgtacatggcagagaataatgaacgaaatttttgaaccacttaacttgaactatatacagtcattggtttccataggccctttcccataaacttacagtattgctggactatgacacctaccagatgcttacttaactctggtctgccttggaccagagtgctttgattcttttttaaaaatatctgtgattcgttactttggggctaggagggcgtgtggttaagtactattgcaagaatctgtaagctgcccggcgcggtggctcatgcctgtaatcccagcactttgggaggcgggtggatcacttgaggtcaggagttcgagaccagtctgggcaacacggcgaagccctgtctctactaaaaatagaaaaaattagctgggcggggtggcacccgcctgtaatcccagctactcaggaagctgaggcacgagaatggcttgaacctggcggaggttacagtgagatcatgccactgcactccagcctgggtgacagagccagactctgtctcaaaaaaaaaaaagaaaagaaaagaaaggaaaaaaaactgtaagctatgatgaaccccttaggaaaatgcattcaattttccattcatcatgacaggattcaagaatctctagcttaagtagacaaggttatagaatctcaagtcatattttttttcttctttggtaggttttagggtaccttgctgaaatgatttatcctttcacccttttattctgtagttaacttaaaggcatttagttcaaacagcattgtggagttaaaaccaaattcattgaaaggttacttcacttrtattttgccattttcttgctctggaatatcccagctctgccattttctggccctatgattttgggtaaagtatctctgtgccacagttttcctctttgtaaaatgaggatttataatagtatctattccatagtattgttgtaagaatttaatgtaaggctagagaacattgctatatacttggtcagctgccaaatgtgaactatcagtaacatatcagatattatttttaggtaaagtttttttttctctaagcaacaaaaagggacccctgcccccaaccgtctttttctttccaagttccctttgtgattctgtatcttgtcctgagcaggagaagtgcatggacaagcctgggccaaagttggacagtcgggctgaggcctgttttgtgaactgsgttgagcgcttcattgatacaagccagttcatcttgaatygactggaacagacccagaaatccaagccagttttctcagamagcctttctgactgatctcagcattacctctttggaaaaggaaggtagttcaagaaatgaagagctgttgatgggatgattgaagaaacagctatgagaggattggctcccmtcttttgttactcttgggacatcctgtcatctgagaatgaacaaagaccaattttttgtgtgtgaagcttaagggtcatatgtttgcttgtattttttaatgctaatcttgtgaaaataattgacaggygaaagaaaactctatttagatgcatattactgtacatgggactatgcttttctcaaagccccattaactgcttcctataattttgatagtgggaccacatacgtaaaaatctctcatttgtgtggagtcatttctgatttcaggggagatccttgtgtttatcagaaagggcagaagtaggggaagaataatttggtatccttatctagtgtttgattgtcaatgctggagaaaaatatctgtaagagtgtttatacagtacacttcagttatcttgadctccctttcctatatratgatttgcttaaatatccatattaagtaagtctcaaggtagggtaggcagcctgagagtctagaggcctttagttataaaggaatctagccagtgaacataattcttattactagactgccacaaggaagaaattaacttaccctgtatatcagggtacaaaaaattcagtgatgtgcctaaataagttataaagatttaggccaatcagaagctaacagcagtttcaggtagaggtgcatgcctaatgttagttagtgtagattccatttactgcattcttctgatcactgaaataaaagctatataagattcaactctgtgattgagaaggcatcctattgcagttattatctgcaacccggagagatttagcatgggctgatyccaaggttaaaatgtagtcagtcagtctgggtacctgctctgtgtaaggtacagcacagtattccaggggttcctgacctttttgagagaaaagagaacctagagatgagatggggagggaagcggttatgtgctggcagtcaagtccgtgagtatagtagaggttgtattgactggattctcctcttatttcaaatccttgtagactggagtatagacctaaaatggacctacttgttgggagcctctagtgcaaatccatgaaatctggggaaatgaacatctctaaaagcttcaagtccctgtttagattttccccrtaaaggtgctagaaggactttttttttttttttttttgagacggagtcttgctctgtcgcccaggctggagtgcagcggtgggatctcggctcactgcaacctccacctcccgggttcaagtgattctcctgcctcagcctcctgagtagctgggattacaggcgcacgccaccatgcctggctaatttttgtacttttagtagagacggggtttcaccatgttggtcaggctggtctcaaactcctgacctcatgatctgcccaccttggcctcccaaagtgctgggattacaggcgtgagccaccgcacccagctggaattttttttaaatcattatgaaaacacagttaaacatttaagttcatactctgtgccgttgtttttagtgacaggatttcagcagtgcacagaaacagtccctgcccttgaggagctattggtctagttaggggaggtagacaataaacacataaatatgtcaatgtaataagtgccatggagaaacagcagagtaagggtgttagggaatatttatggagtgtgattattttatataagatggtttgagaaggcctccttgggaaggtggcagtccaacagagacctggatgaactaagcaaccaaaccttgtgggtgttgccgagcacggtggctcacgcctgtaatcccagcactttgggaggccgaggcaggcagaccacgaggtcagaagatcaagaccatcctggctaacatggtgaaaccccatctctgctaagaatacaaaaaaaaaaagagctgggcgtggtggcaggcgcctatagtcccagccacttgggaggctgaggcaggagaatggtgtgaaaccgggaggcagagcttgcagtgagccgagattgtgccactgcactctagcctgggtgacagagcaagactccgtctcaaaacaaacaaacaaacaaaaaaaccccacaaaaccttgtgggtgtctgagacaagaacatttcaggcaggaataacagtaagtccgaaggccccaaggtaggaactgcatgcatgatgccgtggagaacagtcaagaggtcattatagctggagtaaagtgagtgaaagagaatggtaagaaataaggttggagagaccgggtgcggtgggctcatgcctgtaatcccagcactttgggaggccgagatggatggatcacctgaggtcaggagttcaagaccagcctggccaacatggtgaaaccctgtctctgcaaaaaatacaaaaattagccaggtgtggtggcaggtgcctgtaatcccagctacttgggaagctgaggcaggagaaccacttgaacccaggaggcagagattgcagtgagccgctccagcctgggtgagagagtgagactccatctcaaaaaaaaaaaaaaaagaaataaggttggagaaaaacgcatgcaatggatcagggtgacgggtgtgtgtgcactgattatgtggggccttgtaggccatggcaaggactttgggcttttactaagcaaggtggggagccatttgagggattttaacagatgaatgatgtaacataacttaattttaggagggtctggctgctctttgggcaacatcacatggtgaagaagttgtaacagtagcagtagtagtaagaataatgrcattttgaaatccaggaaaatgagactttaaaatgcatataccttgtaactatatgtccccgttgacttttttttccctacaaaatttaatgtgaggccaggcacggtggctcacatctataatctcagtactttgggaggctgaagtgggaggattgcttgagcccaggagtttgagaccagcctaggcaacatgccaagaccccatctctacaaaaaatacaaaaattagctgagcatggtggcacatacctgtagtcccagatacatgggaggctgaggcgagaggatcacctgagcctgtggaggtcgaggctgcagtgacccatgatcacgctactgcactccagcctgggtgacagtgagaccttgcctcaaaaataaaaagaaaatgtgttcttaaaacctcaagtcataggaacggttctttagtcttttccttattattatatttattatgttatttattactatattatttagtttttttttttttgagacagagtcccactctgtctccaagccagcggcacgatctcggctcactgcaatctctgcctcctgggttcaagcgattcttctgccttagcctcccgagtagctgggattacaggcacacaccaccacacccagctaatttttatatttttagtagagacggggtttcaccatgttggccaggatggtcttgatctcctgacctcgtgatccacctgcctcggcctcccaaagtgctgggattataggcgtgagccactgcgccccaccttatttagtattaaagtgttctcattacttgtacacacaaatttaaatgtcttagctttacagtattgcttgctcagcgaatatatgtcatgagaaaggtctgtcagattcatacagtaaacttgagcaccaattatgtgttttgacactactgggcacaaagacaatggaaaagaaaaggtgtaacaaatcccctgtctgagattaataagccccaaggcaacaatttgggcttttgtttgttttgtcaatctgagaaatgcagtttcagaactttgataggtggtactgttagccctgatgacattcaaagtcctcatttcaaatattcaaggtagaaaattcaaaactcagttgtaaaacaaaagaattggattagcagacccttttcatgaaatgaaatcttacttagaagcctgttatgtaaagcagaaaagccaagctactctggtggttagtatctggaagccttcctactgttgtgttgtcacccacctgcactgccagtgatgcctaaggctcatcttcaagcttccaggttttaccaagcacactctgaaagtgagtctatgtattagggataacagaaggaaatcaagcaaaaacttgctctttatttacaataaactccataaggaatttgaattctaaagttaacaaatcaatgaactccatgtaaaatagtctttacatggaataatggaaaacaatcgatggtccttttcttaaaaaccaatttttccccattgtaatacctttttttttttttaagatgagatctcgctctgtttccaaggctggagtgcagtcatttccatgtagtatgtacttttcccgastactgccatgastcacttgccattttcaaggaatagcagcccactgactcaacaccctcacagacacacccaggatcaatactttgtatccttcaatccaatcaggttgacactcattattaaccatcacaaacttctttataaattgttatggaatgagctccaatacatattgttaaakttaaaaagcaagattaaagactaccatttgtgtaaaaagggggggggattaaaatatatgtatgcatatttgcttgaataagcattaattaactcttgaaggatattgttaatattgattgcctctggggaaaagaactgggtggttggggagtaggggtgggagactttttgccatttatcttttctttatgccttttgagttttgaatcatgtgaatgaattacctattcagaaaaatacatattattttaaaaaataacaaaatttctctccatttcagcactataaactctgtactaaaaagtggggatgtgtgatagaaaccacttttaggaataaaaaacttatatttcaactacagtactttcagatatcccctagtctcaaatagattcttttttctttttttaacttttgtaaattattttatttcttccatgatgatttaaatggactttttttcttttttttttttgagacggagttttgctcttgttgcccaggctggagtgcaatggcgtgatcttggctcactgcaacctctgtctcccgggttcatgcgattctcctgcctcagcctcccgagtaactgggattacaggcatgagccaccatgcctggcctgactatcttcaaacaagtacaaatatttcataaataatatctggccatttctagccaattgagtaatttgttgcacaataagccacctcacatctttcagcaagaaatacattaaatttgaataataaagacattacacaatgaattaggacacttttaaaatttgttttaatttttattagggggaggggacagcacacttctacttaatgaagagaaacatttttacagtccagaggtcttttatgtttttgcacctattatgcttgaattcataggggataggttccagcagcccagactcctttccattggttctcacaaagtacacttctctgggtggagcagcctggcacttgagttgaacccaggtacctctctttttggcttcctttttctgatcattttccctcatgcgtttcaggaagctatcttggctcttagagtgcttaatgtactcaatccgcacattaattctcttggcaagaatcttgcccttagcttctttgtttacaacaatgccaacagcatgctggttaacagtgtagacacagttttgccatggtaacacttatgggacattcctttttgaatagtacacattccctcgatgtctctatatgtgtgtgtatatatatattttttctctatatatagaatatatatataaatagatatagaaatatatatagtccataatgaacacatatttttctctctatatatatagaaaagatatatatatatatatatatatattttttttttgagacagagtctcactctgttgtccaggctggagtgcagtagtgagatctcggctcactgcaaattccacctcccaggttccagtgattctcctgcctcagcctcctgagtagctgggactacaggcacgcaccaccacgcccggctaataatatcgtctttcttatagatttgtgtgtacatggccaaaggaacaactctgtgttttctttttttttgagacagagtcttgctctgttgcccaggctggagtgcagtggcgtgatcttggctcactacaacctctacctcctgggttcaagtgattctcctgcctcagcctcccgagtagttgggattacaggcatctgccaccacgcccagctaatttttgcatttttagtagagatggggttttgccatgttggccaggctggtctcgaactcctgacctcaagtgatcctcccacctcagccattttctgaaaggcctagagaacatctatctggtgcctcgcctcttaccctttgtgttcgtcattttggcaaattactgaaagatggcagttccggccaaaaggaagctcttttttaaaaaaagaattatacttcccacacaacactggcatatcaaataggttatttacatctaaggacctctagcagggctgggaatagggtagggtgaatgaggcacttgtttcatgtgcaaaatttaagggggtaccaaaaaattcagttatcaagaggaataattttttgtttgtttggttttttttttgttttgtttgttttttgagacgcagtctcgctctgtcgcctaggctgggatgcagtggcacgttctcagctcactgcaagctctgcctcccgggttcacgccattctcctgcctcagcctcccgagtagctgggactacaggcacccaccaccatgcctggctaatttttttgtattttttagtagagacggggtttcaccgtgttggccaggatggtctcaatctcctgacctcgtgatccgcccacctcgtcctcccaaagtgctggaattacaggcgtgagtcaccacgcctggcctgaggaaagatgttttaatgaaatattttaaaaatcaaattaatgcaaaagtccataatgaacaaaatatcaatatttttaataaagacaggaccagtaacagtgccatactgaaccaaccatatcggagcctgaggcaaaaggcaaaatacaagttccatatacaggcttttatgtattcttgaatagttaactttttcccggaacattacaggagttgaaaaaatattgaaaaatagataaattataactcacagcaattaagtttaaaacatgttatttacaccaaaactagaatttattaaattctactttcttggctttagtggaagcaaacctattgaaattttttttttctttttcttgagatggagtcttgctcagttgcccgggctggagtgcagtggtgtgatctcggctcactgcaacctccgcctccctggttcatgccattctcctgcctcagcctcccgagttgctgggactacaggcgcgtgccaccacacctagctaatttttttattttttagtagagatggggtttcaccatattggccaggctggtcttgaactcctgacattatgatccgcccacctcggcttcccaaagtgctgggattacaggcatgagccactgagcccagccaggaaatattttcattaaaatcagaagcttggatcctttcagactggccaatacagttcctacaattgtgatttttatgaggtgaaaccatctggagctgagaatttttcttttttgaaacggagtctcgctctgtcgcccaggctggagtgcagtggcgcgatctcggctcactgcaagctccacctcctgggttcacgccattctcctgcctcagcctcctgagtagctggtactacaggcgcctgccaccacgcccggctaattttttgtatttttagtagagacggggtttcaccgtgttagccaggatggtctcgatctcctgacctcgtgatccgcccgcctcggcctcccaaagtactgggattacaggcgtgagccaccacgcctggctgagaatttttttatttctaaaaatcaaacagagcctctaagagagaaaacccaaagcaaaacaatcatggatctaaatcagcaagggctggaaggtggtgataactgcaaacaattgaagagttgggatcttgttatgcagaaacaaccagctatgccttgggatcaaaatccagaacaatcaaatggaaattacagtgaagatgaacaaaagggaaagcagaaatggagagaaggaggaggagaagcaggcggaaagagagagggagaaaaagaagaaaatgaaaaggagctggaagatgaacaggaaaataaaaaagggaaagggaaaatgagaaacaatatcccaagaaaagattagtcagcaaatccctcatggacactctgggcaaagctgaagttaaacaggtgccccacaatacaagagagtttatcgatctcatttgaatttggcatgacacataaacagataagtcaacggttttgtaaaaagaggaagaaatgtaataaagaaatgtccaagagaaagcataagaaaaaacataagagatgtggggcgggggagcgggtctctctgagttgccaaggctggtctcaaactcctgccctcgggggatcttcttcccaccttggccttcagaagtgctgtgattacaagcatcagccattgtgcctggctaagacgttttttctttttcctttttattttttatttttttttttttgagacggagtctcgctctgcctcccaggctggagtgcagtggtgcggtctcagctggctgcagcctctgcctcccaggtttaagcggttctcctgcctcagcctcctgagtctagataagaagttttatatgacaccattctctgaaaggataaacaaggacatattgacaattgttaattccgtggggtagaactaaatgaggggagtgcaaaggagtttctaaatatcctatttttacactactgtggtttttaagtttttataatggatgttaattgattttatttcagaaaaaaatcaataaagaaattaccaacctccagaagtgttttgagactgaaagggaaatccattgtagaagttaatgggttcagtgcattctgcaacttgtcagtatatctctaaacatcccttccaggccgggcccggtggctcacggctataatcccgccactttgggaggccgaggctggaagataactcgaggccaggagttcaagaccagcctgaccaacatggtgaaaccccatctctactaaaaatacaaaattagctgggcatggtagcccatgcctgtaatcccagctactcgaggggctgaagcaggagaattgcttgtgccgggaggcggaggttgcagtgagctgagatcatgccattgcactccaacctggacgacgaaagagaaactctgtctctaaataaataaataaacattccctcaaaaaaaaaaatcagaagcttggctgggcacggtggctcatgcctataatcccagcactttgggaggccgaagtgggcggatcacttgaggtcaggagtttgagaccagcctggccaacatggtgaaaccccaactttactaaaaatacaaataattagccgggggtggtggcacatgcttgtaatcctagctgctcgggagtctaagacaggagaatcgcttgaaccttggaggcggaggttgcaaagccgagatggccctattgcagtccagcctgggcgacaagagcgatactccgtctcaaataaataaataaataaataaaaatcacaagcttaggtctaatatatagaatttgggggaagttctagtaatctggtgcaatgtaaatgcgaggcagacatcggagaatctctagaaatgaggaccacaaggtagacatggactacatagttatgccacgctaaggagtttagattttattttgaaggtgatggggaacctctcaaatattttaagcacctaattccagaagattacaatcacgtgagtgctgaagtcaacaaggacaagactggagtagagacttagtcgatttctaaggtagaaatgtaattcccagacagacagactaggttctgaatatgaggagtaagaggaaacaaaagaggatgaccactcaagacttaccataaacaatctgctctttatccatattacattacatcttcttcctgacatgtgtgaaaggaaataagttactctctcttttctaagaagcatgccaagcacctcttatttgtggggcagagttcaccataaaaagttgagaaccgctgggcacggtggctcacacctgtaatctcagaactttgggaggctgaggcgggcggatcacgaggtcaggagatcgagaccatcttagctaacacacggtgaaaccccgtctctactaaaaatacaagaaaattagccagccgtggtggtgagggcttgtagtcccagctacttgggaggctgaggcaggagaatggcgtgaacccgggaggcggagcttgcagtcagctgagatcgtgccactgcactccagcctggtctacagagtgaaactccgtctcaaaaaaaaaacaaaaaacaaaacttgagaaccgttaatcttatcaagattctcatacccatccagaatacacatgcacatgtgtaagatgtatccttctcctcacccccactacagtccatttcaagaaagtcttcttttaagaaactggcaagaaaactggtattctgccaaatatgccaagattcatatatagatagagaggttccccatcaccttcaaaataaaatctaaactccttagcgtggcataattatgtagtccatgtctaccttgtgattctcgtctccagagattcttcaatgtctaccttgcatttaagttgcaccagattactagaacttctcccaaattattctacataaatatgaatgtatatattcatattatatatagtggctggcaggtcgactgttttgtttacttttttaggcaagccaaaatatttaaagataaaatagggcagaaaaaaatccatttaccttcttctatgaaagaaaggaggatgtccttctaaataaaaattctttaagaattcaatctaatattggcatttaagccaatgctgcttgccatcctaaaattattttccttttaaaataatctttgatgtccatttccagtaatatggtagccaaaataacctgaatgaaagtcctcccacactacaaaacacttagaaataccaaatacaatataaaatccttttaaatgtacagctgaacttgcaagtaagtaaaggaaatccccaggggtcaaaacaaagtgcaaaaacccaaaaccagagcattgggtaggagttaaaatgtcagttgttccactaggggtgggggtggggtggggtgcaggttgcttggttatctcattaaataaggtgttcaggtttttttgtttgttttttgtttttttttccataggttatcgggaaacaggtggtatttggttacatgagtaagttctttagtggttcatttgtgagattttggtgcacccatcacccgggcagtatacactgaacccaatttgtagtcttttatacctcactcctttcccaccctttccccctgagtctccaaagtccattgtgtcattcttatgcctttgcatcctcatagcttagctcccacttatgagtgagaacatacaaggtttggttttccattcctgagttacttcactttgaataattgtctccaatcccatccaggtcgctgtgaatgccattaattcattcctttttatgggtgggtagtattccattgtatagatataccacggttaatttatccactggttgattgatgggcatttgggttggttccacgtatttgcaattgcaaattgtgctactataaacgtgtgtgcaagtatcttcttcgtataacgacttcttttcctccgggtagatacccagtagtgggattgctggatcaaatggtagttctactttcagttcttcaaggaatctccacactgttttccatggtggccatacttgtttacattcccaccagcacataaaaatgttccctgttcactgcatccacaccaacatctactgttttctgattttttgattatggccattcttgcaggagtaaggtagtattgcattgcagttttgatttgcatttccccgatcattggtgatgttgagcattttttcatatgcatttgtatatcttcttttgagaattgtcttttcatgtccttagcccactttttgatggaattgtttgtttttatcttgctgatttgtttgagttcattgtagattctggatattattcctttgtcagatgtatagattgtgaagcttttctcccactctgtgggttctctttacactgctgactgttccttttttcgtgcaaaagctctttagtttaagtcccagctatttatctttgtttttattgcatttgcatttgggttcttggtcatgaagttcttgcctaagccaatgtctagaagggtttttctaatgttatcttctagaattttaatagtttcaggtcttagatttaagtccttaatctatcttgagttgatttttgtataaggtgagagatgaagattcagtttcattctctgacatgtggctagccaattatcccagcatcatttgttgaaaagggtgtcctttctccactttatgtttttgtttgctttgttgaagatcagttggatgtaagtatttgggtttgtttccgggttctctattctgtcccattcatctatgtgcctatttttataccagtaccatgctgtttgtctgactatggccttatagtatagcttggaatcaggtaatctgatgcctccagatttgttctttttgcttagttttgctttggctatgtgggctcttttttggttccatatgaattttagaattgttttttctaattctgtgatgaatgatcgtggtattttgatgggaattgcattgaatttgtagattgcttttggaaggatggtcattttcacaatattgattctacccatccgtgagcatgggatgtgtttctatttgcttatgtcatctatgctttctttcagcagtgttttgtagttttccttgtagaggtctttcacctccttggttaggtctattcctaagtattttatcttttttgcagctattgtaaaaggggttgagttcttgatttgattctcagcttggtcgctgttggtatatagaagagctactgatgtgtgtacattaattttgtatctggaaactttgctgtacttttttatcagttctaggagctttctggaggagtctttaggattttctaggtaaacaatcatatcatccacaaacagcgacagtttgacttcctctttaccaattggatgccctttatttctttctcttgtctgactgctctggttagaacttccagtactatgttgaagaggagtagtgagagtgggcatccttgtcttgttccagttctcagagggaatgctttcaccttttcaccattcagtattatgttggctgtgggttcgtcatagatggcttttattacattgaggtatgtcctttgtatgccgattttgctgagagttttaatcataaagggatgctggattttgtcaaatgctttttctgcatctattgagatgatcatgtgatttttgtttttaattctgtttatgtggtgtatcacatgtattaacttgcatatgttaaaccactcctgcatccctggtatgaaaccaacttgaccatggtggattatctttatttttttcttctttttgagacagttttgctcttgttgtccgggctggagtgcaatggtgcgatcttggctcaccgccacctctgccacctgggttcaagcaattctcctgcctcagcctcccgagtagctgggattacaggcatgcgccacaacgcccagctaattttgtatttttggtagagatggggtttctccatgttggtcaggctggtctcgaactcctgaactcaggtgatcggccagccctggactcccaaagtgctgggaattacaggagtgagccaccatgcctggcccctggattatctttttgatatattgttggatttgcttacttgtattttgttaaggacttcagcatctatgttcattagggatattggtctgtagttttgttttttggttatgtgctttcctgcttttggtattagaatgatagtggcttcatagaatgatttagggagggttccctcttcctctatcttgtggaatagtgtcaatacaattcttctttgaatgtctggtagaattctgctgtgaatccgtttggtcctggacttttgttttttgttgttaattttttttttttttttgagacagaggctcgctctgtcacccaggctggagtgcagtggtgcaatctcagcttactgcaacctctgcctcctgggttcaagagattctcctgcctcagcctcctgagtagctgggattacaggcgcgtgccaccacacctggctaatttttttgaatttttrgtagagacggggtttcaccatattggccaggctggtcttgaactcctgacctcgtgatccactcgccttggtcttcaaagtatatgctgggattacaggcgtgagccaccacgcctggcccttttttgttttttgagatggagtctcactctttttgcccaggctggagtgcactggctcaatctcagctcactgcaacctccgcctccagggtttaagcaattctcctgcctcagcctcccaagtagctgggattacaggtgcccgccaccacgcccagctaatgtttttgtatttttactagagatggggtttcaccatgtttggccaggctggtcttgaactcctgacctcaggtgatccatctgcctcggcctcccaaagtgctgggattacaggtgtgagccaccacgcccagcccttttcttggtaatttttaaattaccatatcagtctcactgctggttattggtttgttcagagtatctaatgcttcctgatttaagctaggagggttgtatcttcccagaaatttttccatctcttctagattttctagtttaagcatgtaaggtgttcatagtagccttgaatgatcttttgtatttctgtggtgtcagttgtactatcttccctttggtttcttattgagcttgtttggattttctcccttcttttcttggttaatcttgctaatgttctatcaattttatttatcttttcaaagaaccagctttttgtttcatttatcttttgtatttttttgtttgtttgtttcaatttcatttagttctgctctgatcttggttatttcctttcttctgctgggtttgggtttggtttgttcttgtttctctagttccttgaggtgtgaccttagattgtctgtctgtgctctttcagactttgtgatgtaggcttttagggctatgaactttcctcttagcaccgcctttgctgaatcccagaggttttgataggctgtgtcactattgtcattcagttcgaagaattttttaatttccatcttgatttcatttttgagccaatgatcattcaggaacaggttatttaatttcgatgtatttgcatagttttgaagcttccttttgcagttgatttccagttttattccactgtggtctgagagagtgcttgatataatttcattttccttaaatttattgaggcttgctttgtagcctatcatatggtctgtcttggagaaagttccatgcactgttgaatagaatatatattctgaggttgttggatggaatgttctgtaagtatctgttaagtccatttgttccagggtatagtttaaatccgttgtttctttgtttactttctgtcttgatgacctgtctagtgctgtcagtggagtattgaagtcccccactattatcgtgttgaggtctatctcatttcttaggtctattagtaattgttttataaatttgggagttccagtgttagtccttatatgtttaggattgtgatatttgcctgttgaacaaggccttttactgttacataatgtccctctttgtcttttttagttgctgttgctttaaagtttgttttgtctgatataggaatagctactcctggccaggcaccgtggctcacgcctgtaatcccagcactttgggaggctgaggtgggtggatcacaaggtcatgagttcaagaccagcctggccaatatggtgaaaccccgtctctactaaaagtacaaaaattagccaggcatggtggcaagtgcctgtagtcccagctactcaggaggctgaggcaggagaatagcttgaatccaggaggcggaggttgcagtgagctgagattgcaccactgcactccagcctgggtgacagagcgagactccatctcaaaaaacaaaaacaaaaacaatagctgctcctgctcgcttttcatgtccatttgcatgaaatatatttttccacctgtttaccttaagtttatgtgagttcttacgtgttaggtgagtctcttgaaggcagcagatagttggttggtgaattcttttttttttttttaatggaattcttatccattctgcaattctgtatcttttaagtggagcattaagtccatttacattcaatgttagtacagagatgtgaggtaccattccattcatcatgctatttgttgcctgtatagcttgtttttttttctttttgtttttaattttttttttttttaagacagagtttcgctcttgttgcccaggctggagtgcaatggcatcttggctcactgcaacctccgcctcccaggtttaagtgattctcctgcctcagtctcccaagtagctaggattacaggcaagtgccaccatgcccagctaatttttgtatttttagtagagatggggtttcaccatcttggccaggatggtctcgaactcctgacctcgtgattcaccctcctcaccctcccaaagtgctaggattacaggtgtgagtcactgcacccagcctgtatttttgttttattggtcctatgagatttatgctttaaaaagtttctgttttgatgtgtttccaggatttgtttcaatatttagagctccttttagcagttcttgtagtggtggcttggtagtggcaaattctctcagcatttgtctgtctaaaaaaaaaacctatctttccttcatatgtgaagctcagtttcacttgatacaagattcttagccgggcacagtggctcacgcctgtaatcccagcacttagggaggctgaggcaggtggatcacctgaagtcaggagttcgagaccagcctgaccaacacggagaaaccccgtctctactaaaaatacaaaattagttgggcatggtggtgtatgcctgtaatcccagcttctcgggaggctgaagcaggagaatcgtttgaacctgggaggctgaggttgcaatgagccaagatagtgccattgcactccagcctgggcaacaagagtgaaactccgtctcaaaaaaaaaaaaagattcttagctgataattgttttgttcgaggaggctgaagatagggcctcagtcccttctagcttgcaggatttctgctgataaatctgctgttaatctgatagattttcctttataggttacctggtacttttgtctcacagctcttaagattctttccttcatcttaactttagataagctgatgacaatgtgcctaggtgatgatcttctggcaatgaatttcccagatgttctttgtgcttcttgtatttggatgtctaagtttctagaaaggctggggaagttttcctcgataattctcccaaatatgttttccaaacttttagatttctcttcttccccaggaacgccaattattcttaggtttggtcatttaacataatcccacacttcttagaggctttgttcatatttttttattcttttttctttgtctttgttggattgggttaattcgaataccttgtctctgagctctgaatttctttcttctacttgttcgattctatggctgagactttccagagcattttgcattgctataagtgtgtccattgtttcctgaagctttgattgttttttacttatgctgtctatttcattaaagattcctctcttcacttttatttttttttttgagatagagtttcactcttgttgcccaggctggagtgcaatggcgctatctcggctcactgcaacctccgcctcccgggttcaagcgattctcctgcctcagcctcctgagtagctgggactacaggcatgcgccaacacacctggctagttttgtatttttagtagagatggggtttctccatgttggtcaggctggtcttgaacttctgacctcaggtgatccgcccgccttggcctcccaaagtgctgggattacaggcatgagccaccgtgcccgggcttctcttcacttcttgtatcatttttttatttcctctttttttttttttttgagatggagtctcactctgtcgcccaggctggagtgcagtggcgcaatcttggctcactgcaacctccgcctcccaggttcaagcgattctcctgcctcagcctcccgagtagctgggactaaaggtgtgtgccaccacacccggctaatttttttgtatttttagtagagacgaggtttcactgtgttagccaggatggtctggatctcctgacctcatgatccacccgcctcagcctcccaaagtgctgggattacaggcgtgagccactgtgcctggccaatttttttatttccttacattgggcttcacctttctctggtgcctccctgagtagcttaattagtaacctcccgaattctttttcaggtaaatcaaggatttcttcttggtttggatccattgctggtgagctagtgtgatcttttgggggtgttaaggaaccttgttttttcatattaccagagtcagttttctggttccttctcatttgggtaggctctgtcagagggaaggtccagggctgaaggctgttgttcagatccttttgtcccatggcatgttcccttgatgtaatactctcccccttttcctgtggatgtggctccctaagagctgggctgtagtgattgttacagcttttctggatctagccacccagcaagtctaccaggctccaggttggtactgggggtagtctgcacagagtcctgtgatgtgaaccgtctatgggtctctcagctgtggaaaccagcacctgttctggtggagatggaaagggggtgaaatggactctgttaaggttcttagctttggtggtttaatgcactatttttgtgctggttggcctcctgctgggaggtggcgctttccagagagcatcagctgtgatagtatggggaggaacaggtggtgggcggggccctagaactcccaagagtatatgccctttgtcttcagttaccagggtgggtagggtaggaccactgggttggggcagggctaggtgtgtctgagctcagagtctccttgggcgggttttgctgcagctgctgtgggggatgggggtgaggctcccagatcaatggggttatgatcctagaaggattatggatgtctctactgtgttgtgcaggttgtcagaaaagtgagggaaagccagcagtcacaggcctcacacagctcccacagaatccaaagggctggtctcactcccactgtacccccacccccaccccaccaacagcactgagtgagcagggctgagaacttgccccaggctacccacctcccagctgtgaaagcaagtatggctttccttcttcccccacctgtggagtctgcacaccagattcatgccccaccccccgccgagttctggccagaagacttcttgatcagttcaaactgtttttttgttgtttgtttgtttgtttgtttttgagacggagttttgctcagtcgcccaggctggagtgcagtggcatgatctcggctcactgcaacctccgcttccccggttcaagtgattctcctgcctcaacctcccgagtagctgggattacaggcatgcgccaccacgcctggctaatttttgtatttttagtagagacgaggtttcaccatgttggccaggctggtctcgaactcctgacgtcaggtgatccaccctcctcaccctcccaaagtgctaggattacaggcgtgagccactgcgcccagcctctgttcaaattgttacaaagttcggctggagatttctttctccctgtgaccttttccaagtgcctctggccgccctaccaaaggacccctgtaaggccaggcagaaatggtttgctaggggacccagtgagctcacagggcttttcccgctctttcctctactcctgtatttcactcagtatctaaattgactcagctccaggtaaggtcagaatcttctcccataacctaggccttcagtttccccagtgggggtatgtgttcaggggcagacgatctccctttcccacttccacaatttgggcactcacagtatttggtgtgcctcctgggtcctgcaagagcagtctgcttccttcagagggtctgtgggttctcttgggtttcctgatttattcctgcagtcgttctggagcaaaaattcatgatgcgagcctccacatgctgctctgttcatcgaagttggagctgcaatctagtcttgcctcccgtctgccatgatccaccttcttcttcttctttgtttttatatggaatacttcacggatttgtgcatcatccttgtgcagggaccatgctaatcttctctgcatcattctaattccagtacatgtgctgctgaagcaagcacacgtgcttaggttctgatggcctgtagaggcaggagacagagccttgggcctaagtaaggcaggaggttggaactgaaacacctgtaggaagttgggagtttcaaaggacaacaccttcaataaggttgaactagacaaaaattcattcactagtataggaagacaacctgggctgtaagaaggtagaaaacagggtctccctctgaggcctgctttcacatgggtttgggattcaaaatttataactcctacactgtccaggaaccctccacactaaaaaatgagtacaaagtgtatacgcacttaagagtataactattgttattcctaccaagcagaagcaacataaaacagctctagagagacatatccctcacaagatccccacaagtaaagctgcactgaacacaatttaaaataaaaaattacaaaacacatgaaaaaacaccacaccataatcaaatgtctgaagacacaacacatagaattagaccccgaaatatgcaatctaatacacactataaaattgcttaaaatgattaaagatataattgaaaatgtaagaaaagaacaagacattattttatttttacagatttgaggatacaaatgcagctttgttacatggatatattgtgtagtggtgaagtttgggctttaaagtgtaaccatcactcaaatcatatacgtagaacccattaggtaatttttttttttttttgagacagagtttcgctcttggtgcccaggctggagtgcagtggcgccatcttggctcactgcaatctctgcctcttgggttcaagcgattctcctgtctcagcctcacgagtagctggtattacaggcgtgtgccaccaagcccagctaatttttcgtatttttagtagagacagggtttcatcatgttggccaggctggtctcaaactgctgaactcaggtgatccacccgccttggcctcccaaagtgctgggattacaggcgtgagccactgtgcctgacccattaggtaattttttatcccttacacctcttgcacctcccacctttctgggtctacaatgtctattattccactccagtacactagttttaaaaggccaggtagtattgaaaaagaactctagacatgaaaaaaagttttaaatttaagaactcaatggacatgttaaaccacagattgggcacaattaaagagaaaagtggtaactggaaaaatagatatatagaatgcaacacagagagattaagaaataaaaaatatgaaaagaggtaaagaaacatgcaggacaaattttaaaagtaatattcaaagaagtaatgactgagggtattctagaactgattatttaaaaatgtgaattctcgggccaggcgcagtggctcacgcctgtaatcccagcactttgggaggccgaggcaggtggatcaccaggtcagcagttcaagaccagcctggccaagatggtgaaaccctgtctctactaaaaatacaaaaaaatgagccaggtgtggtggcaggcacctgtaatcccagctactcgggaggctgaggcaggagaattgcttgaacccgggcggcagaggttgcagtgagctgagatcacgccactgcactccagcctgggtgacagactgcaactctgtctcaagaaaaaaaaaaaattaaaattaaaaaaataataaaaatgtgaattctcaaattcagaaactatgagtcctgagcaagataaatacaactaaattcacatttagaccattttattgaatctttagaacatcaaaacgaatgatcctggagataatacttaacattttctatgtgccaggattgttctaaacactgtacccaagagataatcattttaatatattggtatattttcttccagtgttttatcgatgcatgtatatgcacaatacaaaaattcaaaacaaaatcagaataatcctatacataaaaacttgtattctttttttttttgctcaacattttaccataagcattttcctatgttattaagcagcagcaatagctgcaataacagtgtaaatgacaactaacattttagtgttgttgtcaggagtatgggttttgaaatcaaactttctgtgtttgagtcccagttcaccacttactagccatgtggcattgcacaagtgactcatcctctctctgattccatgtcctcagtagtaaaaacctacatcctggggttattgtgagttaccatttacttttttttttttttttttttgagacagagtttcgctttcgtcgcccaggctggagtacaatggtgcaatctcggctcactgcaacctccgcctgccaggttcaagcgattctcctgtctcagcctccccagtagctgggattacaggcgctcaccaccacacgcagctaatttttgtctttttagtagagayggggtttcaccatgttggccaggctggtctcgaactcctgacctcaagtgatccacccgcctcagcctcccaaagtactgggattacaggcgtgagccactgcgcccccagccttgtgagttcctgtttactaagctatctgctgggcactgtgctaaacacatgaataatgctatttaaaaaaaaaaaaaaccagtgggttagaaactgctcttggtcctatttttatagatgagaaaagtggggcttaggaagactcttaggtgatttgcccaaaatcatatggccagtgatggagctttgacttgaattcagatctatccccaaaacctatgctttcgattgttgtgctacactgttcttccatatcattttattttattttattttattttattttattttattttattttatttatttatttagagacggagtctctctctgtcatccaggctggagtgcagtggcacgatctcggctcactacaacctccgcctctcgggatcaagcaattctcctgcctcagcctcccgagtagctgggattacaggcatgtgccaccacacccagctaatttttgtatttttttagtagagatggggtttcaccatgttggtcaggctggtctcgaactcctgacctcatgatccgcctgcctcggcctcctaaagtgctgggattacaagtgtgagccaccgcgcccagcctcttccatatcattttaaaggcttcatagtatgtacaaatcataaagttcaccacaatattcctcaaatgttgcacatttagatcctttccatttatttcctatgacaaataacctggtaaagctcatctttgcccataaaatattgtgtgcacttcagataaacccttttaggggagttactctgaagtggacttactaagtaaagaaagtatgacattttaagggtcttaatatatgttagcaaactgcttttcagaaaggttaaaaccatttacatactcactggcagtgtatgagagcaaagttgagttttttattttttattttttttattttttgagatggagtctcactctgtcgcccaggctggagtgcagcggcgcactcttggctcactgcaacctctgcttgccagattcaagcgattctcctgcctcagcctcccgagtagctgggactacaggcgcgcgccaccatgcctggccaattttttgtatttttagtgaagaccgagtttcaccatgctggccaggctggtctggatctcctgacctcgtgatccacctgccttggcctcccaaagtgctgggattacgggcgtgagccactgtgcctggcatgtcatttctacatgttggtaacgtttcaaatactctcttctagctactttgaaatatacaatatattgttgctaactctagtgaccctactctgttatggaacattagaacgtatttcttctaactgtatgactggatccattaaccaacctttttttatcacccccctcccacccacacaccctttccagcctctggtgtctatgattctcttctctatttctatgaggtcaacttttttcgtttccaacatatgagtgagaatatgtagtatttgtctttctgtgcctggcttatttaatataatgacatctagctagttccatttatgttgctacaaatgacatgatttcattcttttttatagctgaatagtatcccattgtgtatatataccacattttcttcttcttttttttttttcttagagatgggatcttgtgatgttgcccaggctagagtgcagtggcacaatcatgtcttcaatatcccattttcagcattggacagattttccagacagaaaaatcaacaaagaaatgtcagacttaatctgcactatagaaaaagtgaatctaatagatatttacagaacgtttcatccaacagctgcaaaatacacattcttctcctagcacatggatcwttctcaaggacaaccatatgttaggtcacaaagcaagtcttaaaacatttttaaacattgaaatagcatcaagcatcttctctgaccacagtggaataaaactagaaatcaataacgagagggattttagaaactatacaaacacatggaaattaaacagtatgctcctgaatgacaagtgggtcaatgaagaaattaaaaagaaaattgaaaaatgtcttgaaacaaatgataatggaaacacaacataccaaaacctatgggatacagcaaaagcagtagtgagagggaagtttatagctataagcacctacatcaaaaaagaagaaaaacttcaaataaataatctaaccatgaatcttatagaactagagaactaagagcaaacaaaatccaaagttactagaagaaaatgaataatatagatcagagcagaaataaaataaaaatgaagaaaacaatacaaaagatcaatgaaaggaaaagttggttttttaaaaataaacaaaattgacaaacccttagccagaacaatgagggtaaaaaccaaagaagacccaaataaataaaatcagagatgaaaagggatattacaactgatactgcagaaactcaaaggatcattagtggctactatgagccaataaattggaaaatctagaagaaatggatacatttctagacatatataatctacaaggattgaaccaggaagaaatccaaaacctgaacagacgaataacaagtaatgagatcgacggcataataaaaagtctcccagcaaagaaaagcccaggacctaatggcttcattaacgacttctaccaaacattaaaagaagaagtaataccagttctactcaaaccattccaaaagaagaggagragggaatacttccagtctcattctacaaggctagtattaaccttgataccaaaattagacaaaacacataaaaaaaaaaagaaaactacaagccaatttctttgatgaatatggatgcaaacatcctgaacaaaatactagcaaactgaattcaacaacacattaaaaaggtcattcatcctgaccaagtgggatttatccccgggatgcaaggttgattagacatacacagatcaatcaatatgattcatcatatcaacacaatggaggataaaaaatgatgtgggtgggcatggtggctcamgcctgtaatcccagcactytgggaggccaaggtgggcggatcacaaggtcaggagatcgagaccacggtgaaaccccgtctctactaaaaatacaaaaaattagccgggcgtggtggtgggcgcctgtagtcccagctactcaggaggctgaggcaggagaatggcatgaacccgggaagcagagcttgcagtgagctgagatcatgccactgcactccagcctgggcgacagagtgagactccgtctcaaaaaaaacaaaaacaaaaacaaaaattagccaggtgtggtggcacacatctgtaatcccagctactcaggagtctgaggcaggagaatcacttgaagctgggaggcagaggttgcagtgagctgagattatgccactgcactccaaactgggcaacagtgcaagactccatctcaaaagaaacagaaacaaaaacaaaaaaacaccatatgatgatttcaattgatgctgaaaaagcatttgataaaattcaacatttcttcatgataaaaaccctaaaaaaactggatatagaaggaacatacctcaatgtaataaagatgatatatgacagacccatggctattattatactgaatggggaaaaactgaaagccttttctctaagatgtggaacacaacaaggatgcccactgtcaccattgttgttcaacatagtactggaagtcctagctagagcaatcaaagaagagaaagatataaagggcatccaaattggaatggaagaaatccaattatccttgtttgcagataatatgatcttatatttggaaaaaccgaaagactccaccaaaaaaccattagaactgataaattcagtaaggttgcaggatacaaaattaacatacaagaatcagtagcatttctataagccaacagtgaacaatctgaaaaagcaatcaagaaagcaattccatttacaatagctacagaaaaaaaaaaaaaaaaacccacctaggaattaaccaaagatgtgaaagatctctacaatgaaaactattgggctggtacaaagtaattgcagtttttgccattacttgttttttgtttgtttttttgagacagagtcttgctctgtcacccaggctggagtgcagtggtacaatctcggttcattgcaatctctgcctcctgggttcaagcgattctcctgcctcagcctcccaagtagctgggattacaggtgcatgccaccatgcccggctaatttttgtattattagagatgggtttcaccatgttggccaggctggtcttaaactcctgacgtcaagtgatccacctgcctcggcctcccaaagtgctgggataacaagcatgagccactgcgcccagctgccattacttttaatggcaaaaactgcaattacttttgcaccaacctaatataaaacattgatgcaagaacttgaagaagacacaaaaaaatgaaaagatattccatgttcatgaactggtaaaataaatgttgttaaaatgtcaatactggctggacacgnnnnnnnnnnnnnnnnnnnntctccgagacagatggatcacctgaggtcaggagttcgagaccagcctgaccaatatgatgaaacccccatctctattaaaaatacaaaaattggccaggcatggtgacacatacctgtaatctcagctactcaggaggctgaggcaggagaatcacttgaacccaggagatggaggttgcaatgagctgagattgcgccattgcactccagcctgggcaacaagagcgaaactccatctaaaaaataaaaataaaaataaaagtcaatactatccaaagcaatctacagattcaatgcaatccctatctaagtaccaatgacattcacagaaatagaaaaaaaaatcctaaaacttttatgcaaccataaacgacccagaatagccaaaaccatacccagcaaaaagaacaaaactagaggaattacattacctgacttcaaattatactacagagctatagtaaccaaaacagcatggtactggcataaaaacagacatatgtggaccaatggaacagcatagtgtaacaaatccatacatacatagagaaacaaatccatacatctacaggaaactcattttcgacaaagttgccaagaaaataggctggggaaaagacagtctcttcaataaatggtgctgggaaaactggatattcataagcagaaaaaatgaaattaggtccctatctgtcaccatctacaaaaatcaaatcaaaatggattaaagacttaaatccaatacctcaaaccatgaaactactacaagaaaacactggggaagctctccaggatgttggtctgggcaaagatttcttgagtaacccacaagcacagtccaaagcaaaatgggcaagtgatttaaaaagcttctgcacaggaaaggaaacaatcgacaaagtgaagagacaacccaagggtgggagaaaacatttgcaaagtactcatctgacaagggattaataaccagaacatgtaaggagttcaaacaactctataagaaaaaaaaaactaataatccaattaaaaatgggccaaatatctgaatagacgtttatcacaagaagacataccaatggcaaacaggtttatgaaaaggtcattgatcatcagagaaatgcaaatcaaaactatattgagataccagccaggtgcagtggctcacgcctgtaatcctagcactttgggaggctgaggcgggtggttcacttgaggtcaggagttcgagaccagcctggccaacatggtgaacttcgtctctactaaaaatacaaaaaactagccgggtgtggtgacacatacctgtaagcccagctactcgggaggctgagacaggagaaacacttgaacccgggaggcggaggttgcagtgagccgagattgtgccattgcactccagcctggggcacagagcaagacttcgtctaaaaaagaaagagaaagaaagaaagaaagaaagaaagaaagaaagaaagaaagaaagaaaggaaggaaggaaggaaggaaggaaggaaggaaggaaggaaggaaggaaggaaggaaggaaggaaggaaaagaaaactccctaaagaaagaaagaaagaaagaaagaaagaaagaaagaaagaaagaaaagaaaactccctaaagaaccataatgagataccatcttaccccagttaaactggcttttatacaaaagacaggcaataacaaatgctggtgaggatgtggcgaaaagggaacccttgtacactgtcggtgggaatgtaaattagtacaaccactatggacaacagttgggagatttcctcaaaaaactaaaaatagagctactatacgatccagcaatcccacttctaaagaaagaaaatcagtatattgaacatatatctgcattcccatgtttactgcagcattatttcacaatagccaagatttggaagcaacctaaatgttaatcagcagatgaatagataaataaaatttggtacatatacacaatggactactatccagccataaaaagagtgagatcttgtcatttacaacaacaaagatgtacctggaggtgattatgttaagtgaaataagccaggcacagaaagacaaactgcacatgttttcacttatttgcgggagctaaaaattaaaacaattgaactcatggagatacagagtagaaggatggccaccagaggctgggaacggggtggtaggggagtggaggggaaatggggatggttactgagtacaaaaaatagaaagaatgaataagacctagtatttgatagcaaaacagggtgactatagtcaacaataatttaattgtacatttaaaaataactgaaagagtataattggattgtttgtaacacaaaggataaatgcttgaggtgatgggtactctatttaccctgatgggattattatgcactacatgcctcatcaaaactatctcacgtaccccataaacatatacatctactatgtacgcacacacacaaaataatgaaaatgaaaaaaagaaagcaaaaagagaaaaaagaggaagaaaaaattactccgttttcagactagttttgtactgggggactcaatgcttagccagttcgtttacagctctcccttggcgttcagttcctgcttacatggatcctgacgtcagccagaggtgaaaacttaggttcttctcggcccttttctgagcatgtttctgagcatgagcgcctggcgtgcatgtggcctttttcaactctctggtatacacaggagctgttaaaatcccttatttccccacatatttcctttccgatcttcttccttccttcagtctattatttgttctgactgttatctctttccccaggctgctccagacaatattgtgccttcaaatactttcagcaaaagctacctgcttctgagaatgctccaagttgggtgaaatgaggcaggtccttgcaccagttcttgagagaaccactagtcaggttgaagcataaaatcacatttggaaataaggtctgcattgctccctccagcactataaagttataccaggagtgtgggatgctaccttcatggctgctgctgatctaaagcagggagttggcaagcaggtgattaaaaacaccagagcattcttttactgcaatgtagctgcttctttcttcattaagctttcccctgcttgttgtaagttttcgactaaattccagagttctgcaaaaattgacagtctttgccagcttgttgtttgattttggagagatggagccctggggttccctgttttgccattttccatgacatcatgaacaagtatagttgtcataagcttttgattagtttccagagctctgataaagttgattttgacactgtttgctggtttattttccgcttttgtgaagggatagacttttggagttccctactctgtcatttttgctaatgttacttaaattcaggtatctttattagggaaaattgtccatttcagtattttactccaacagggagtcattgctggaagaagacaatgtctgaccactctggcttctacaatggtctagtcataactctcagatccagcaatttcattggcagaagctttaccttacaggagatgggccttattaaaaccataagcagtagctccattaaaccaggtacaacaatgtctaaatttttttttttttttttgagacggagtttcactcttgttgcccatgctggagtgcaatggctcaatctcgactcactgcaacctccgcctcctgggttcaagcaattctcctgcctcagcctcccgagtagctgggattacagacatgcaccaccacacccggctaattttgtatttttagtagagacgggatttcaccatgttggccaggctggttttgaactcctgacctcaaatgatccacccgtcttggtctcccaaagtgctgggattacaggtgtgagccactgtgcccagccaacaatgtctaaatttttaaaaggttgattatttagcttttattctcttcctcttgctttctttttttcccactagcacattttcttccttgcacttttctgtatttttttttttgagatggagtcttgctctgttgcccaggctggagtgcaatggcgtgatcttggctcactgcaacctctgcctcccggactcaagcgattctcctgcctcagcttcctgagtagctgggattacaggtatgcaccaccatggctggctaatttttgtatttttagtagagacgggtttcaccatgttggccaggctggtctcgaactcctgacctcgtgatctgccctcctcggcctctcaaagtgttgggattacaggcgtgagccaccgcacr

SEQ ID NO: 94844 - DNA, 30056 bp, Homo sapiens
  misc_feature (1)...(30056): n = A,T,C or G
ctcttgtagtcccagctacttgggaggctgaggcaggagaatggcatgaacccgggaggcggagcttgcagtgagccgagatcacgccactgcactccagcctgggcgacagagcgagactccatctcaaaataaaaaaaataaaaaataaaaaagtttgctcgacttggaaaacaaaacagaaaggaacagcaatattttatgcaaaaagtcgtaaaaagattatttcagtctttcattagtctatacaattaatttctgttttgctcaatatttaagaacacattagctttccaaaagagtcttggaagcttttttttcctctctattttaatggcacactttccaaagttatcagacactcgcatttaagagtaattgtcagcatcctatagctggttataaaccttcttttgaagaggattaaaacaagacaataattgtctctgaatgacaaaaaagtcttaggatagccacagtcaaagatgcaattgacaaggaaatttcattacttctgtagcatacaattttacataacaattataattattactgataacatacactaagtcaccaataacatacactaggtcattataggaatttcccataattttagaatgcataccaataatatatttatacaaatatggtctaaagaaagccaaacaccatttcatacttgataatgcttcctgtatgattttaatataccaaataagccaaataagtctcttttggactttagggtttttaccatctaaaatgattaatcaggtcagaaaaagacatatttagaatctgattttggaaagttcgtcaaatatcaaaagtttaaaacacttgatattataacataaaattccaggtcactgtaagtcatttatttagccaaaatgttaactcaacaatttaaaaaaggcaaaaggctttactcattgatagagggaagatttagctcttcaaacaatcttttctttcccttctttctcctgtagtttatttaaaaggtaaacaaaaatctttcattatcttttaatattacatgaaaatcttgttcaagagagaaagccaaatttcatctttgcatgagtgtactattgatgtcaaattcaattcctagtaaaactttacagacaaattttcctaacttcaatcagtttgaccataatgtaagattttcataaagcttttataaccctttacaattttttttgttaaagagtagaccaatgctctaagaaaaccctgttgtgcttttattccaatgttcaatttatggaaaaaccaaataatactcctttaactttagccaatatgttaacacagagaattgcttttacaagattagactttcacaaaccttccacgacttgcttagaccttccgctttctcctatctaagaacaactctttaaacttccaaaccaggcaaaaacaccctgccttcccatgccttcttataatcttttaccaaacacacattatactttccttacacactgtgcatgtaaaagtgttcctccagtaacctcagttacatatggtacaatgttaactcttagcaacttttatttttggcgaaaaatttggtaagtgattttatttgtgtaccaggtgtagagcttggggcaccagacaaaagtgcagataaggtctgaccccttccagcatagctaggggcatggctaactccatatgttcccaggccttacatagacgctaatggctccaaagaaggtaaattgaacaattatcaaaagtcagagaagtagtttagtaaacctagtatctgacctgcctaatttagaccaaatgtctaaatttcaaagacatttttattttaccaataatctttaaaactgccttgcttttccaaagatgactaaagtcatgtgaacaaaaaggcattagcattttaatttttctggcaaaatattttatttaagtgcttatttttatttaagccaattaaatagagctcttttatatattttggttgtaaaacatgactcacagggatggtacagaccaagagaaaatacccctccatggtcacaagtcaagctcccaaggacataaaacaagacgagggggaatcctcatccagtttttgtttcagtgacctgaagcaaagttgtcaactgaccagtttgctgggccagcttgaatagtgggcttacaggggtcctagggccacattctatcctatgataccccttttatgacagaatgacacagaaagccaaattcatagcacaaagtacaccagattcatcacagcctaagactagcctcacaaatcctttttcccattcatcaaaaccttgcagaggagacagtgatttttaccattcactcaactggtttgcatagagagagagagaccaaaggcctgactggtaagaaattcttacccttttgccagcatgccaggtttctgggatccctttccctaagcagccctcgtgaccctgctcacagcaccataactgtgggggccaagccacatcgcaaagcaaaaatcacccttttccatttcatggaaccataggaaaagcctctcaattttgcaagatgctacacaacaagttgcatggaggaatcgaatcaacattttccattctggccagaacaaagtgcacttgacaaaacacagacactagccacccccctcagcacccaatatcgacctggcaaggctcaaaacttcccccattggcccctgtagtgtttaatccattcaaagtgggggcggaatgactgccaaccaggagtttcaacaggtggtttttgggcaagatggaagagtagatcatcacccagagtgacagagaagacagacaagggaaaggcgagaacgagagagaggaaagggaagggagaagagtgttgcctgtggtgggttgcagaggtgaggagctcacagaagccagagaaagacccatccatcacagtgacactgaatcaaaagttcagacagctgcttgtcaaaaagggatcttttccagcagtcccatcagctctcaagttttcccctttgggggaggaaaaaaagctccccaggtcccatgatcctgcacatgcctaatcttgtcacccacagccatcagcaaagagggcatggcaaattaatccaaatagaatggcggttaacatcctgcagtgctgaatccatttttaaccaagagggctcttactaagggtggcctctaacattctgaagttgagccttcaacccaagtttgaacaagcattcttgttctttacaaagaggggcctctaactccctgtgtcttaggagggactctaactctcctaatttgggcctctaacccaattccatccattaccctggataaaataccccaccatgtacccaaagttggtcaactggtgctgaagtctatttcccttgggtcagaggtctctccagtgttgtcccttcatggtttctcagcaagatgttatcagaaaggggttccagtccaggccccaagagagggttcttggattttccacaagaaagaatctggggcaagtccgcagagtaaagtgaaagcaagtttatgaagaaagtaaagcaataaaagaatggctactccatgggcacagcagccacaagggctgctggttggctatttttatggttatttctcgctcatatgataaacaaggggtggattattcatgagttttctgggaaaggggaggagatttccttggaactgagggttcttccccgttagaacatctagggtaacttcctgacgttgccatggcatttgtaaatcatcatggtgctggtgggagtgtctttcagcatgctaatacattataattagggtataattagcagcaaggacagccagaggtcactttcattgccatcctggatttggagggttttgaccagcttctttactgcatcctgtttcatcagcagggtctctgtgacccgtatcttgtaacctcctatctcatcctgtgactaagaatgcctaatttcctgggaatgcagcccagcaggtctcatttacccagcccttattcaagatggtgttgctctggttcgaaggcctctgagagagccactggatctcgcaattatagcatacaaggtgtatgtcatgttataaaggttaaaatagacagaattaaacaatatattgtttagggatacatacctatgtgctaaaattataaagtaaggcaacagaatgattaacacaacattcagtattgtggctaccacctcttgggggtagcagggagtacagaacaggaagaacctggagagttttaaagatgcaggaataatgtgttatttcttaagctggaaggcacatgtggatcttttagaaaataaaagattcaaatataattgtcacatgcgtccatgtgaagagattccaccaacgggccttgtgtgagcaacaagactgtttatttcacctgggtgcaagtgggcggagtccgagaaaggagtcagcaaagagtagtgggattatcattagttcttataggtttgggataggtggtggagttaggagcaattttttgtgggcagggggtggatctcacaaagtacattctcaagggtgggaaaaatattacaaagtaccttcttaagggtgagggaatatcacgaagtacattatcctaagggtggggagggtgtattgtcataaggtcaattgatcagtgagggtggggcaggaacagatcacaatggtggaatgtcatcttttgtggttcttcagttgcttcaggccatctggatgtatatgtgcaggtcacaggggatatgatggcttagcttgggctcagaggcctgacaataatgagtattatgtgagacatggttgggactcagtttagcatgacaagaaacattaatgaattcaagaaaggtttgtctcctctccaaaatcaaaaaccaaaagtgcataacagtgtttagcacatttctatttagttaaaggtaatttaagatacgtgtttatgacttgtttggataccatataacatctagtgatcgcctctgggcagggaatacagaacggcaatgggaggcttatttttcattgcgtaccatttatataatttgaattcctcctcttgtgtatcttttactgaacggaaggttttgagagagctgggggaagtagctggtatcaagcaggaaagctgaaggtgcagatgggcagggggctggtgcacccttctgccaagctctcctgccagaggctccacggccaccaggcctttctcagaactttgggatggaggagggcggggccggggaagccttttaacagagtgccctaaaatatctcgggggctagggctacggaggggaaaggagaaatcagagacccttgtttggcaggtttgtcaactgcagattttttgcagggaaacaccccaccgtccccaccccaggacactacagccttagacctccctgatcctggctttggcaactggtcagcagcactctggaggcggctgttttgaagggccaaggagaggggctgcctgagaatgaggatggcagaaaggggcccacggttttccgcctcccaagactacgagggtcgggaggcccatgtaagggggccctcgctcggagaatgagaacttccctccctagtagccttcacccccctcaatgcctcccaccccaaaagatctgctgggcccacgttccagcgcaacgcggtggaagacggccctcatgtgccagtgcggaccctcgcgcccctccagcctgcagccagccggccgctcctccagcgcgcaggcgcaggacggaaaaaaaaaacacaaaaaaacaacaaaaaaaaaacccaaaaaaacacaaaccacagctcccagcagccctcgcgccgtccgcgcgcagccgcagagcagaggctgccgggaacgcgggcccagaggcggggcgagcgcgcgcggggcggaagtcggccaccttcctccgtcccggccgttagcccagccaagcccagccaagcccagccaagccccgccgatcgcgggcaccggagccagccccgcagcgggtgagtgactgcgcccgcggccgccggcgccctgccccagccacgggcccggacccccgtcccggagcctgccgccgccctccgaccctgccgcgtcccgccccctgacccgtcaggcccccttcccgtcccacccgtgcgggatctctgccccctgactcgcagactgggctgggactctgccctctgacctgtgggaaagtccccttcttccgacaggcggtggacaccaccccctctgacttttgggacacctcatccctgggactagcgtggggaccattaccctctggttagtgtgggcacccctcctctctaattagtgtggggaccattcccctctgattagtgtgggcacctcccccctctgattatgtgactcctccccgctctgattagtgtgggacaccccccttctaattagtttggggaccatccccctctgattactgtggggcacctccccgctctgattagtgtggggaccacccccctctgattcatgtggggcacctccccctctggttagtgtggggaccatccccctctgattagtgtgggacgcctccccgctctggctagtgtggggcacccctcctgggaatgaccccctcccaccaccttctgacttcaaatacccctcctctggtctatgcagggtctccttggactgataagggaattttctccctctgactggcacttggtcaaacctgtaacaggccaaccttccccaccccatcccagtccttgctctccctgccctcatccaatttggagccttcctccaggcacacagctcactctcatcttcctgcatgcaaatgattcgccctccccaccatacctgtctcacacccctactgccatccggtctggattctctcatccttggagactggtacctccttgccagtccatgttgcctggtgcctttgcttctccctccgaatggtctttcccttgccctctgtgtaccctaggcttggcacagagcacctgtgaccactcttccatcagcagacacatctctctcccaaacacctttcccccttagtgacccctggaaaagccgtctcttagtgtcccagctccatttctyattttattcttgaggttgtatgccctatggcctttcctaccacattttcaacaaagcagaggtttggaaatgtgaggctcttggtgtcaagtgaatccggctagctctccagtgtaagggcccaaacttgaaacaagtgtcaggtcgtagaaggctcctaaaaggaagcgggtgccgcagcccttcaggatccgctatctcccagctcttcctccctctccctctgaggagctttgctgagaaaggtccctccaggcctggaccacagaccctccctgcagccccaccscaggcctctcagcaggacagtctggctggagcctgtggaacggcagtggggctcctcccaggtgctcctccctgctggcctcaatgagccctctatcctagcacacgccccygctgaaaggcacactgaaggagccaaccctctcccctctggacgtggcaagggtttcctgtcggggcagccccaggcatcttcacggccaggactcaggtgaagcatggatttgtccaggcactgtcatgaggccaccgcagcagtgtggggaccaacttctagtgtcactttttcatgtccaaattaacgtgatcacaaaagagaatgacatgtcacaaggtggtagagggaaccctccactcgcagcgggataggacccctggaccctgggacacctcgctggaggggcacatctgaggcttgacgcttctgattgccagaggtctcctttcttccccttaggctataaccatattttcctagcccatggcagcttagtaaatgtgttggtgtaaaagctcttggtactccagaacgttttcactcacccgtcactgtgcacctggtctgcaggacccccctgagctgcagagtacgtgaggagacccagggtgtggtagcagcagttctcctggccctgtgggtgtttttaccctgccacctggatgtggctttcgaggtgtgtgtgcctgtgcaggctcccccaagtacatatggcccgtcctcggagtctcggtactttctggcaaccgtataggtagataggtagatgtataaatgctgtagtgttttctctttcaaaaacagaagatctgagacttggaactattgtccaggtcctgaaatgggtcagtactatcacaaggaggtcatttttctattgtttgttgaatggtaccagggatgccaaggacacacagcattcattcttttcactcagtgcactctgaactatcgagatttcctggaaagctcttatgaaatgccaatatcaagggaattaraaacttttatattaattcttaagaatgttyatgttgattttccttttactttaatcaagatggttaattaggaaaaaatcatcctggcagtagagaagtctgtttggggagacgttctgttttttgttttggaccctgctcgtctttgtcatgcgtgcagtggtcatgtggagcgcctggttcccaggcaggacgctgctccccgcgttcctctgggatggttttatgggaagtgaagaaggcgttgaagtctggcttaagacttaagacagtgcgtgatgccaccatgtgggagtggggcagaggtgagactgggaccccccagaatggctctgagggtgttgccgggttgagtgaaagtcctggcgattcggcctttgtgtcccgggagccgagcctggaggaaagcgtgaggagagaaggtggcagtaagcaggtgggctcgtgcaggtgccaccgcggtgtggaaggcagccctgatccaggtccatggggcgatgatcccatcccgttattttcacacactctggaaaaggacaccttcccagatgtgtggtgccatttggaatgtgcctttcaactgagaaggtcgcyttttggctaaaattcctccaggtgtaacatcgatgatacaaattaagcagacacagcctctttacaaggcagtaactgcaaaccgtagagggttctgaagctgtgcgcccacaccatagacagtgactggtcctggcccttggaaaaacctggaggctctttcccctcttcctcctgtgattggtggaggaacagctccccgagatgtccacgtcctaccttctgagcctgtgaatatgttacattacatggcaaaggggaattaaggttgctgatcagccggccttaaagtagtgagatgatcctggattttcccagggagcccagtgtaatcacagggtccttaagaacagaagagggaagcagaagagccrgagggagatgatggccaagagccttggggaagtgcagtgggcgggctttggagggggaggaggggccaccaggcagggaatgtgggtgcctccagaagctggaagaggcatgagaatggagccatggcccgtgtgaggcttctgtcccacaggacggtgcctgctgcctgccgtgtgctggatactaggggcggggacaggtgcagaagtcagtcagatcctgagcttgacctttaaggagcgtgctgtctgtggaggcaggatggcctaaccagactccctgtgaccttcttcctttctggtttccttgtactgcccacccccgaggagatttgccgtggaatttgcaggtacaatagttagccttgcaagtgccaaagcaggaatcaggtaacgttttcaaggagtctggcccatagcaggcattaataagtgtttctttgagatgcgccacccgtgttctctcaggcgctgttagcaygagtgtgtgaaggccttggcttctgccttggcygtgctgaagagtctgtaggtcagtggggtttgctctttaccatggcagtgaacacagtgggcactctgaggcctgcctgcctgctctctgggtgtgggaagggaaaggaaggtagctcttctccagagataaggggttggcgcacctgccacctgcctacccgtcccttccaaggaggtgggggctaggatgtggcggcctcttaacaggatgatgtggcttcctgccctgcctggatcctgaaagggaggagcctggcagccctcagtaaacctgctggttctgccacctgtcctattccactcctgcaggaagctggagaaacaaaccctcttggctgtctgctgtccagggagtcgccactcccttcattatagccttgctcagagtgcagcggcaggcctggggatggcctcgggaggtaggtggcccctgagcccttctcctgggaaagggcagcagcagggagacgcctcctgggtgtgcacagagaaaagcacagtttccctaactccccgctccctaactcctcgctctttaactctcacctccctaactcccccctccctaactcccttctccctaactcccctctccctaactcccttccctaactcccctctccttaactcctctccctaactcccccctccctaaatcccctctccctaactcccttctccctaacccccctctccctaactcccctccctaactcccccttccctaacccccctctccctagctcccctctccctaactcccttctccctaactcccctccctaactcccctctccctaacccccctctccctaactcccatctccctaactcccccctccctaactccttgctccataactcccccccagctcccctctccctaactcccctccctaactcccctctccttaactcctctccctaactcccccctccctaaatcccctctccctaactcccctccctgaactcccctccctaactcccccttctctaacccccctctccctagctcccctctccctaactcccttctccctaactcccctccctaactcccctctccctaacccccctctccctaactcccatctccctaactcccccctccctaactccttgctccataactcccccccagctcccgctctccctaactcccctctccctaactcccctccctaactcccctctccttaactcctctccctaactcccccctccctaactcccctctccctaactcccctccctaactcccttctccctaacccccctctccctaactcccccctccctaactcccctctccctaactcccctccctaactcccctctcctgtaacgtcctctccctaactcccccctccctaactcccctctccctaactcccctccctaactcccttctccctaacccccctctccctaacccccctctccctaactcccctccctaacctccctctccctaactcccctctccctaactcccctccctaactcccccctccctaactcctctccctaactgtcctctccctagctcccctctccctaactctcctctccctaactcccctccctaacctccctctccctaactcccctctccctaacccccctctccctaacacccctccctaactcccccccaactcctctccctaactcccctctccctaactcccctccctaactcccctccctaactcccctctccctaactccccctccctaactccccactcactaactcccctctccctaactcccctcttcctaactcccctccccaattcccccctccctaactcccccccaactccctactccctaactccccgctccctaactcccagctccctcactggtggctcccctgcgctctgggagtgtcctgtgggatggacagatgcctccgtggtgccttgcaagccttgcaggtggttattcctcctgtgagtgctcctgtgagtgctctccaggcagcagcaggggtcctgtccctgtaggcccctgagtctgggagatagctggtttgcagccccactgaacaggagagcctggctggccacagaacccatgactttgctgtagtccctgagtcctcttgttgctgattatctaaaatcaaaccattactctgcaggcactgggtttgtcaatcttttcacaataaagcgagcatttaaactgcttaagctttgaggggtgtagggagaagcctcacacgagccccttctggaaaggactttgtccatcttgtgtcttaccctcgccggttcatttctgttgtttctggctggcaacaaacaaaagagcccccccaccccccacccccgaaaaagaacccagctttttaaagaacatgcaaactcttgcctgcagcaggcgccggcagccaggcaccccggcagccagtggtagctcatacaccagcatgggctgtggcaaaggcatctgatttgaaatttttttgcaaaataaaataattccttggggtcctgaaggagagatgaagcccaagggaaggtgttctggtgctgaagttaaaggaattttctggaaggtacacagagttctcttgtcactagaagcagtcccttgtttaaccaaaggtggctgaggcctctggagtctctgctgatgaactacttgcagtcgaactcgatcatcgnnnnnnnnnnnnnnnnnnnnnnnnnnnnnnnnnnnnnnnnnnnnnnnnnnnnnnnnnnnnnnnnnnnngaggagagggggcggggaacacaggggccgcggacagaaggaagacggacaagacgaccggacgaaagggcgccgcaagcggagacgcggacaggcacctctgggtccatgtggtcagaggacatgagcctcccgggtggggagcgtgtgccacggtgtagatgccaggagtctggaataggaaggcgtgcagtgttgcacagcgacctgggagaggtcctgctcctgggagtgcagggggaaaaacccactgaggctttctctgcaggctgagaygtttgtccttcagatggaaggcattgggatctactagacttggaatccagacttgctttttggaaaaattattctgtcagttttgtggagggtgatttgagatggtcttgaccagggatctgtcgagggacagggagtcagtattttcagcctccacagtctgttgcgaccactcaacggtgcagccagactcagcatgccagggaggagtcctagctggctttaatcagccacatctacacaccaggacgtgactacacagcaggccgcgtctacgcaggccgcgtctacacaccaggcagagtctacacaccaagctgcaaccacataccaggccacacaggccgcatctacacactaggcgggagactgcatttggcccacgggtggtagtttgcaaccctcccagcaggcgagagggtacttgtagagtgagtgagaagcagtagcagtcagcccctgtgcacagttctctaaccccatcagcatggctccgggaagtaaactgaggccaagggaagtcccttggctgagcccagatggtctatatcaggggtgtccaatcttttggcttccctgggccacattggaagaagaattgtcttgggccacacataaaatccattgatagctgatgagcttaacaaaaaatctcatctcatcatgttttaagaaagtttacgaatttgtgttggaccacatgttggacaagcttggtctagatcattagaccragactctgagagtcatcagggtgagatggaactggagccgaggctgtgtggatggggagaagggaagcgagtctcaagctgggtgggacacgtggggctggggagggaggagggttaggacgaattgcttcctgggatggctcctgagggccggcactgccaggacagggagttcctgaggaggacctggtttgcggtgcctgtgggtatcggatgaggaggctcagagactaggtcaggctagaaaggcgtgggggtcttcaccttagagggcaggccctgggagaggtcagtgggctgccagcagtgggggccgagaagacctgcctgggaggaggcccacagagagtgcccccctgcctcgaggagggacactgacaatgtgctcactgggtttgccactggtgaaggcttcaggtggctgcttctgaggattagccagagggaaggagagggtgtaggtgtgggtgctcttgtaccatggtgggcgagggggcctgggcgggggtgggaagggacagaggtgccggggactcagggaagggttttccttcattaacagattcgccatttattcagcagcagttgagtgtctgtgggagtgtggggtctggaggtaaaatggtgacaaggtgggcgacttggggcagcctgtggatggaagggaggaaccagaagagcaggtgcccggcggctggggggactgacctgagtggcaggtgtgagccccacccagrggcctcggctgctgaagttggccacagagtggtctcctgggagaagtgggccggagatttgacaggaatggtgaaggtgaggacagtggctctccggagtgctgagggagttgaacagggaagaacatgggggttccaggggctggtgacgacgacacctcacgatgtctgacagcagtctatgcaggcaccgttgttctgtgctggcaagcaccgtcttcccgggcctgcagctcagwtgtggcagctgagcagctcgatctttggggtgcttgatccaggttgtgggttcataatatgcctaaggtggggcccccggtagagtgcagaggggctgttgaagaagtggctaatggctcacctggcatctctttcccttcagccaatgcgtgcagactgtctgctccctgcctggcagtgcgtcaggtgctggggctgtgacagtggccagatccctgccccaggagcagaaataatcacctagccaggcagggacggtgggagagccggagcggcatgggagggagggcgagtgggcaagtcttcccagggagctgatgccccgtaggagagaccgagctgctggtgcgaagagcaggcccgactgttccaggcagggggaactgcaggctctgccagggccagtgtggtcaggggacagaaggaggtctaygtagccagccggcaggcagaggagatggtacagtgtgagggctgagcgggagcagagtgggttcaccccaggacctgaggaagccgctgaagctgggagtgtgccatctgatggatgctacttcatggcaggtggcgagggagtgtcaggggatgttggtggggggcagctggcagggcaacttcatggcggggggtatgggagtgtcaggggcggagaggcaggaggggtggagggaggcagccggcatggcatggtgaggaagggccatggaagaggacagaacctgtccacggagtcaatgctgaggaaggaagacggaggatgaggccagtcaggtttttcgtggtggcagtgccttatgtttttatcgaagtgtatattcacacagaaaagcacatctcccaggatcctgagagagcttgaaccagaccactgtggacacggtggccacccgtcaccactacccttcccaaggggagacgaggagcaagtaggcttgagggaaaagctgcacaggactcgtgtcttgaaatgtctaagacgcatgtcagaaatgcaggtaagggggggtgcgggtgctcgcacctgtgatcccagcactttgggaggctgaggcaggaggatcacttgagcccaggagttcaagactggcctggacaatataacgaggcctcatctctataaaaaaaattaaaaattagctgtgccccaggtgtgttggctcacacctgtaatcctggcactttgggaggccaaggcaggtggatcacctgaggtcaggagttcaagaccagcctgaccaacatggagaaactgcatctctactaaaaatacaaaattagacgggcgtggtggtgcatgcctgtaatcccagctactagggaatctgaggcaggagaatcacttgaacccaggaggcggaggttgcagtgagccgagatcgtgccattgcactccagcctaggcaataagaggaaaactctgtctccaaaaaaaaaaaaaaaaaaaaaaaaaaattcgctgtgcgtggtggcacacgcctgtagtcccagctacttgggaggctgaggtgggaggatcgcttgagcctcagaggttgaggctgcagtgagcgtgatcactgttgcctgggcaacagagcgaggccctatctcagaaaaacaaaaaaagaaatgtaggcgggattggcatagcaggtaagatagagtaattcgagctcagtggagacttcttgggcctggctggggttttgaggccttgggactagaaaaggggcagggcctggatgcagtcagaggaggatgtccagcacggggaaccccagccctgctgccgggaaggccccggtgatcagccctgtgaccacctcagggggtcctgagaggcctgccccttaaagggagcatggagtcttccctgcgggcctggaggaactgctggcagcccccctgtgctgttaggaggatcactctgagcagcaggttccacgtatgtgccttgttcactccttgaacctcaccctggggctaaaacctaggactgtccgaaagttccatgtggaattgtcaccctgtttttgtatcttctcagcccagcaggctgcggcgtggagaagggggtgtctctggtgggggtgtctgttgctggctgccgtgcaccagggcctcgtggtccacatatttggggcccagaattgcacggagccactggagtccccaagcccttcccaggcgccctggcagggaggacagcgtctgcccataaaggcacatgtttgctgctttgttgttttctcaaggaggacccagccagggaagcttctcaggccgggattcactgagctatagttggagggcagagatatggaacctctgcccagggccagtgttctcgatcgragcaccgggagctgtctccccacgccccactgtggcacttggcggctgtccagagacaggcagctctcaccaaggcggcgcagacgtgggcctggtgccccatggctgcactgagccatcatgctgtatgcccgggaagtgggcttggcgacagcagtgaagggctgcagttcctggccgccaccagcaccctgaccctggggctctgccacagagccacgcctggggtggagggtgagctgggagaggcctgcggccgagccaggccccgcagtgagccgagcagttctttggcgccaaggcacagacacgctggcctccaggcagtcagggcagcgcagactctggtmcctgcagtcatttgcattaatagaaaggcgccaggggacagacactgccaaaaacaacaacagatacraaaaagaaggagtgtttttatttggtttggatgtgtttggtattccaatgctgcargagcctaacccagaggaagtggagactcctttactgcacatctgtctgctccaggccaggcactgttctaggagccaggatacagaggtggagacagaaacaaacaaaccgataactgtatacaatactctaacgtcaggtggggacaagggccaaggacccagggacggagggtgatgtctgcagcagggcagtcagggagggcttcctggatgaggtggcatttgagtaaaatacagacctgtaccctgtctatgatcctatcccacttcaccccgtcagccttcccctcccacctgactctcctgcgcttctctctttagagggaccacagagcaccagcctgcatggaacttccttcctcactcagcttyccacgttgccagctgggacaggggagatggagtaattttgctgtggaaagacttcacgtcttgccgaatgaaagtaagcaaagatactgctagagtcrggaatctagagtcgggaattcattaagccaagggagtaagaatggccacagagtagtgaaatactgtttcttctggaaaagtcagcctccagcgcctgcagcttccggaactaagatgtgactgggcttgcggaggcgctgactcctctcctccctccctggctgtgcaggtcccgcctgtctgtcacgctgatgcccgtgcagctgtctgagcacccggaatggaatgagtctatgcactccctccggatcagtgtggggggccttcctgtgctggcgtccatgaccaaggccgcggacccccgcttccgcccccgctggaaggtgatcctgacgttctttgtgggtgctgccatcctctggctgctctgctcccaccgcccggcccccggcaggccccccacccacaatgcacacaactggaggctcggccaggcgcccgccaactggtacaatgacacctaccccctgtctcccccacaaaggacaccggctgggattcggtatcgaatcgcagttatcgcagacctggacacagagtcaagggcccaagaggaaaacaccyggttcagttacctgaaaaagggctacctgaccctgtcagacagtggggacaaggtggccgtggaatgggacaaagaccatggggtyctggagtcccacctggcggagaaggggagaggcatggagctatccgacctgattgttttcaatgggaaactctactccgtggatgaccggacgggggtcgtctaccagatcgaaggcagcaaagccgtgccctgggtgattctgtccgacggcgacggcaccgtggagaaaggtaactggaccctgaggttttatggaggtgtgggtggggagtgggagctcagggcctggctggcaaacacaggcacatggtaaagaattcacacacctagaagccagggatgtggtgagggagcacgtctccctcttgctctgacctgcggcccccttacccttagccaggagcatagcctactgtcacttcacactgagcagtttctaggaggaagagcttatcgctagaggcctgtgggagacgtggggaatctctccaagatgttttcggctgtatccgctgctgctctcggagcctctgggaacacgccctttttacaccttcaaaggttctcaagaccacgctaggatgtgcctaccaggagccttgccctgaaagccatggggacagatggttctcactcaaaacccagactttggtttcatgttactgaagggtaaactgctgcccagccctcctctccctgaaccccagcagggggagggcatgtgtgagctgtgccaacccccctggagtggagcctgatgccagcctttttgttcaccagaaaggaggtgctrcttccacagggcagggacaggctttggggaggcacggtggccagtgtcttcctccagagaggagctggggaggtgccaaggacgctggcagaggagctgccagctcctctgagctccgtttgtctgagctggcggtggatccccaccttctagaaagctaaatgccaccgcaggctttctgaggtcaaggaggaactgcactaaacaacggcccacacagttcatggccggccaggccctccccacacccggtgataaaatcttcagtgtttgcccagggctgggcaggggacggacctcacctgaggtatcaactgaggcgttggtcgcctacttcctgcctcgcacttgtcagggttttaggcaaccctagtgtagttctgtccttcccttggatagggaggaaagcggggtacagggagctctggggttgggctgtactcaggtcatccgggagggatggaagaccctggcatggagaatgtctcatcgcacaagcagaccaggagaccgcaggtccctccagggccctgcagagaagctactacagtctcgggcagttcagagggcacagctccagctctcaggggcaagaagctggcaaaatttggggaaagcaaacagaagttagaacaccagggtgtagggatgataagaatacacggtagaacacaggctcccacacagcctgaactgtggcagccttcaaagttaggcttattttaaataaatcagtttaaaaaaagcaaaaacagcttctgaacaaatccattgaaaggaagactgggagccccagcaccaagcccctctccggccactggagttagagtgatgctcggtgagacctcaggtgtggccgagggcagcacccgcactcccctgggacacacgtgccccttcagagtgctgtcacttttcagcttttctagcctttaaggataatcctaaggttggggttacagcttgaggagcggggagttggggatcagaggagacttgagagtggtcactgaaccttcaggagctgaggggagggcagccggccggccctgggcgggagccaggtgcgggccggaggggaggcagktgtggrgccgggcgggagtcaggtgcggggtctaaggacaggtgcggggccgggtgggagccaggtgcaggggtgcggcgggagctgggtgcggggcctaaggacactctgcttggccaggcttcaaggccgaatggctggcagtgaaggacgagcgtctgtacgtgggcggcctgggcaaggagtggacgaccactacgggtgatgtggtgaacgagaacccggagtgggtgaaggtggtgggctacaagggcagcgtggaccacgagaactgggtgtccaactacaacgccctgcgggctgctgccggcatccagccgccaggtaagagacgcctgccccagcccacagtgtggcttccacagcccagtcgctgggaacctgcttcctcctgcatttgcctccaaaaccgttttttattttagacatagtcttgctctgtcaccccggttagagtgcagtggcacgatctcagctcactgcaacctccacctcctgggttcaaacgatttttctgcctcagcctccccagtagctgggactacaggtgtgcaccaccacgcccagctaattgtatttttagtggagacagggtttcaccatgttgcccaggatggtctcgaactcctgacttcgggtgatctggtgatccacctgcctcggcctcccaaagtgctggcattacgggcgcgagccaccacacccagcctccaaggccgtttcttgcttgattttagtgattttggttgcctctgatggtggcttccctcaggccagtggattctggcggcaaatgagctgttttctctttcctgccccactcgccctggcagctggcctcctagcatcccagcctgtggcccggttgtctgcactggtgggtcaggccctgtccctacccctggcgctgggccgtggtgttccacaccaacatagggccagcagcactttggcctccccctagtcaggatggagtaggccttaggtgcctgaggttcaggaggaagtgactgagtctgtgcctggggccccagacgctgtctcctcttccttgcagcctcaaggcagcctccccgccgatgcctccccacatccaatgggggtttgttccctttccttgggttcctctggatcagccccgaggaggctccgatgagcccaaatccctgatgcagctcacaggcagctctcggtggaacgggaggaggcttcaagggagsgggtgctgcaggttccctgcatgggataaccgagaacacagaaccttccagaatcctggagagcagggaggggcgggttgctgtgagctggtgggccctggtggtcgcagccccttgcctgctactgcgcacggcctgatggtgtggggctgggcacaccaggccgcatgcgtgtctgacccgcggtcacccggttcccaggctacctcatccatgagtctgcctgctggagtgacacgctgcagcgctggttcttcctgccgcgccgcgccagccaggagcgctacagcgagaaggacgacgagcgcaagggcgccaacctgctgctgagcrcctcccctgacttcggcgacatcgctgtgagccacgtcggggcggtggtccccactcacggcttctcgtccttcaagttcatccccaayaccgacgaccagatcattgtggccctcaaatccgaggaggacagcggcagagtcgcctcctacatcatggccttcacrctggacgggcgcttcctgttgccggagaccaagatcgraagcgtgaaatacgaaggcatcgagttcatttaactcaaaacrgaaacactgagcaaggccatcaggactcagcttttataaaaacaagaggagtgcacttttgttttgttttgttctttttggaactgtgcctgggttggaggtctggacagggagcccagtcccgggccccatagtggtgcgggcactggacccccgggccccacggaggccgcggtctgaactgctttccatgctgccatctggtggtgatttcggtcacttcaggcattgactcaaggcctgcctaactggctgggtcgtttcttccatccgacctcgtttcttttctttcctatgttcttttgttcagtgaatatccctagagctcctaccatatgtcaggccctatgcctcaccctgagaacgcagtgagcatgaggtggacctgtttgctgggaaccccaggtcacccccttttcttcctactctgtgcctggagcatcatgtccacccctgcagatccttggaaaagaaaatgtttatgttgcagggtattgcatggtcacgagtgagggcaggcccctggggacacatctgcccacagctgcacaggccagggcgcaggcacatctgttggttctcaggcctcagataaaaccatctccgcatcatatggccagtgaccgctttctcccttcaagaaaattctgtggctgtgcagtactttgaagttttaattattaacctgctttaattaaagcagtttcctttcttataaagtggaatcaccaaatcttatcacacagagcacagtcctgtagttacccagcccgctccagcagtgcgggagattgtaaggaagcggtggcggctggtgaagcaagtctcacatgtcggygttcttggccaatggatacaaagataaagaaaatgttgcctttttctaggaactgtcagaaatcctcatgcctttcaagacttctgtgaatgacttgaattttttattccctgcctagggtctgtgaacgaggcctgtctcttccctggggtttctttccatggcctttatttctcctcttccagtgggagttttgcaggctcttctctgtggaaacttcacgagcgttggctgggcctcggcttcgctggagtgtactccagggtgaaggcagagtgggatttgagacccaggttaggcacgacccaggctgagaagggacgtttccatcattcacagtgccctccccacagcactacctcaccccgacccccaccctcactcmtaccccaccccgcgatcgtcaggggtgccacggtgggccggagggtgccggctctggctgtccctgtgccggtccctcacaaacctctccccctttgaaactcaagcacagctgcgaggagggcagcgaggagggacccctctctcatggttgtctctttcccccgctatgtcataggtagtggaggaagcgaaggaagtgaacgctraatgtgacgcatttctgaagagctcagctgtcaccgggcatagcctggaagccccaagtctgttctgactttgcctggctgtctccttgacccgcctcctagatcattgtccttgatgtccaggctgggtcatttaaaatagagatgcaatcaggaaggttgggggacttgggactgtggctgaattgagaccttgctgatgtattcatgtcagcacctgagtcacagcccaggtgcccggaagcagcctcttcgcataggcagtgatttgcgattactttaaagctcacctttttkcttcccctctctgttcgctgctgtcagcataatgattgtgttccttycctatgggatccatctgttttgtaaacaataaagcgtctgagggagtgtagttttctgtctcccggtctgtgctgactgtttgcagaggcctggccacgagagcgcctgcgcaggatgctgggcatgcgcacgggagtcgcccgccagggcatcccatctggaaactgcgtcctccagtccgccttgtcccactatctcaaggcgctccaagagcacgagcgctgtggtcagaaaggtggggtctgaagccactgcaagcccgatcctggctctgtccccatccagctgcatgtccttaggcaaatgacctaactttcctgtgcttcagtgtcctcgtctgcaaaaggatgctcatcgcagagctcatcccggggctgcagtgaacggtaagtgactgggtacgcgcaaggggcttagaacatcacctgacgtgtgctgggcacccacgtgcccgttttgttgctgctcatccctggggagccatctggatgacttggtaaggaggcgctcaggtgagaggtcagggctgagctggtgtctttagtgtgtcagtgagtccacaggaacagacgaggtcgctccaagtgacgcatggaagaatccccatcactgaaaccacaggcgccagggaggcaggcactggccaagaaagacctcaactagagacaggacaggggcggccagagagggacagaaaaccgggagagcggaatcagaaagggcaattgcacccacatcgaccccttacccttcagacccactctccttccccgcctcctccgggtcccagacccagtgaacctcctcagtgccctctgggatggcccctggggagtccctgactctctctggcactcgcctctcaaggcagccccctggtgccactcccagtgtctgggctgagtcccctcccctggtctcttctggcctgggagtgtgacatgggagtgacagctccactgttagcagctccagatgctacagcggcccctcgtgccgcccgcacgccctgctgtctcatccgtggtaaatggtcccttcactgaagcctccttagatgatcttcattcgggtgtcgtcttttcctgctgggagcctgaccaagacagcgctgcagggaggcggcctctgcagaaggaccagcgcggcagcggggtccccagagagactccatgactgagcagcaaggagaactgggcgttctcggcgaggatccacagaacaacagttccagaaaaagccagggcgcatcgggccgcggcgggttgggataaggaaccgcatgtaagctcttgaccatctgtttaagaagctgtgacatgcgggactcgtggggcagtgactgccggctccacactcatgggtccggcacacagctcatctgcaaatggaagactctccagtcacctcaactggacaaaaaaacgagattcagtttctttcattccacgtgttaatcctgtattccagtatactttttttcttttcttttttttattttggggggatggagtcttgctctgtctcccaggctgaagtgcagggacacgatcttggctcactgtaacctccatctcccaggttcaagcaattcttctgcctcagcctcccaagtagctgggattacaggcgtgcgccaccacgcccggctaatttttgtgtttttagtagagatggggtttctccatattggccaggctggtctcaaactcctgatctcaagtgatccatccgccttgacctcccaaagcgttgggattacaggcgtgagccactgcacccagccatggtacactattttattttattttattattttattttattttatttattttattttattttatttattttattttatttattttattttattttattttaagacggagtctcgctctttcgcccaggccagactgcagtggcactatctcggctcactgcaagctccgcctcccgggttcacgccattctcctgcctcagcctcacgagtagctgggactacaggctcccgccaccgtgcccggcaaattttttgtatttttagtagagacggggtttcaccatgttagccagtttggtctcgatctcctgaccttgtgatctgcccgcctcggcctcccaaagtgctgggattacaggtgtgagccaccgcgcccggcccacggtacactttaaattgataaatctcaaggtaagttatcccttcatgctgttaaaagagttaaagcaaaaataaaataccgtcacactgtgaaaacccctggcccagatggcttcacttttgaattgtaccaaacatgtaagggagaaataatacgaaagcaacacaaaatcttccatgattctgggagttgggaaacttttccaactcattttatgagggcaccactatactgataccaaaaccagaaaaatacattacaaaaaaaaaaaaatacagaccagtatccctcatgaacatagatgtaaaaatcctggccaggagcagtggctcacgcctgtaatcccagcactttgggaggccgaggcgggtagatcacgaggtcaggagattgagagcatcctggctaacacagtgaaaccccatctctactaaaaaatacaaaaaagttagccgggcacagtggcgggcacctgtagtcccagctactcgggaggctgaggcaggagaatggcatgaacccaggaggcagagcttacagtgagtcgagatcgcgccactgcactccagcctgggtgacagagcgagactccgtctcaaaaaaaaaaaataaataaaaataaaaaataaaaaaagaatccttagcacagattagcaagccaaattcagcaataatcaaaaattagaatgttaccggaaaggggtctgattcaggtcaccaagagagggttcttggagctcacacaagaaataattctgggcacgtccatagagtaaagtgacagcaagtttattaagaaagtaggccaggtgcggtggctcacgcctgtaatcccaacactttgggaggctgaggcaggcaaatcacgagatcaggagttggagaccagcctgaccacatggtgaaaccccatctctactaaaaatataaaaatcagctgggcgtggcggtgcatgtctgtaatcccagctactcaggaggctgaggcaggagaatcgcttgaacctgggagatggaggttacagtgagccgagatcgcgccactgcactccagcctgtgcgatggagtgagactccatctcaaaaaaaaaagtaaaggaataaagaatagcaactctaaaggcagagtagctccagggctgctgactgtccctttttatggttatttcttgaggatatgctaaacaaggggtggattcttcatgcctcccgtttttagaccatagagggtaacttcctcatgttgccatggcatttatcatggtgcttgcaggagcatagcagtgaggacagccagaggtcactctcatcgccgcttgattttggtgggttttagccggctttactgcagcctgttttgttgttgttgttgtttttgagatggagtctcattctgttgcccaggctggagtgcagtggcacaatctcagcgcactgcatcctccgactcccaggttcaagcgattctcctgcctcagcctcccgagtagctgggattacagtcgtgcgccacaacaccctgctaatttgtatatttttagtagagatggggtttcaccatgttggccaggctggtctcaaactcctgacttcgcgattcgcctgcctcggcctcccaaagtgctgggattacaggtgtgagccactgcgcccggccagcctgttttatcagcaaggtatgacctgtatcttgtgccaaccttctgtctccagtgactaagaatgccttaacctcctgggaatgcagcccagcaggtctcagccgtaatttacccagacctggttcaagatggagtggctctggttcaaacgtctctgacaagaatacttcacgataggtgtggtttattctaggaatacagggttagttcagtattctgaaatcaatcaatgaaattcatatgaagactaaaaaggggcagggtgtggtggctcatgcctgtaatcccagcactttgggaggctgaggtgggcatttgaggtcaggagttcgagaccagcctggccaacatggtgaaaccccgtctctactaaaaacacgaaaaattagctgggggtggtggggcgcacctatagtcccagctacttgggaggctgaggcaggagaatcgcttgaacctgagaggcggaggttgcagtgaaccgacatcatcccattgctctccagcctgggcgacagagcgagactccatctcaaaaaaaaaaaaaaaaaaaaaaaaagactaaaaagggggaaaagcatgataatctcaaaagatagagaaaaagcatttgacagaatctaacagccattcacccaatccaattctaaacaaaaagccaaaaaacccgttagggaacatccttaacccgatgaagggctccggtgagaagtccacagctaagctcctacttcacggtcagacactgaatgccttccccctgaggaacaacgcaagagtgtctgctttcaccactttcttccccaccattttttcctttgaaataaaattttgaaccacacagaagttgcaaaaatacagtaggtcctatgaaaggaaaataaaaaccgcaatgcacccttccaataggaaaaaacaggaagctgagagctgagtcatgcaagcagctgcctttcctcttgttcctaagcagagagcgacagaggaaaggctaaagacctcggcaggtagctactgtgctcaccttatcttatgtgaagtgccaatttactgagcaccagatgaatacacgattgactgttcccctgcctgcttctcttctcttgcaacccgtggcggcagcactaggaccggaccctcccacttccccctccagcctgcttttcccctttaaatatggaagccctcaaagtcacctttggagaaaggcacagaccacagactgtttcagcgattccgtgttttgtcacgttttgttttgcctccctggccttatccttgaccttggcaaaattaactggttgagaacagtctcagatactttttggttcatatcccccttctgtgggggatacattccaagacccgcagtggatgcctgaaaccatagataatgtggaatttactgttctacattcatacctgcgataaagcttaattcataaattaggcacagtaagagattaacagtaacatagtaaatagaacaattagaacaatagtctaaaataagagttatgtgcatgtggtctctctctaaatatcttagtgtactgtactcgcccttgtgatgaagaagggaaagagcaggatgacacaatatttcatcccactaggaacagtatgcaatttaaaacttatgaattatttctggaatcttccatttaatattttcagacctcagttgaccgtgggtaactgaaactgcagtaagtgaaactgcagataagcggggccagcagtcgtgtttctgtgcagcattcatgtggctccctccagtgtactgattacctaagcacagtacatttaccaaacccaggaaactgacattgctctcatcacttttattcctcatcctattggtgcaaaagaaaaaaaaaggaagttattcagatttgaaaagaaggaatagaactatctttattcgccagtgacaagctttgactagctagacaagcctaagaaatcttcaaaaaataactacgaggctaggcatggtggctcacgcctttagtaatcccagcactttgggaggctcaggcaagagaatcacttaagcccaggagttcaagaccagcctgagcaacatagcaagaccctgtctctacaaaaaaatgtaaagattagctggatgtggtcacgcctgcctgtggtcccagctacatgggaggctgaagtgggaggatcacttgagcccaggagattggggctgcagtt

SEQ ID NO: 94845 - DNA, 94953 bp, Homo sapiens
tcaagcaccactaccaatataaacgccctcccatacgacctcgctggagcaatgtttacctctgtccctgcgtccccagagcgcccacaggttcgggtagcccgaaatcttccccaggtgggtgttacatccccaggtgccaagagtgatgggtctgacttttaactggaagtctaaagaagcgagcacccccaccaatgttaacccttgcctgaagtctaaggttaggcgctctccctttccccagggaccaccaagctcaccgcagagcgcagcctccgcggacccgaggaccgccctgcgcgcagtctcgagcagcaaccagggtagcaccattgcgggccggcggccgccgcgctagtgaccacttcctcctactccttctcctcctgctccggcctcctggcgccctgctccaggctctccggcgccctccagccaggcaccggccgaaccgggtagtgccgcaaggtgtaattactgctttgaaactttaaaggcatttggaaagaaactacgggttatgcttactttttttgtttttgattattattttgtaggagacacaaagtttaaaaatagaaagcaaaaagtgtgacacatttaaagagttaaaggaaataaacgtttccaatttaccttataacatgattttcatacactggatttgtttaaaacagactgactacatggataacttttctaggaattgttcttaactctgatagctggctcaactgatgtaggcattaaaataacgtcatattaccatctttcctccacgaattgatgatatttgactatagctttgtcagggttatgtccaactattgtataatatgtgtcagtttcctattgctaccgtaacaaattaccccaaatttactggcttaaaacaacacaagtttactatatacaattctgtagattagaagtctcacttggctaaaatcaaggtgtcagcaagcctgtgtttcttctgagctccagagtagaatttcttgacttgtcttttctgtcttgtagtggttgcctgcattccttggctctcatggcctccttctccatcttcaaagccaacagctttgagcttcaaatccctgattctgactcctgcttctgttatcacatctccttctcttcctctgattctgctgcctctcttttataaggacctttacattcagaccacagagataatccatgataatcttctcatctcaagatacttaatttaatcacatcttcgaagtcccttttgccagttaaggtaacacattcacaagtttcaggtttgtagaacatgaacatctttggggcaggaggtcattattaaaactaccacataaagtttctcattatcttattttttatttattctcaggttggttcccaaacataataaaagctatatttaactgcaaatagatttacagttaaaaattaaaatatttgaccaggtgctgtggttccaacctgtagtcccagttaccagcaggctaaggcaggagagtcacccgaactcaggagtatgaggctatagtgcactgtgatcagcctgagtgactgagtgagaccctatctcaaaaaaaaaattaaaatattcatgtttaaatggcattattaaagtgtatgtccaaggaatcatttcattaagcatttacttttaaattcttcagttatcaataatttaataagctataaaccatttcagatttctagaccaatgacatcatttataattattttccaaataatttggagcttaaccatagtctccgtgtaatttattttgtggattcacttttaactaagatatcactatatactgtagattcatgtagtctctgtggcatcctcattctaaatatacatcataaatcacaggtagtatgaacacaagatagggaaacaatatacttggcctcactgaataatatttaatctgatttctgcttttgcaggagaagtattactaaacaattattcttttagggctcataactaattattatttaaaaaatatttttatgtaggacttttttttctgaggagataaatatgcctttccatatatagcacactgctaaacttagtttatttaagagtccttgcagcaaaaagatcttgtcaaaagaggttcttgatcattgttcctagttatcttgatcattgtgtccaagttattccatcattgttaaggaataatttaagcaagacttaaaattgataaaagagggagaaatagttttcacttttctgagaaagatttactagtgctgagttgatatgaatcattaattctcaaacaactaatttaattttttgttgttactcatgtgttagtgaaaggctattggaaagaagactttttttcttttttttttttcttttcttttcttctttttttttctttttgaggcagattctcactctgttgcccaggctggagtacagtgacaagatctcggctcactgcaacctctggctcccgggttcaagcgattctcctgcctcagcctccccagtagccaccaagcctggctaatttttgtatttttagtagagacgagttttcaccatgttggccaggctggtcttgaactcctgacctcaagtgatccacccgcctcagcctcccaaagtgctgggattacagaagtgagccaccacgcccggcagaaggaagacaatttttaagagacttgggatttttcccttttctttttattttattttatttttgaccaataaagtcatttcacacccatttcttttaaaatcaactttaagtccccatataacagactaataaaatgaaaaattaggaaatgtatggcctttcatgtgattctcttttttttaaagaatttttatcaaaactttaaatgaacatctgttgactcagcatttccacagtgaacaatttactgagaatacttgtgttagtaagcaaagacaagtgtacactaacaagaaactgatgaaaaaataaaaacattcattcacaagagacttaagcaactgctcaaaaaagtgaggctaatatggcccagcacggtggctcacgcctgtaatcccagcactttgggaggccgaggcaggcagatcacctgaggtcaggagttcaagaccagcctggtgaacatggtgaaaccccgtctctactaaaaatacaaaaattagccaagtgtggcagcgcatgcccgttgccccagctactcgggaggctgaggcaggagaatcgcttgaacccgggaggcagaggttgcagtgagccgagatcatgccactgtactccagcctgggtgacagagcaagactctgtctcaaaaaaaaaaaaaaaaaaataggttaatatgaaaatatgtctgacatatactgtgaagtgaaaaattcaagtcatagaagagaatgtagactgtaatctaagctgtgttatcttttagcataaaggtagtcatataaaaacatggtacaaatgcctggtgtacgcacaaagacagtgcctaaaactatatatcagaaaacagcaagcagagaagaggaaatgggagtgtgggaaggaggggaagatgagaaaccagcaggtattacttttaaaataaagagtgtatcttaaaaatatatacttgatatctggttcaatttggtgtttgataaaaaggagctgggctcggtggctcacacctttaatcccagaacttcgggaggccaaggcagatggattgcttgaggtcaggagttcaagaccagcctggccaacatggtgaaaccttgtctactaaaatacaaaaaaaaaaaaaaaattagctatgtgtggtggcaagtgcctataatcccagctactagggaggctgaggcaggagaattgcttgaacccaggaggcagaggttgcagtgaactgagaccatgccactgcactccagcctggacaacagagagagaatccgtctcaaaaaaaaacaaaaaaaggaaaaaaatacacttgatagaaatataagaggaatatatatagcctacagcttaacaaagattccccatatttccaaacagaacatgatggtaaatttaagatatttagcattatttggaaaatacatggttaggtaatcttaaggtaatctatatttttatttgatgttttgttataatgtcattgtaatagcactaaaacatacttactgagtaatatttaaaaataatttcctttctttgaataatccatcaagtagtaaattttacattcaattaagtgaaaaggtaaatgaggaacatcagaaataaaataaaatagtgttagagaattttccttaatttatgccaagttttgaaacaaagaatgaaatctctggagattttggttatgctaagggtctatctagtggaaatcaagatagctttgaattttgtcgtttccaagaaaatttaagtattgtatggtatttgataatttctaatttttttcttatgaagaaaagaacctaaatttccataatctaattcaatcccttttaaaaaatcaatcataaactgggtttccacatatattttttaaaatctcttttacagtgacacaattaagatgcaaattatttagatttgctcaagtttgcttgttcttgttcttccaagttctaggtcaaatccaaagttaaaatacatgaaagcttttgatttatgaagtagacaattttgccttcaaaattacaccacatgacctcttcttatttgaggaatattttctttttccctagggaaaaaaattatcctaaccccaaaatgatagtgtacctctatacctgtaacagcaactggcatatctgtgctcaattatgtttgttaaatgaatggtccttgttaagtacgatataagcaaatatcaaccttctttgccaagttctccacatgtaaatactgttagaagagtttttaaagaaaaatttagtgtttgcaattttaactctcgtatcttctgatttctacgccaatgctcttatccttaaagccacatttgtcccttggctgaagagttgtgaaagatcaggagacttttagaacctatccataaccagtgttggcatttgcaatatccatgattgaaacaaaatattttcaaaccaactacttttactaaacatgcaatgtgctggccacttcaacagataaccgggctttgaggaggtataggtgtatttcaagaaatgtactatctagctaggaagagagaaggataggtaagacaacagcaatgggggaaaaaccacaataatgtatgacgaatgttagatgtgactttaagagttcagggggcggcgggggtgtgggggcggagccgggcgcggtggctcaagcctgtgatcccagcactttgggaggccggggcgggcggatcacaaggtcaggagatcgagaccatcctggctaacacggtgaaaccccgtctctactaaacaaaatacaaaaaattagccgggcgtgatggcgggcgcctgtagtcccagctactcgggaggctaaggcagtagaatggcgtgaacccggtaggcggaggttgcagtgagccgagatcttgccattgcactgcagcctgggcgacagagcgagactccgtctcaaaaaaaaaaaaaaaaaaaaaaagagttcagaggagggtaacggagggaaatcggaggctgtttcagaaggtgcccagcaacaagtgggacttaagccggactcctgcaacatccgaggtgcgcacgctggcccaggatcctaacaaattgctagtcggtggctatgagtcttagattatcagggactctccgggctctgcggacacgcagaacgcaggcgccacgcaagccggccccgccctttcacccctccccgcgctcccgggccccgggcgcgccgcctggaaccctcccggtcctggctgggggcgggcgaacgaggccccacctctgccgggagcgggacgagcgcgcaggcgcagtctccccaggttgtagacgctgcggcccggcccggcggggtgagttgagaacgcggcgctttggtcgcagcggcggtatggtcgccgcagtttctcggtcttcgcttcggcgaccttgacccccttgtgggtgggcgaggctggaagagaggctccccaccccactcggcttcctgatccctgggggcgccgggcggtcaccgagggccgtgtgagcgccgctctgccggctccgggtccatgcggctgcgggagaagccctgggcgtcggggctggcctgggaggggcccgagtcccctggtgacctgggcgcgcggcggcccccacccccttccgtccgcctcatcgcggcgcatttctcttcacatcctcggggtgtgtgtgtgttggtgaccggaggaagcctgtctaatgacttttctggaagcgtcgtgtattaggagctccggggccggactgcttgggtccgcatctccatccaccgcttactggctttgggacctctgcaagtcacttcacttctctttctcagtttcaagtgtaaaatgcggaaaataatagcaacttatctcstaaggtggttgtgagggttgcgtgggttaatatttgtgaagtgcttagaactgagcgtgatacacagcaaaaccataagtgctgctcatctttttgagcttggtatataaaaggagatagtgaccttttcttctctttccaacccccataaataattgcccaagagtaggaaaaaaggattttttttcttaaggatatgggctttttgcatagcctgtttaaaaacaaagctttctaaacaacttagttgcacatcctactttagagaaaagacaagtgttaagtgatggtgacttgaaaactgtaaagtttattgtttggaaaaccgcatgagaaaaatggccagaacatatttgtgctaaaaagagttaacatagcaggccttaagactgctatccttagaaaggactgcttgcaatgttggtgcttgtttggcatctgggaacttagatttttgggtttgtgctgaacagtatgttttatgccgaaattaccagcttctgtaaaaatccgggacaccaagtctttaatgggcttccctgcgcggaaactgctgcattttcactgatggaggaaggatgtgttttgtttgacccctcttgggagggagaccgcataaggagcctacacgtgattcctccagactccgcttgtgtctttttctattatgatgagcctttatatccatactgcattgtgtaataaatgtcagccatgaattcaactatatgttgagtcccgtgcatcctatcaaagctctaaatgtgggggagatcacggagatcctcagccacagttttgtaaatttgtataaaggtaagggatataagtgccgtttttttacgaggatatatttcctagtggtactgggcttttagtgtaaccatcacctgaataatgtacattgtgtccattaagcaatttctcattcctcaccccactcccatccttcccagtctccagtgcccagacacaattttgatgataaaaagtattggaagctctaataattggacttttaattttgcccttttgcctcaaatggaaattggaaaactacagataaataattgccgaattctgggttactgtaccaaatgattctgtctgtttagacattacatatggcagaaaaatcatcagaaattgcctctacattaccaagttaattttgagtcagtgtttttgaaaaaaggcacaggttgcttacagtatgtaggtcaaatgcctggttttgtttattattttgctagcattatctgtgttaatgctcatctttatcaagagcttatctgtaccacagcgagaaaatataatcagtttctcataggccattttccctgtactttattagttatacctatctcttttcaggacatcaaatttaaattgatggaggtaggtttgcaaatttggggttagaaagatcaaatttgccgtctgcttatgtctcttttcccttataaaagactagatcagtttttggtaagttagttgggagttggaggggttagaggtttgaggaaagtgaagaagatttgaaatggctctgtggatagtatgtaagttgaccagaaggtgaagtgaataataatggacctagtctgctttcttaagagactttctcccgacatggagaaaatggttaattgggttcatctaggattgggttctgcgagagaggtgatgtagtccttaaggctctgcacaagtattccggttcacctatttttgggtacatgtaatgctgcactctttgtacatgggcaacccctctccatgtctgcttgaagttaaatgtgccatgtgacttgctttaggaagcagctctccatttgccatttccacttctccctgccctgctgtaagggtcatggaaggacttgttgagatgcagcctcttgtcagcctggacactataggaaaatatgagtggctgatcaggcaagttggaagaactgggaagttgctrtcagagaaggggatacttaaattagtgattttataaggtggaactgtaggggagagtagatgaggargtttggagggagaaggtagagatgaagtgctcaaggaactcagaggctttttacatgttcctaacccggaagcccttaatttattgcaacttagttcagtagtgatgaccgttggacttaatggtaaacttgaaagctcccttattgtgaattatggaatgaataaatcaagatttggaatttagtactgaattgaaagattcattaccttgatcattgagaagtaagtcagcaaccatgaaaattrcgatgttgcttagccaccaggcaggagagtaaaaggtaggccaagctactctaacagagactccaaaatatagtagttttaaaaaatgcttagcttgtatctaaaatctttgataattaactgaatttttaataaatataagggatagaggtaaataacactatgaagaaagagacaaattcagtgtgagacattatataactttgctgtcgaaagagtattstatgggcccccagcagtggcttcagttagaagctttttaggtaggtagaatctcaggtcttgtgccagacwtgttgcatcagaactttcattttaacaagaccctcaaggtgactyatgcactggcctgatctctttaaaaagctaaagtcttaggcaagtaacaggttggaagaactgttctgttaatagattaaaagatactaaagagacataaccaatatcaagtgcaaaccttgattgaatctttttcaaaaaaccagctatagaagacaatttagggtcaactaaggaaattagaatatgatggaatatgagatgatattagaaaattattaattttcttagatatgattacattgttatataggagaatgtgcttatttttaagagatacatgctgaagtatttagggatgaactgtcaagatctctacaactttcaaatagttcaactatgtgtawatatatatatatatatatatatatatatatatatatatatacacacactcacatacatatatgtgtctctctatacacacatattgatatttagataaaaacaaacatagctaattgttaataggtgtggaattggtggggcaccatggctcatacctgtaatcccagcagtttgggaagccaaggcatgtggattgcttgagcccaggagttcgagaccagcctgggcaacatggggaaatcccatctctactaagaaatacaaaaaaattatctgggcattgtggtgtgcacctgtagtcctagctacttgggaggctgaggtgggmgtatcacctgagcctggggaggtygaggctgcagtgagctgaaatcaggccactgcactccagcctgggccatcagagtgagactttgtctcaaaaaataataatagccgggcacggtggctcacgcctgtaatcccagcactttgggagactgaggtgggcggatcacgaggtcaggagatcgagaccattctgactaacacagtgaaaccctatctctactaaaaatgcaaaaaaaattagccaagcctggtggcacacgcctgtaatcccagctacttgggaggctgaggcaggagaattgcttgaacccaggacgtggaggttgcagtgagccgagatccatctcaaaataataataataataataatagtaataataatataaatgtggaatctaattagtatatgagtgttcattatactgttcttttaacttttgtagatgtttaaaatttttcatgataaaaagctagagtgaaaaacccccaaaaatgtagtagcttaaaaagatagaaatttaattttctcttaatattccagtgctagttgtacaacacaggtatagagtggctttactatgcttggcttacagctrtccatttttgatccagtrtggctcatccagctcctactatttccttgctagcagaagggaggaaagggtaaagagaactcattatccagaagcaatacttactccgttgatgaaaactttagttttggtcattcacctggacatcatatatttaggggttgtgtcttggttcagcctggtatagcaaattattatagactgggtggtttaaacaacacagacttatttctcacartactgggagctgggaagtacagggtcaagatgctggcaaatctagtatctggtgagggccttcttcctggtttrtagatggccatcttctcgtatatcctcatgtggatacaaaggtagctttctagcctcttattataagaggccagtctcattcatgagggctccacctacatgacctaattacctctcaaaggsttcacctccaagtatcatcactttggggattagagttcaacatatcaatttggagtggggacacaaacatttagtccataatggtatagttggcaaaagccaatggaatataccatgtgtatactgatttaacaaagatttatttcatttcaartgatgttcccctcttcttcctctgttgatttcccggaccagttgaaattgaagtcatttcagttttaatacacattaaataaaatataaaattttaattttgaagactaaaatgtatgaatttttttccctcaatcccttcagtaaataacagatgcgggtgaaagatccaactaaagctttacctgagaaarccaaaagaagtaaaaggcctactgtacctcatgatgaagactcttcagatgatattgctggtaaattgtgatatatggcatcccaaatagtgttgagaagaaataacaatgcagttgacccttcaacaacatgggtttgaacgctgaggatcaacttgtacacaaatttttttccaccaaacctagatggaaaatacactattcttgggatgcgtgaaaactgcatacttggcaggctgacttctaaatgcagattccacggggcccactgcgggacttgagtatgcacagatttgggtatatgtggggaggtcctagaaccaactaccccaccccacctccctgcctcaagtatctgagggaagactgtatatgtttttaattaagaaatctgttactctttatttttactgttttctgcataaatattagaatcaccttttctagttccaaaaaatcctgttggcatttttattaggattttgtttagtttataacatgaagtaacttagattggctttttttttttttttggtctctttctcatggcctattaaaaccatgtcaccaagccaccagagcttggcagatggcttttgggagctgctggcctcagggcttggttttctctttagcctcatgcttttgatttgggcctctgaggattttcctcactttcttgctagttctctccatttaaagggatatttttaatatattttttccattttaggtatgcatagttgcatacagctatacacaaacacactcacatatgagtgcctatgtcttctgaaatccgaataagttctaaggattgtaccaacgtcagcttcctggttttgatattttactatagcagtgcaaaacattaacatcaggggaggctcagtgaagggtgaatgagacctccttgtatatttctttataccttcctgtgaatctaaaattagttcaaaaatttaaactctaataaattagggacatcagataaggtcctaatgatatttaaagagataattcagacatccttcagtgcagcaaactggctatcgaaacatcatcccattttagtacatgtatagctttgtataaccaccaccaatcaagatacttgactgtgtcatcaccactctatgtgctgtccatttatagcaacaccctctgccttgcgtccattgctcyctacaaccatgaatctcttctcattctataattatgttatttcatgaacattatataaatggaattatatagcatatatcttttgagttattttgtgtgttcartctctgtgctttttagttaacagcatttaatacttttgaggtttgctcagtaatggtagcactttggtgtagcaaagaaaatgttgagattttgttttatcttattcagtaggtttaacttgccaacatgtaagtcatgctatcagcgtgaatcatgtaaagagagcaatagctgagaatctgtggtcagtttgctcagaatgtttaraagaaagaagattctatgatgggcagctagtacttacttctgatatttggttgtgcctcaagtgtggcttccaggtaagaaaagtattatttatatgtgagtttgtctgaaatgttttccttaaatgcttattgtgagttggactgttggtcatgcataggagttaagataaatttattccaatttagatagaaattttccaggaatgaacttaaaaatgattgttaaggtaaagtaaaaggtatgctatgttcagaaagtaatcaggtgtggtttataaatacttgcagaggtaattcaacctatttgcagtagttcccatatctggaccagtctttaccttttgtatttacttaggaaatggatctacctttcagattaatttttttctctctcaaaacagattattctgctgcttttgcaaagtaatttaaaatcttaaagtttaaaagttattgatatctgtaataaaggaatttttttaatgaaattaaaagtatatacttttttaaaaaaataagagaaatcttyattatttcacacaaaatgtccagaagtaaggccacttcaggattagttaatttaatggaaagaacattaaaaactgaggtttattctgttttctgctgtgccatcctcaacctcatggttgtgttcctcttaaaaaacaaacaaaaaaaaagccttctggaaagattcagcggatttgacttcccctcatgttgcattaaccagaattgcatctcatttctttacttacctagtgagggaaatcgctatgattggtctgtgtctcagtagttctcagtaggctggggtgaagttgtgtacgggattgggaaatgtgtgtttgcagaagggcaccactggcctgccaggatgctgggtgttccacagtgtgcacatttttaaatgatagggaaattaactttgcccatgattgttttaggtaaatactgtatattgagcatgttagcctgttggcaagaaattaaatttaatgagaatccatattacttttttgaaactttctcctctggcctgaaattaaaaacaaaacttttcagtataagtgtgagtataatttaagttttgattaatttgaaacaaacatttgtaagtcatacaaaataaaattctgttcatcttcagggatgtggtaaaaactcagaaagccaacattcattgaagcactttaagagttccagaacagagccccattgkattataattaatctgagcacatggattatatggtaagttaaattttgttagttcttgtgtccactaaccacagccccccaatttttttttttctttaagcttttaaggtaaaatatttaaagatgttctatcagcttatggttttttaacctgaacacaatctatgggatacttcaagaaaattaatattacctgtgaatataaaatttaaattggaaaaattttaactatctctctactttttgttgttgttgagacagagtctcactctgtcgccaaggctggagtgcagtggcgtgatctcagctccctgcaatctctgcctcgtgggttgaagcaattctcctgcctcagcctcctgagtagctgggaccacaggcgcatgccgccatgcctgcctaattttatgtattttagtagagacagggtttcaccatgttgcccaggctggtctttgaactcctgagctcaggcaatatgccctccttggcctccccaagtgctaggattacaggcgtgagccactgcgcccagcctttctacttttctctatcattttccttgtataatgtaaagaaaaattctttttagttgatttttttggtagtgaacttgctaatacagaattctagtgttgtagagaaggaagatacttcaagcagtcaggtcattttctgaagggagagggaagagctgggcataagtagcttgtaaaaacttttcaggtcattctgctgtttaatcctggttgagaatctagtccagtttcctatgttacctgtaaggaaactatgtaatatttacctttttgtggttatgaagtaaaaatccaggtactaaaacaagttttttgtggggcgtgatggctcacacctgtaattccagcacttagggaggctgaggtgggcggatcacttgaggtcagcagtttgagaccagcctggccaatatggtgaaaccccgtctctacgaaagatacaaaaattagctgggcatggtggcgcacgcctgtagtcccagctgctcaggaggttgaggcaggagaatcgcttgaacctgggagatggaggttgccactgcactccagcctgggtgatagagtgacactccgtttcaaaaaaaccaaaaacaagtttttttattttctagtttcttattagcatatcacactgttttggtagtataaatggacactatgttgaaatgcttcctctgtgttttacaataattttccaacttgaatctatggactcctaagggttccttgaatgaattttcaggagtctcagattttctttaacataaaaatattttgtctaaaattaatataagggtattttggctcacagaagaggtcatcatctttaatacagccagaagggttgggcaccagctgcatttgtgtttttatttgttgttgtgagtcccaagtagtagtactggggagaatgacgaaagaacagagggaacttaatatataaatgatgcattggaaccaatggagacagcaatggtgccatagtgtggcagttcaataaggatttcactttagtggtctcaaactctaggtgcatcagaatctcagggagatcttgttatgacagattgcaggatcccagtcttagaaattctaatttartagttctggggtggaggagccagagaatttgcatttaacaagctcccaagtgttgccagtgctgctggtctgtagaccacagtttaagaattactgaattagaaaaaggtgggtaagaagattgtgaacatgtaatgtagcattggtgtaatgcattatgttttttttttttttttttttgagatggaatctcactctgtcacccaggctggagtgcagtggcgtgatctcggctcactgcaacctctgcctcctgggctgggagtagctggaattacaggtgcccgccaccacgccctgctaatttttgtatttttagtagagttggtatttcaccatattggccaggccagtctcgaactcccaacctcaagtgatcctcccgccttggcctcccaaactgctgggattacagttgtgagccactacacccggccataatgcattacatttataaaacactttgaacactttccaacacatgttcttaaatgatcactggatctcatgaggataaaggaaacaggtaattataatatacagaagaaacaaattaatacgatgtattaatgagtaaacttaattgagggtagttttctgaattggaatgtgcttttgaaaatgtctttcctaaccctctgcctccaaataagcgccaagcaaaatagaacagctatttctttgagtcttacctatctctatatgtaatcaagctagaagcctggcagttatttccttccccctttttatcttattttattttttagcctgttaacaaaagtagacagagtggtataatgaatttacctatacccatcaaccagcttcagttgttgttgttgttgtttttccagctttaaacattatcaactcacagcaagtcttgtttcgtctaggccaggatttctcaatctcaatactattggcatttggactgttaatgttctgtgattaattccttgctgtgctgttctgtacgttgttggatgtttaccagcatccctggcctctacccacttaaatacaagtagtggtcctctcacctctcaccagttgtcagaaccaaaactgtcaaatgtcccctaggtggcaaaatcactcctcattgagaatatcagtgattctcaacaacattgagaatcgctgacattgtctcactcacttctccctacccatggcagttattttgacacttccctttccctcctcttttatatctaatttgttactgtttctacctgcaaatatgtatataaagaatgcccatttctctccagatcctctgctactatactaatctgtttctcttcctaatgccctccaatccctccaatctagtttatcacattagtgagagtgatgtttttaaagtgtaagttggggctgggtgtggtagctcacaccggtaatcccaatactttgggaggccgaggcgggtggatcacttgaggtcaggcattcgagaccagtctgaccaacatggtgaaaccccatctctaataaaaatacaaaaattagctgggcgtagtggtgcatgcctgtaatcccagctactgggtggctgaggcaggagagtcacttgaaccctggaggcagaggctgcagtgagctgagattgcacagctgcactccagcctgggaaacagagcgagactctgtctcaaaaataaaaaataaataaagtgtaagttggaccatatcatggccctgcttaaaaaccctctcgtggcatttcattatacctaagataaactgccaaaactttcatttcaactgtaagtctctgtatgaattgtcctctgcttatttctctagacttacctggtggcttcccctttgtattccctcccatgtaatttaaagacaaaagtaactaaataccaactttgttatctgatgtgcaaaattattgagaatattttcataatrttttcttaaattttataytttttcaggtgttatgaatgygatgaaaaattatcaacgcattgtaataagaaggttttggctcagatagttgattttctccagaaacatgcttctaaaacacaaacaagtaagttaagcgatgactaaaggaatctgtgttaaaatacagtatttcatatagagttcataaattcataaagaatactttagattttactgtgacagcccagccaataatttgaataaagatattatgagtatcggctgggtgcagtggctcatgcctgtaatcccagcattttgggaggccaaggtgggtggatcatgaggtcaagggtttgagagcagcctggccaacatggtgaaaccccgtctctactaagaatacaaaaattagccgggtacggtagcacatgcctgtaatcccagctactcgggaggctgagacaggagaatcgcttgaacctgggaggggaggcggaggttgcagtgagccaagaacatgccactgcactccagtctaggcaacagagcaagaccccgtctcaagaaaaaaaaaaaaaaattatgagtatcatgcattcttaggtggccaccttgttatacgtttatataaccaatttgagaaactgaagtatgtcgtgtctagaccatgggctttgaagtcagtcctgataagtttgaatttaggcttccccacttactggccatggtcacttttattgcttagtttacttatttataaaattaggatgataattctgtcttatggagttactgtgaggcctagagataatattttctaaagatttagcaatagtgcatgtaaaaatacttgcatagtacctgtattagtcttttcttgtatttctataaatacccgagattgggtaatttataaagaaaagaggtttaattggctcacagttccacatgttgtgcaggaagcctgctgctgtcatcagctcagcttctggggaggcctcaggaaactttcaatcatggtggaaggtgaaggggaagcaggcacgtcttacatggtggaacaggaggaaaagatagacgaggaggtagtacacacttttgaacaactagatcttgtgagaacacactgactatcatgagaacagcaccaaagtgatggagctaaaccattcgtgagaagcccactcccatgatccagtcacttcccatcaggcccctcctccaacattggcgattacaactcgacatgagatttgggtgtggacacagatccaaaccatatcagtacttgacacatatgtatgaaatggtgtctgttatttgttacataattgcagtgtagttctgacactaactactgggagttaggccagacttcacaggctaagggcacagttgcccacaggactgccctcacatcagaaactagctgcaggcttgagggttcctagaccactgaatttctgaccaactgtccacaaatttgggggttcctaccatttcttcaggttcagtgataatttgctagaatgagtcagagaactcaggaaagtgctgtactaacaattatagttttaatatagcaaaaaaggatacaaaacagccaaaggaagagatgcatagggcaaagtctggggagggtcccaaatgtgaagcttctgtgtccactccagagggaatgaggatgcattctcctcactctccccagcccatgcattcgtgtgcactaatatacacaagagtattggtaaccaaggaagctcactggagttttggtgtggagagttttattgggatttcattgtgtaggcatgattgattgaatcattggccatattgatttaactcagtctctaggcccccaacattctaatcacatggttggtctttctggcagggccaggccccatcctgattcatctcttcagcataaactgtctaggggcccacagtgagtcagtttgttgatataaactgtcaaatgtggcctgagggacccatcatgaataacagacactcttgtcgctctggaaattccgaggatttagagggtacttcccaggaacctggggagaaaagccagccagatcctttattatataacagtaatgtattatgtattttgttattgtatactttgttacctaacaaataaataatacataacgtatgttaagagtgtataggataatagtttcttcctccaaaaatagtaagtgcttcccacatgccaggtattaaattttatttggtctgtagtattagagtaaaacaaaaatagttttatcttgccctctaggcgttagattatagtgggagcaacaagcaaaaaatgcaaatatataatgacttctggtaagtgctacaaaagaaaggaacagattgccgtgctggctaataatatagtagtcacagtgatcaagaaaggctaatattgcagaaacgtggtttgttaggagagagtgcaaagagatgaagttacgaggtagatgagctggtcatgacagatactgtaatgaactccatggtaaggaatttttatttttttggaagtgtaatagaaattactaaagtattttaagcaggggggtatcacggtaatttcatatttttttaaaaaaataaagataagtgattgctatgtggcacacagattgtagggagttaagcatgggggtggggagatcatgaagagggttaaggaggtgattgtgggggggcaggtgagaggctgatagatactcatggggagtgagtggattacatgtagtgagggagggagagtgggaggaattaagtattaatacaaacctcaggatttttactgaacagctaggtgaatggacgtgataattttgagttgcctttgaagcagaattgaattgcttagtaggtggcatcagaaactgaaaagctatataaaaatatagttgccaactgtgttttctatagcccagtgtacagctgtttttgttagccatcrccctaatgagacagtaatggtgaaggaactggaggaggaaccagagaaggtaaactcaggctcctggacagcagtagaagtgattcatttgatcacttatcatttacttattcaacaaacatttattgaattctgttctgcagcaggcatactagtcgtagctccaattctgctcaaataaagaaccaggaaaatatggtggtgaaagacttgtaacactactggaactgaagttggtcataattctgtctgctgaaaaatgagcattaagtttcattggccataataagaagataggcagggatatgatggcatgggtgatgaaagtacaagtttagaaattattttctctggattttttttttaccttagagattccctaaggttaagtacaaagccagtctgattttcattcaattttactgatttcttgaataagtattataagaaagatgctaggaagggagcatggacggtatgatggaaagtacatggctttgaggttgggcacggtggctcaggccttaaacccagcactttgggagcccaagtcgggcagatcacttgaggccaggaatcgagaccagcctggccaacatggtgaaaccccaactctactaaaaatacaaaaattagctgagcatagtggcacattcctgtaacgccagctactcaggaggctgaggcatgagaattgtttgaacccgggaggcggaggctgcagtaagccgagatcacaccactgcatgccagcctgggcgacagagtgagactgtctcaaaaaaaagaaaaaaagacagtagatggctttgagtcagggggtctggtgttcagatttgactctgtcactaggtgtgtgaccccaggcagtaatctgtttatgcaagcctcatttttccttagtactttatatttccaaggtgcttcagggaatagagattgataagacagtcactaaatctttaagaggctaaagatctgaaagaaggtgtaagattaaacagtaatgatatgcaagtagagtaagatttctgttttaggtaacaaccaaagtccttcaaatatccaaagagggatataatgttcagttgtaggaactaaaaaggaatcatggatgagccggctttcaagctgacccttaaaggatgaactttgggcaggtgaagatgagagaagaaatcatttcaggtggtgggaagcactaatataagccttaattgtgtttatggaaccgtgaatagcacctggagtggtggggcacgggcttttgaggtagtttgagagggagtggagctttcaaagtttgagagatacatagttgttagtttaaggcttttggcagttctagggcaagatgtcattatccctgtgggtcaagctacaggatctctcaggcaagtttgatttaaaataatattccttggcattctagaataagtttttggatataatagtttgccatattgtgccttgtatgcggcttccgtatatttttataaaatatttggaaaatcaaatatgaaagtttttattgaggtttgtaagaatgccggatatgattttgcactaaatggtaatcgtgaaacattgtgaaaacacctatttatgataaaaggaatatgaaactgtattattgtgtttgggtgagaggataagtatgattttaaaaggttatttttatatttttgtactaagtaaaaatagttattgagaagaaagcctgtgcctgtatgttaaacacattttgaagttatgcatgaccagaaattttctttctctttaaagcatgtcattaattcttttgtttctttattcctttacttttaggcatcactatcctaaaatcatatagtatatgggtggctcactcctgtaatcagagcactttgggaggctgaggcaggcagatcacttgagtccaggagtttgagaccatcctgggcaacacaacgagacttggctctaaaaataaaaatgaaataaatactatgccatgttaacacaaataacatttgtagaaaagataactttcaaaacaaaaatataatgagtggcactgtcttgcatttttataagactcttaagtgtctggcttagtagaaaacagctggattctcatatctgcttctgcatttaatcctttgtgatatcacatgccatatggcctctggagaacggcattgtataattgagagtgaatgaaagtaaaaaaagcaaataaaatcttaggcttattatgaaaatacttttgaccttaagtacccttgaaagaaggaagttgtcttctgacccactttgagaagtgctgaactgtagcacatttgtctttatattttctgtcttcagccttacttatccattaaggctcagctcaaatcctacttctaggatgctttcccaatccttatctcttttttggcactcagtgtctgtgcagcacactttagaatctaataacacacttttttgatgtttcatatttatgtttgtacatgtcttattttctctcaagactgtaggttccttaagactggactctggattatattctttttgatttttatgtgggtagacagtaaatacttgctgaataaaccaaatagaatgtgaccagtttttgttgaggaagtagatagataagctttgcactttcaccctccaaaatcctaaatattaatatcaaaattatttattcagtcttttaatatctctgagtttctgctttgtaccagatgctgcattagatgttggagatgcagtagtgaatgagacagatctacttctagttcctgtcattactgatcttttggtctattgagggatatagacaaattgcacttagttatacttgcctgtttaaatagtgctgtgatggagcaagtacgagggaccgtgagaacaatttggaatagtayctaacattcgactggaggagtcaggccaattctatttagaagaataatccgacttagttggaagcagaagaatatctagaaattatctggkcaaaaagggaacagattgtgtgttccaggcaaagaaaatagctcattgacgagagctcgataggttcaggcaagtctagacagctgaaaagttgagttttgtggtgtagaagatggtgagaggtgagacttgaggtaagtaagaacagatatttaagggccttgtacagatagaatttgttctgagggcagtgaggaaccactgttaagttttaagcagagaagtggctgatcagtgattttgtagatctcagtttgacttgtatggagacagataggaatgcctatatatgtataactgcccatttattatgttaatatcaatttatcatatgactaagtaaagatttctaaggcataatggttaactggaagttagtcgattttgagagtaaactggcaagctaattattatttggttccaagctaggggaattgtggggcaccaagttgtctctttttactcactctttaaatattaaacttcttttcagctgtagaaatgggcagattacattaatactacatgactggtttaggtaattgcattaagcagttgagatgaaccccagctcaggttcccagaagaatgcttacagctgtgtagatttcacatctgatgttaggatttgcttatagaaacaaaactccctctacctcccccttccccatacatggaataaaaaggtcatatataatgcaagactgaaaatgggcaaataagcatttttgtgagtcccacccagaaataggtattgttaaaaagtagaccagaaaactggagacagtaaaaaaaaaatcagtggttgaaaggggttgaggggaagaaggggtgaataggcaaagcacagagaattttttagggcaataaaactactctgtatgatactataatgctggatccatgtcattctgcatctgtccaaatccatagaakgtacactgccaagagtgaaccctgatgtaaactaggaactttaggtgataatgatgtgtcagtgcaggttcatcagttacaataaatgaagcattctggtgggggatgttgataatggaggctatgcatgtgttggggtaggggggatatggaaaatccccattaacgtatgctcagttttgctgtgaacctaaaacctgcttgaaaaaaaatttttttttttaaagtgggccattgtcctctgaaagtctcagagatttctcactttaatagtcttttaaatgtcatgaagtgttctacaaatatttagagaatctaggaattcctggtaaaatcatgtagttgaatattggtttattttttgtgaaatagatgactgacaatcccatgttcttttctaaaccaatgcatttggctcataattttaatattgatgggatgccatttttaacaaggttaaagagaagacaaaatactatatcctgctgaatttattaagctcatgctcctggtttacaatagacatgaattatgtgggttttatgaagtatgagtttgctgtatctttttttttttaaataagaaagtaagtggtggtatgtttgggatctgaaactccatctgagtataatattatgacctgtttcagtaacaatttgattactatttaatactttaaaaaaaaaggtgatacatgctgggcacatgtatggctcatgcctgtaatcccagcactttgggaggctaaggtgggaagattgcttgagaccagttcttcaggacgagcatagacaacataacatgacyctatctctatttatttttgtctgtttttttaagaggtaatacagttctctaaagtgacagtcatgtttctaagaaatttgcattttcaaaaataagcactaaaaatcgttgtttcagtgtatacaaggggctaggttcaaaaagataatgacattttaaaaacaacctatttttacatatagggtttttaatttggggttcctcatcgatactacaaaacacagtaaaattattagagtgactattttctcagttttcccaaagatgtcacataactagtatccttccagatacatagggagatgttaattgcatgcagtgggtacctaggatgttagggtgttaattttttaaggaatcatttgagaaggactgctacaaactatgactaaaaaagctataaatccaaacacaaaacatgtgcagcaatggattacatacagcttttacttaagagtaatggctttgctattcatatcaccactggcattttgttagtgtcttaaactactatcacacttataaattgcatcatctttattataacagacagtagataatgtttaagtgtgtgaattctgaagctagactgcccgggtttgaatcttccctcaacactaaccagcagtatacctcagtttcatctttgaaatgcttcagttctaaaatggggacagttatcagaggtgacaatttaagggagatacactctcaaactatccgactctaaatgcaaaataagttcacttctcccttgcctatgggaagaaagggaagaaccagtgttccccacttttggtttaaccaaggcaattcacaaatacacctttgggaaaagaaagacaccaatttagtattacttcacaacaaacccactattggttgttttcaattttctcctgtgataaacaaagctgtatctttgtatacttgctcttttattttgtaggtgaaatttttttggaatttcttggccaaagtataaattttgattactgttgtaaaactgccctcaagaaagcttgtacaaagggtatagttgacaatagtgcccataattccatatttaactttgtttatagttcagttttgccataatgaagcttttaatgtcattgttgccaggtcattagtcttttctgtttttagcctttggggtcatgctttgaaagtctttgctctccaagattctaaagatattcacctaaaatttgctggtacttttgagtttttttatgtttatgatttaatatccttgaactcagtttttttgtttgttttttgaaacagtctcactctgtcacctagtctggagtgcagtggcatgatctcagctcactgcaacctctgcctcccgggttcaaacgattctcctgcctcagcctcctgagtagcttggactacaggcaagcgccaccatgcccagctaatttttgtatttttagtaragacgaggtttcaccatgttggccaggctggtctcgaactcctgactttaagtgatcctgccaccttggctcccaaagtgctgggattacaggcatgagccatcacacccagccttgaactcagtttttaaaaagatagttataggatctctaagtgttgaagtaatttttatgctggaaaaatttgaggtaatatcttaagttttttttttaaagttcttagacaagttgttttgttgtttatgttgttttgtttttgctttgctggtatttcagccagttttgtctttgaagacttgaggtacatgcaaaacctatcagtcctcaatcagctactttttgaggactcagattataggcttaaaggtaaactacagagatgtacaagagctttaaaaactttaaagtgccgaaagtgtgctctcaatgttctttgcattccaggtctatattatctttttatgtaaaggatgacagtgttagtaatatagaagtgataagtagagtaaattaaattgcttttattttttattagttttgatttatttcccaaggtgagataaatcccttttaataaaataacctagcctggaaactttgtgattacctttttgactatgcagaccactttttttgtaggtgtgggtaaaactttaggagaacaaaagaaatgataataaaaattttgtatagtttgtctttattgttgtagcaactttgtcctcttacttatatcatacttaaaaacatcttgaagttcattccttattgtatttggttctgtgtttataaaggaagaagagaatttttaatatcatctaaaatgtttgcactgccagattgaaaaatgctttgttatctctgaaaacaaaatgatcaaaatagttcttcagtagaagctataagctgctttttattaaaacatacaggccaggcgcagtggctcgtgcctgtaatcccagcactttgggaggtccaggcaggtggatcacctgaggtcaggagttcgagaccagcctggacaacatggtgaaaccccatctctactaaaaacaccaaaaattagctggacgtagtggtggacgcctgtaatcccagctcctcaggaggctgagacaggagaatcatttgaacccaggaggtggaggttgcagtgagccgagattgtgccattgcactccagcctgggcgacaagagcaaaactccgtctcaaaatacatacatacatacatacatacctgcatgaatgtcaagtaattgagactgattcagacatccctgttttaaactagaattgtaaactctcagttgacagcttcttagtaaacacatgcacaacaagtatatttagtgtctaaacgttttcctgagatattacagttatcataaatttaaggcttggccgagtgtggtggctcatgtttgtaatcccagcactttgggaggccaaggagggtggatcacctgaagtcaggagttcaagaccagcctggccaacgtggtgaaaccccatctctactaaaaatataaaattagccaggtgtggtggcatgtgcctgtaatcccagttactcgggaggctgagacagaagaattgcttgaacccagggagcggaggttgcagtgccaagatcgtgccactgcactccagcctgggcaacagaatgagactccgtctcaaagaaaaaaaaaaaattaaggcctaaggtctctgctgtttactagtttactatgtatcaattctttatactccagtcataaataagaaattaggtgtaaacagttatagtggttcatatagtgcctgatacacaaagggcattgataaatcaatttaaattgttacattttgtaaatgtactccttagtaaaatttaagacttacacttttattttaagtaaaacacttaaatagctcttagaaatgttattctggccaagtgcggggcctcactcctataatcccagtgctttgggaggccaaggcrtgcagatcacttgaggtcaggagtttgagaccagcctggccaacttgatgaaaccccatctctactaaaaaatacaaaaagttaggcatggtggcgcatgcctgtaatcccaackacttaggagactgaggcacgagaatcacttgtacctgggaggcggaggttgcagtggagctgagatcacaccactgcactccagcctgggagacagagcaagactctatctcaaaaaaaaaaaaaaattctattttctagttaaattatctgtttgatagcgtagttaatttttaatattttctcacagacttacatgtaaaagtcaacaaacagacccttgccacttgygtgaagtggctatttaaccatgaaataaactctttttattgccactgccctgtgggtatgttctttctggcagtgctgtccatatttggtggctatgcatggagagccaggtggtgctgaaaagcatcacacagtgaagcgtggatatatcttggtttgacatttgtcgtcccttactgctgaagggagggggaaaatctgtttttccatatgtttatgctttattttgcctgcagttttgtccagatggtcttatgaacattgtttactttgggatgccatcccagatgttttgaaaactgttggataaatgtggcacacagatacatttgcatattatggtttttaaaatgttatgtgtctttgcaagattaaaatataatttatttctaggagtattttcccaagtgaataatgtgtctgtgtatatatgtattttttaatgttttttaaaacaggcccaataggcgtcgtgtatatatatttcataagtatataaaacatatatagttattatctataggttatttcttccagccattctgttttcatgttaataagctaaaaaatattgtggcaacatttattaagaatgttaagtctgcttcatgttttggaagaagccaaaaaaaaaaagatatttttgaggagtcatatttgtttagggttgcatatacccaaatctgtaagaatcttgacctactgtcttttataattcttctcattgtacataaatcactgaagagaatttaggtggtaaaatgacaatgaatttataatcagaagattatcattgtgaccttgggcatatcacttaacctgttggagactgagttttataaatgtaaaatcagagttaacagcctgaaaaaattgagtaatgcttggatttaatttctctctcatcttaaatctctcaaaaatcactatgaaaccaccttttggcaacagcaataatgagagtctgaacccatcctattctaggttctatttacagtctcagatataaacaagaagcagactgttctgtctgtaaacccagccagcatccatatcagggttcctcttgtttgtgtagtgcttcttaagtactgactggcttttttcatttgcttttatattcatttgaaaactacctggcctcttcccccttttcttttttccatgcctggtgtttgtacttcagtgacccacttcattgattgtgctggcctttgcccccamgctctagtgtggggtttattatttattataatatttggaggacaggaaaagagacctatcttgctagttcttttctgctttacctcaggattctggagttgggagttaaaaatagytccttaatatctgaacacattccaataacaaccaataacatttaaagaataaaaaaaacaggaatgggggaaaccagttaatagcgtttataaaaactattgtagcacaggataaaagttgttagaacttaaagaaaacttttttccatgaaataggtttgcttaatgaaagaaacatcttctgctgggcgcggtggctcacacctgtaatcccagcacttcctgctccttagaacagggccactcccactcgggttcatctcctttaatgttgtttacagaagtggggcaggtgtcataatttatttcctcttaagaacttgtcagagacgtaagaagctaacccactagttctgctgtttaatcttgcagatttttatgtgtttcgaatttttattatgaacagtccccccagtgctgtacccctttggcaggaagagcaagagtaagagatgttcccctatttccatcaatcagccaaatatttataagttaattagtaatgcaaggcagcatgtcagtattaggtgaaaaaaacatgtaattgtaaagaactataaaatctaagggctggctggctacggtggctcacacctgtaattccagcactttgggagcccgaggtgggtggatcacttgaggtcaggagtttgagaccagcctggccaacatggtgaaacctcttctctactaaaaaaaaaaaagaaaaaaaatacaaaaattagctgggtgtggtagtaggtgcctgtaatctcagcttcttaggaggctgagacacgagaatcacttgaacctgggaggcggaggttgcagtgagctgagattgcaccactgcacttcagcctgggctacaaagtgagacactgttttttaaaaaagaaaaaatctgagggctgaaaggaatttaaaagaacatctagttaaaactaaagcatttcagaacttgggaatttcttatcaaacttcaaattatcataattttgattcagagagtaatctgctaaatacatgtagtcaaccatgtcagtaaatgttaggaattgttctttgttttcatattagtaaacatgaactgataatataattttctttttttcttttgagacagagtctcactctgtcacccagactggagtgcagtggcatgatctcagctcactgcaacctctgcctctcaggttcaagtgattctcatgcctcaacctcctgagtagttgggactacaggcttgcacgcaccaccacgcccagctaatttttgtatttttagtagagacgggctttcaccatcttggccaggctggtcttgaactcctgacctcaagtgatccacctgcttcagcctcccaaagtgctaggattacaggcctgaggcaccgtggccagcctaatataattttcaaatctgcattaattatacaaatctgtaagcacaaaacatgcacttatgtgtcatatacttaggtattttactttttgtattacagtgtggttctgtttatttttaaaaaacttttaatatgaacattttcaaattcacagaaatgttgcaagaataatacaaaaattgccactataggatggtgattttcctaattctgtcatttcttctattagctggcattctcttataaggaagtctcttccctactttttctcatttaaaaaatctgttaccaattcagattcattctgtgaataataatctattatactacccttacttatttttatgatcaaattatctgaattgaacgagctggtcaaaatccctgtgtattttgacttattcccaatcacacattttgagcacttccttactctctggcatggcaaaatgttatgggttcattttgcatctttgctaccctgggttaagaatcagccttttcccctagacgtccttatttcttttcatgggtaatggtatttagaagttagaccttttctacttgttctcgactgttcttytacatttagttttttaattcatctgcaatttattctgtaatatagtgtgaggtgcagatctgtatactaaagtttaaattaattcctctagcaataaaatataaaaccaaagatagttgtgtttatattcttccccttcaggaacactgattcagggagataatcttatttaaatttaattttaaataatgtatataaattatgttaagtgacatatttatctttacatcttgtgtcagttattttttctctaacttgtaggtgcattttctagaatcatgaaactttgtgaagaaaaatgtgaaacagatgaaatacagaagggaggaaaatgcagaaatttatctgtaagaggaattacaaatttaggaaatacttgcttttttaatgcagtcatgcaggtaagagtcatcagaaagctttgtaatatgtaaaagattctcttaatttatgtagtcattggctcacctgtagactgtcaaatgactgctaaatgttcctctagaaatttctctgttttccttttgtttacgctatcttgggccatcaccatatgtatacatgtaccttattttcacacagggcttctgaaaggtcttctgtgtattttaccatggctctatcggtaatagtgacctttactaaatgtaaaatgtactcaactaaatcttaatattttttgaaatagacacttttgctatgctagatgaaatttgagagtgtattccataaaatcagaggcatattttaactgaatctgaagactttaattttgttttcttttagaacttggcrcagacttatactcttactgatctgatgaatgagatcaaagaaagtagtacaaaactcaagatttttccttcctcagactctcagctggtgagtaataactgtttgaataatagctgctttcagatgagccactgatgttaccaaaatctcttttcctaattcgcasatcagtcaactaagatagtagycagggggcttaaaaataatttaaaagcattctgtgaaaataatcagatttaaaatttctaaaatcataactttaaggtatgttatggttccaatatgccatggatcaaataataaaaagatatcaaggcagctttaaaataaacatactggaagaaacaaaagaggtgtgacttctattgagcaaaatgcctataacccctattttgtagtttctggtgacatttgtttaaatttagcatttttgttctttaaagaaagatgaaattttaatagtgagcatctaaaggttttttttttgagacggrgtctcgctctgtcgctggagtgcaggctggagtgcagtggcgcgatctcagctcactgcaagctccgcctcccgggtttatgccattctcctacctcagcctcctgagtagctgggactataggcgcccggctaactttttttttttttttttttttttgkatttttagtagagacggggtttcaccatgttagccaggatggtcttgatctcctgacctcgtgatccacccgcctcggcctcccaaagtgctgggattacaggcgtgagccaccacgcccggccacatctaaaggttttttgaagcctagcctgatgatagatttttaagctagtgagaaagatgaaaaaaagagcagcccctgatattcagaagctggcctggcaccaacagttaggccatgttattcagataatcccacagaataacaatctgatagtaggtttctctgagactacgatgaaataagacaaagcaagtccacttcatgattttgtctaaaacaagatcactttgccatttagaaaatctgaaacaccctccttcagccaaaatgagaaatgaaggaatgctactttactagttagagatttatcctcattttagtctcccccaccaactgccacaatatgtaagatttattgagatgtcccatgatagaattagcctcgctttctgagggcattcactctagagtaaacctctgcttcctgaaacccaccttcaggttattcaaccagagcctaaatcctgggtaggttctttacagcactctcttactaggacaccctgtggttccccatgctgcgtgatctccctcactgccacaagtaataaacccacctagttcaacgataggtgtgtttctgatggactttggctgggaggtgttgatactagtaaggataattttagtgagaaattgatcagcctgtgtgtgtgtgtttgtgtgtgtgtgtaagtgtgtaagtcagagtatatgtatagctcatgatctgacttttgaaaacaattaaagagttctaaaaatgcttagccctctaaacatgcttagtaatcttagattgtttttcccagtaggcacttttgaaagacagtattgttttatatatatatctttgaaagacagtattattatatatataacatactgttatatatatataataacctcctttttatatatatatttacatgtaaatgtttaccatatatatatgtatatatagtcgaaaagcagcctgtaaacatttgttcagccccttaaaaatttaatgatagattccaatgccctattctaaataaagtgtagtgagatccttaaaactactaaagggaagttattgcctagtcatttaaaaagacctgttaaatgtgatttcctgttaaatgcgattggatgttgagtttaaatatttgacatgcagagctgtgtttcaggattactatatggcaattagatactgtagttaataactttaggtttgtatcattctaacagggtaattttgaatcttatatcttaggtttttagggcataaagttgacctgagctgtggcactrttctttgagttggttactgccctttgaatcaccagtttatctttgtcttttgtctatataccgtttatttttttatttttatttttttaccttattgtgctggctcagagctccagtaacatgttgaatagagatgatgggagcagtcagccttgccttaatcccaaaattaggggaacaaacattcagccttctcccattattacatacgaaggtacgattttcagaggtgttctttgtaagcttgaggacattcctttctattgctagttttctgaaagttttatcggaatggatgttgaattttgtcaaatgcttttcccacatctattgagatgatcatatggtttttcttctttattctgttaatgtggtgaattacactgattcctttttcaagtgttaaacctatcctgtattcttgttacaaaccccagttatgatatgcttatatgctgctggattcaatttaatatttatgcgcatatcaacagtgtgtgtggaaaactttttatttaatgaaaatattctttaaaatgtatattatgagtgtataacttgatgaattttcacagctaacacacttgtgtaactaacaccttgctcaagtaacattaccagcatctggaaggccccttcaactcccccccacattcactacttccctaacccacatgagtaaccactaacctggtttctaacaggatagattagttttgcctgttttaatactgcatataaatggaatcttactatatacattattttgcatttggcttctttctgtcaacattatgtgtgaaattcatccttcttgcgttttcagcaaacttttgttttcaaagtttaagtgtattttttatttttattttatttattttttgagatggagtcttgctctgtcacccagtctggaatgcagtggcacgatctcggctcactgcaacctctgcctcgtaggttcaagcagttctcttgcctcagcttcctgaatagctgggactgtagatgcgtgccaccacacccagctaattttttttttttttttttttgtatttttagtggagacagggttttgccatgttagccaggctggtctcaaactcctgacctcaagtgatccacctgcctcggcctcccaaaatgctaggattacaggcgtgagccactgcgccaggtctaaatgtactttttaaaactaaggttatttcctcatctcattctgaaggttttttattctgtctaaaaaatattttcattgagaaaagggaagtgcaacttggtacttgaagtttaaaattaccttagattttacttttgacccttgaggtaactttcagttaacatggcagaaaacactttaaaaaaaaatagactttattttttagagcagttttaagtttacagcagaagagaaaacacttttttttttttttttggagacagtctcattctgtcactcacactggggtgcagtggtgccatcatggctcattgcagcctgggcttaagggatcctcccacttcagcctcctgagtagctcggactgcaggcacgtgccactacacttggctaatttttaaattttttttgcagagacggagtctccctatgttgcccaagcgggccttccactctgggctcaagtgatccttccaccttggcctcccaaagtgtggaggttacagatgtgagtcatggcatccagcccagaaaagcacttttgacattcaaaagctatggaaggccgagcaccatggctcattcctgtaatcccctagcactttgggaggccggagtgggaggatcacttgaagccaggagtttaagaccagcctgggcaacaaagtgagaccccccctctacccccgtctctacaaaaattttaaaaatcaactggatatgctggcattcatctgtagtcccagctgctcaggaggtggaagcaggaggatcacttgggtccaagagtttgaagttacagtgagctgaccgcaccactgcactccagcctgggtgacagagtgagacttcgtctaaaaaaaaaaaaagaaaaaacacaaaagtctgtcttgagtcctctgtaattttgactgggtgtggtggctcatgcctgcgatcccagctacttgggaggctgaggcgggaggattgcttgagccttaggagttcaagaccagcctgggcaaccctgtctctttaaaaaaaaaaaaaaaaaaaaactatggaaaattatagcctgtcctttctgtgattatagtggatttttaaggatagttgttataaaatacatatgtaacagttatttcatgaatataggaataggacaatatattcaatagttatcttggaagataacattctttttttttttttttttttttgagacggagtctcgctctgtcgcccaggccggactgcggactgcagtggcgcaatctcggctcactgcaagctccgcttcccgggttcacgccattctcctgcctcagcctcccgagtagctgggactacaggcgcccgccaccgcgcccggctaattttttgtatttttagtagagacagggtttcaccttgttagccargatggtctcgatctcctgacctcatgatccacccgcctcggcctcccaaagtgctgggattacaggcgtgagccaccgcgcccggccggaagataacattctttaatgtcccargtttatatttgggatctgctttctattccttgtcctttaggagaaagtgttattggtggggatagtactttagaaaccagatttcgaggggaaaaaaattctagaattaaatgggttaatccttcacccaatgttagctgcttttgtcaagctttatgtctctcccctttaaaagagggagatgttatgctgattttgttacatgattccacattattactttactagtaaaatatttggggaaaagaaaggtgtataatcctacattatacacaaataatcatacattatttactagcaaataatgtatgattattcgtggagtggtacaaacattaagtagattagtgattttatttataggagagtgcattaaaggacagtgacaagcaactaaagattggtgatatcatttgatctaatagttttattaagcaaagggcagaggatatgaaaatacctgtgtttttcaaggcaggtattctgttttccatttttatatattttatttatgaaataataaagtttcttaatacaattgaggcaatttagttggtgttatttaagcagagtgtaactcacagatttttaatatgttatttttaaattgtacatttctgacatagagttgatcatgtttttaaaggacccattggtggtggaactttcaaggcctggaccactgacctcagccttgttcctgtttcttcacagcatgaaggagactgaaaaaggaccactttctcctaaagttctttttaatcagctttgtcagaagygggtgcatctacatttaatataaataattatgagttacaaaatactaatgtattcatcatttaacatgaatagtcgtttttactgtaactttgctcttattgccctgactatgaagagaactaaaatttgttacagctctatgctttatgaaaattatatctcagtcctcagaagaagcagcttatcctcatatataaggaaatggagacacagaaattaaatggctcacctagtctgagtgaaaagctgagaatcaaatggagatctgtcctgacttggatgcctatgttgtaataccataaagtgagaaaaccatagagttgtaaaatctagaaagtaccgtaagataacatctaatctagctttcttattttaaaagatgagctgtgaggcaaatagagtttaagtgaatttctcaaggtattacagtatgtttaaaaaccaaatccttatgtgcctggaaataaacacataaaggatctgacttgactttaatgcattcatgtattcatttatataaaaaattgagagcttgctttttatgaggtacttgctacaattcaggggtacacaacatatattgcgtcacaaatgcaccctgtcctcatggaactcacaagctagtccagtccacaattactaaaatatgtagaaggaaaattatttgaatatgagcttgtgtttttgtatatctatagactttaaaatctcattttaattaaaactagtaatgaatgccatgatattttaaatatagtccaaaatagagggcttagtgtatgtttcatttggttggcaaatgatgtttcttcaaagcctgaggaccaaaaaaacctgcaaaattctcagaggcatgagtgtctcacagagttaaaaagtttttagcacagccataataaagaatgaaatcatattctttgcgacaacatggatgcagctggaggccattattctaagtgaattaatgcaggaacagaaaaccagataccacatgttctcataagtggaagctaaacattgggtactcatggacataaagatggcaacagtagagagtggggattactagaggtgggagagattgagggaggaagggttgaaaaactaactattgggtactatgcttagtacctgagtgacgggatcattcgtactccggacctttgcatcacacaatatacccagataacaaacctgcacatgtaccccttgaatctaaaataaaagttgaaattaaaacaaaaaaagttactaggtcattgtatgctttagaaatttgtttctgactttgccagaaataacttgttttgtatagttttcttcctggttataaaggtttattaacattttaaaaattactatyaaaataatgggcactcatagataaaaattcaaactcctctctatctttactcctcagaagtaactattatctgattctttccaaaagtgatcatacatacacagacataygcaaattttttgcaacttgcttgatatattttatacatctttccatgttagcacatgtgtgtataacttactcagttttgtatgaatacactgtacttgcggaagtacatctgtaggataaattcttagaataactagatcaaacattatttgaagagttttatgtattttttgtattttttaggagacagggtctcgctctgtgcccaggctcaagtgcagtggcccaatcatagtcgaattcctgggctcaagcatgcctccctgctcaacctcccaagtagctgggattacaggcatgagcrtcatccatgcttggctgaaaagttttaaattgccttttttttgtttgttttatggcgtttacttttaaaagaagtatacattagacaaatatatttttttaaaatcaagtaaagatttaagccacatgtgtttgggtttatttctgaactataytctgtttcattgatctacatgtcttgtctttaccccaaagcctacactgtcttgattactgtagcttcatagtaagtcttgcaattgagtagcataagttctcaaattttggtcatccttttcaaactattctaggtcctcttttttttttttgagacggagtttcgctcttgttgcccaggctggagtgcaatggtatgattttggcttaccacagcctccacctcctgggttcaagcaattctcctgcctcagcctgggattacaggcgcccgctaccacacccggctaattttgtatttttactagagatggggtttctccatgttggtcaggctggtcttgaactcccaacctcaggtgatctgcccaccttggcctcccaaagtgccagggttacaggcgtgagccacygcgcctggccggtcctttgcttttttatgtaaattatagaatcagattgtcagttgggattgttttgaatgtgtagatcaatttggggagaatcaacatcttaacaatgttgaatcttttcatgtatgatatcttaccagttttctaggtctttgatttttctcatcaagggtgtatagttttcagcatacaaatcccrcacatattttgttagatttatcttaagaatttcatgtttttatgctatttattgtaaatggtactctttttaaagaattcaatttccaattgttcattgttaatatacagaaatacagttgatttttgtatgttgaccttgtttcttgctaccctacccaacttgctttactagttctcttagctttatgttgattcgttggtatttcctatgtagacaatgtcattggcaaatgaagattgttttctttctttccaatctgtatcattttatatctttttctcattttatatcactgtcagggacaaccaatacatattgcaataggactcttcttggaaaaaaaatgaaaaaggaccaccaatacaatgttagaatggtgaaataggcatcttgccttattcctgatattaaagggagagcatgcagtctttcacacgtaagtgtgataataactatagagttttcatacatgccttttatcaggttgaggaaattcccaattattcttagtttttcttttttctgagagttcttattaagaaatggattttttaaaaatgctttttctgtatccaaataatctttttttttttttttttttgtctgttggaatagtaaattgtattggtggatattctggctagctttagtaaggtatatgtgacataaaataaattgtacatatttaaagtgtactactggggccagacacagtggctcatgcctgtaatcccagcagtttgggagccaaggtgggagaactgcctgaggccaggagtttgagactagccaggacaacatagggagactctatgaaaaaaaaattagccagaggtgtgatggtgcacacctgtagtcccagctactctagaggctgaggtaggaggatcacttgagcctaggagttttgagtgttcagtgagctgttaatgtcattgcactcctgtcacccctgtctctctaaaaaataaaatataggataagttttgacatatctatacactttgtgtatgtgtgtgtgtgtgtgtgtgtatatatgtatatatacatacattcattcaatgtaatgaatgtatccatcaccccccaaagttttgttgggcccctttataatccctttctctagaacctctcccctaaactccatccctgggtggtataccccttacctgttttttttkttkttgttgcaatagattagtttgcattttggggaattctatagaaatggaatcatacagggtgtactctttttttatctgacttccttcacttggcataatttgtggtttattcatattgtgtgtacatgaaccagtctcttgaagtttctgttatagtggtgattatcacacactttgaccacttgtgatgagccttatttgggagcaaggtcttcaactttgtggtttttgtttgttttatttggttttctgcttctgcattagttcacttagggtgatggctttcagctgcttccatgttgcttgctgcaaaggatatgattttgttcttttttatggctgtgtagtattccatggtgtatatggaccacattttctttatccaatccaccatatatgggcacctaggttgattccatgtctttgctattgtgaatagcactgtgatgaacatagaagtggattaaatttctttttcttgacagtctcctaatttatgcttgtacatatatttttctctcatgccttgaggtttttaaaagtcctctcctctttctcatggcaatacttttactaaagtacatttcctgggaatccttagggttccccttattttgaataggctgaatattttcatatgtttggtgatttttatcttttaatcctttaataggtttgaaagtctctcttgatatgggtagctcagataggctccatcrtagagtctagaaatcatcctatgatttttttttgcccattcctaggttaaaaaaaaaaaaaaaaaaaacaaatctaagtttattaaattttcttcagkggtttagaaggcagtaaatagtttttgcattggttgagaaggagctataggcagagacatggtggaggcagtttctctttgttcaggaatgatttcctccttgtgtgtctgctttgaaagccataaactgccccctcctcctacctaccacttggctagtgaagatctctgagggattctcctgttccctcctctagtcatctgctacttcactggccttccttggagtatacagcataagtatagggttctgcagtttctgcctctcctgatgccagctgtggaggtccaaatargattagaatatgtgtccatcttggtttctgtcctcatctctaatctaggaggtgggttctgtccaccaagtgcaggtagggaagcccatcaaggtaataaagtattgtcagcatgttgctatgtgctgctagttagcaagaatgtctggagtggtgtttcctcttacaggctggattgatgaccggttaatgttttagcagtcagggactcacttyctttgtattattaggattaatatttatcctgagataatgaagaataatgctgaaagtactgcacttggccgggcgtgatggctcatgcctgtaattccagcactttgagaggctgaggtgggtggatcatttgaggtcaggagttcgagaccagcctgaccaacatggagaaaccccacctctactaaaaatacaaaaattagccgggcacgatggcaggtgtggccagcaactgtagtcccagccactcaggaggctgaggcaggagaattgcttgaacccaggaggcggaggttgcagtgagctgagattgtgccactgcactccagcctaggtgacagagtgaaactccatctcacaaaaataaaaatgagataataattaaaaataattaagtactgcactctgtcaaaagacctgtagttatgttagtggcacttagcttgttcttcgattttctcaagcataaagtagaacttatattaattataaattcctgaacagtgctgttttgtatatcacatgagatatgttgtaaatatcataaatagttgtaaatgtgtcttctactataatatattctaattattttgtattttgacagaattatttcttcatcttaggtctgaacactttctagatttaatacttgtctgcacttaaggcaaaatgttcattttagcatagagtttactgtaggttactttttaaagttactgaaatcaaccaaatatttcctatgtcagtgtctccatgaatagtacctgatctttctattaagttaatacagaggaaatttaattatcaagtccttaaaaaacatattcacagggagatcaacttatagtcctttatatgaaatagaaacactctcttgctttccttttggttaaggtaggaagataataaatcacagtggcttgggtttgaatactggtttatttgctagctgtatgaccttgcaaatgatttaaacaatactgctgagtcctcatgtgtaagttggagaaaacagtacatcccaacaaagttgttggaggattatgcctgaacatgtgaaaaactactagtattgtgcttaacatatagtagttgcttaataaatgatagccatattctcagtgcacacttaagatcacaccctaattggaccagtaatcacatttcatctatttagttggaaaagtagtaaactgtgtctttatgccattttgtgtgtgtgggtgtgtgttttggtagagaacggggttttgccttgttgcccaggctggtctcgaactcctgagctcaagtgatctgccccttggcctcccaaatgctgggattacaggcgtaggctgccgcacccagctaataatatgctatttcaagtgcatttagagaagagtgttgatgaaccatggaatgattattctttttttctttcctcttttgtttttaaatcacagggcacctcgatttaaagatttccagcaacaggacagtcaggagcttcttcattatcttctggatgcagtgaggacagaagaaacaaaggtcaggtttctttatgtatatcatgtattctcttcaagaagaggatacaaaactaagggattattggggggccaaggcggggtggatcatctgaggtcaggagtttcagaccagcctagmcaacatagtgaaacctcgtctctaataaaaattagccgcgcatggtggtgcatacctgtaattccagctacttggcaggctgagacatgagaattgcttgaacccaggaagcagaggttgcagtgagcggagatcccgctactgcactactccagcctgggtgacagagtgagactctgtctcaaaaaacaarcaaacaaaaaacaactaagtaagtaatttctattacaatttaaaagtacagttgagaaataatttaattttttagagtaaatattctagatattttttctttcttctgtaagatatttacctttatccttttacagccctattgtcctttttagttaatgtcctttggctgtaaataaaataatttaaactagcttaagtaaaaaggaattggggccaggcatggtggctcatgcctgtaatcccaacactttggaaggctgaggcaggtggatcacctgaggtcaggagttcaagatcagcctgggaaacatgctgaaaccctgtctctactaaaaatacaaaaattagccaggtgtggtagcgtgtgcctgtaatcctagctacttgggaggctgaggcaggagaatacttgaaccccaagggtggagkttgcagtgagccgagatcgtgccactgcactccagcctgggtgacggagtgaaacgctgtaaaaaaaaaaaaaaaaaaaggaatcttaagatgcagggagatattattcctgggcgatagggggatataggaacaggaaagctgtcaggaatccagaaagcattcttcttattatcctagtttctctggctctgtaaattttcttcatttttctccatgcagaccaagcagtatttgtatgtcatagttccatgtatgtaaaaactatactggctattcatgattctcaatttttaaattcccagtagacagaaacttcattattccatgttggattaaattccactcatggatcagttgtttgtggctaggagagaggagtcccagcctcttagatgagagagcatttctcagaaaaggaatagcctgtggactggatagattccccagtgttgattgtaggcctatcccctaactgataggctctttattgactttaacgttaaattagttaaattcaacttcttctgggaggggtttcctgtgcacataggatcagtttatcagagaaaatgcaagatattaaggatatcagatacacagcacacattctccattttcctccctcttactcatagaagacattgctgatcgttcctaacagtccaggtgagtttgggttcagcctcagaattattttctgagcacaccattgtgggcagcccttgtcagtcataattggagtaataggtgaaaacctgttttccattcaaggcaaatatacttcttaatctatrtggtaatatgtaataaaagcagccaagtgttcagtgaagtgcatatgtgcttgtgataagtagtgctaggcaagatggaccttccttttttaaaaaaaattctgccagatatggtggctcatgcctgtaatcccagcactctgggaggccaaggtgggcggatcacttgagctcaggaatttcagaccagcctggccaatatagtgaaaccatgtgtctactaaaaacacaaaaattagccaggcgtggtggtgcacacctgtaatcccagcttcttgggtggctgaggcatgagaattgcttgaacccgagaggcrgaggttgcagtgagctgtgatcgcaccactgcactccagcctgggcaacagagcagagcctacctcaaaaaacaacaaaaatcctgttttaattgtagtgtggcagtgtctctttactcctagtgaccagtttccagtgaagagaaaattagagttctaatattttctttaaagtttcctttaaaagtaaggattgagttaattactctctcctgctataaaacatcatgtatcacaatcctatttttaattgtctgtttattgactttcttattaagctaattgaattcagcttttagaggtgtcattccttttctgccacctctctacttttacrtatttgatcataaaccctaccactttctatttagatttatgtccctatctgtcagctttcttagattgtgatctctttgaggaatggtactatgtattgtctctgtcctgtgtgccttgcacatagtagatgttctgtgaatttgtgtgtgtgtgtgtgtgtgtgtgttttgttttttttgttttttttttgagacagggtctcactctgtcatccaggctggagtgcagtggcatgatctcagctcactgcagcctctgcctcccaggttcaagtgattctcctgcctcagcctcccgagtagctgggattacagggtgtgccaccattcccagctaatttttgtacttttagtagaaatggggtttcaccatgttgactaggcttgcttatttatttagacagtgtcttgctctgttgcttaggctgcagtgcagtgttgtgatctcggctcactgcaacctccaacctcctgggttcaagtgattctcctgcctcagcctcctgaatagctgggattacagacacatatcaccaagcctggctaattttttttttttttcgtatttttagtagagacagggttttaccactttggccaggcttgtttcgaactccggacctcaagtaatctgcctgcctcggcctcccaaagtgctgggatcacaggcatgagctgccactcygggctccctgtgaatgttttttgaatgagttgtatgtgcttaaccttaaacgcaacttttttttgagaatttgaattgggaagaaatcaaaataattattcttatatgttatactagctagtttctttgtgatttgcaattattttgaatatgttgtatttgaataaactaataaaccgacaggatratactgtgttgttttacctacattgtgtctaaaaaagaaaaaaaaaaagagatttataattagttaaccattgaggatattagcgtagtcccctagctagtatttgatcacattttcttagagctaggaactgatacttagagttgagcttcaaactcaagtctttctgactcccaaactaatgatctttctaattctataaaatactgctgattgaagtttaaatgcttggacatctgtagtcagtagaaataatgattttaagtctgctatttaaaatgtaaccacaattattttactatttgtaaaagtattaaattggattcaataattatggtatattgctcttcttgttgaggggtagatgcatgttggcacggtgggaacaggttgctttttgtattgtgaacaataaatgggcctacagatgatatgagttactttaagattaattcagatttatcaattgctagaattatttttttccccatgatttgcaggaatacgtttactatgtggtggtcatgtatcattaaatggaattaaaaattatgtaagtgggctgggcatggtggctcattcctgtaatcccagcagtttgggaggctgaggtgggcagatcgcctgaggtcaggagttcgagaccagcttggccaacatggtgaaaccccgtgtctactaaaaatacaaaaattagccaagcatggtgatgcgtgtctgtaatcctggctactcaggagactgaggcaggagagttgcttgaactcgaggtggaggttgcagtgagctgtgatcgcggcactgcactctagactgggtgagggartgagacaygttctcaaaaaaaaaaaaaaaattagtaagtgaagttaaaagtcatgtgaatggattaaaattatgtcttggggttttttttctgttgatattatwaaaaaagtaaaatatatccctgtcacttttttctgttttacctctataatttgatagcagtctttgttataattaaattattgtttagtcgtaatggtgcattgggatgcacagtatcttaggcagcccagcaggacacattggttttgaaagctcttatctttcttgcactatttgaaggctttaaatggtgcagtaaaattaaaatgtcaagtctgtggatctattcaatttcataagcgaggacagtcctgacggtcagctacagtatcagggcaggagctgcattgtctggcctgggaactccacagctgttaatcatgctgttgttgtagggtgtcactgccatgtgtttcttgattgaaggaaggctacagtgttatgtctgccaccagaatcttttagtaatgatgaaaaactactgacctcctttcatatggtttcattaaagtcttttctgaactacaacattgaggaatatactcttgctgaatatagtacttaaaggatcatttgtgcagaaattgtaaatttttcatgtacaaaatcaaatttcctagaagtagttcttttataaggcagtctttttaatttatacatttatgcttctttgttttttccttttaatttgcacagtcactaaattaatgatactatatttttattatcttcaagatttattactgtaatatatttttggttagaattattttaaagacagaatatctcagctaaaactgtacattattttcattcttgtttttaaagtataaggtggagatctgaaatagttgaaccttgatactgctaattgattaagtgctacagttattaacagctccctgaccaaagtatgtatctttcttttaacctaaattgttcaaagcacaactcttaacaatgaggaattgtatatggacgtaaactcatttattttcctcaacttgatgaattacctattaattgacttttaaacagtttggagtagagaatataaattcacggttaggatcaaaattaaaaagcaaaagtctaatatttaaaagttaataatgtaaacaatttcattttactctttttagagtgtaatcacagctttttagcttttttcctgctgcttgaattggtaacttcttagcttcttttgagtgatatgacatttcaggatatatagcaaagtttcattaaatcatatcaaaaatcatgtctgaattagtaaaatgtttaaattgtaggataaatttacagactgagttgagttagaagtatttctcttgagttgtttgaaatgttatgattatctgaaatatttgcgagtgaacattggtatttattggaatttttcatttaagttcattaaatayttctcctgcatggaatttacacaattccaatttgcttactttagttcaataaattcttttttcaaggtgtaaaagccaactttagcttagacaatgtctgaattatatcaactttcaaatttattgagtctgaattggagattatttcagtatttaatagcttctgggagacattttattgtttgatttctttatagtatataagtgtatttcaggacttgtgtcacacggtatgaattgctttatgtttgcttttatcccctactttgtaaaatatttaagtgttttgaatcttgtattaattttcaaaatatgcttgaggacagtgaacagttataggaaatataatgtgttaatcacaggccagttagtaataagtgaaactcggtttcacaattgttggaggaggatgtgttaaaaaacatatatcatacacagaagaaacataaatcatacacagcagaacaattctgggggtcatgagtgtcttctgcttatccaggcagcagggcatggagcgagaataagaatgtgatcacctccttctccatataatattgtgttcttagattaaaagcatgttataatggcagaaggggatgttggtgttgacaatatttctgattcataagtctcattgctccaatctgggttctttayctctcatatctgatgtacaggtgtcactctggaattcctcctaaccatgctcctgggagatccctttgcctctcttgtgttttgactttgccattgtttatatcccgtgttcttgtctttcttcctttatgctctttttttccttattcaaaaggtggcatataccatatatataacttgtactttgtcttttttcacttaatatatcatagtgatcttttccaattaaaagataggaaggaccaggcaccacctgtaatcccagcactttgggagtttgagaccagcctgggcaacataggaagagcctgtctctacaaaacgaacaaacaaacaacaaaaaacaggtgtggcagctcatgcctgtaattccagcactttgggaggctgaggcaggtggcttgcttgagctcagaagctcaaggccagcctgggcaatatggcaaaaccccatctctacaaaaaaatttttaaaaattagccaggtgtcatggtgtgtgcctatagtcccaggtacttgggaggctgaggcagtaggatcacttgaacccagagaagtcaaagctgcagtgggcagtgattacaccactgcactccagcctgggcaacaaaacaagactctcaaaaawatatatatatatatatatattatatatatattaattatatatatattttttggaaagataattaaacttttccctcatcctactgtcataatctgaattaggaagacaaaattcatccactaattaggggcatagttaatgttaaaaggtcacttactaagttttattcttggagtatgtagttttattctgaaacttttctgtgagattggatctttcctaaaacatacacaagagatgtagaaatagttaatataaaccttgtcatttactgagagctgctgaaaacataatcattattgacaactaagttcaagtaaaaccataattaaaatttgggggattcttcttgctatggacattaattgataaatttggactttagttatatgtgtatataaatgaggtagtccacatagcatagagattatagtaaccagcttgatagcttcttaatatagaaaggtcttcatagacaataaatttcatatggtctattttcttttttggtcctaattaagaagtgtcattttagagagagggagaaggaagaaagagggcaaattaayttatgytaagcaacaggactaggctgcttgctttttgtacactgataaaaatacattaaatccaagagagaacctaaatgtaaaaattctgactcttacttgggaaaatttgacattagagcaatctattcatggaatttgagacctggaagaaattacattttttaaaaaatttggtcattttawtttcaaactagggaactgaaatccacagtgtaccttgctgtttgaaagtacttttattaggagsatgaggcctgagttaactattattagaccagaatctattaactttgktttacagcgaatacaagctagcattctaaaagcatttaacaacccaactactaaaactgctgatgatgaaactagaaaaaaagtcaaaggtatgttgactctttgttaaaacttttttctttaagaaaatattaaaattttattttagttggaaaaagaactgaacattatgtgaactaatccaccaaagtagtggctttaaaaggaggacgtagttgctgcagtgtctgaaaaatactttagtggaacatagaaaatgctagaatgtattcatgtgaatttataagaataaagctataccaagtatacagattgacacyratacctttatgtgaggtcttctaagggaaacttgaaaggttgttgaaagtagcaaccacacttggaagttcatatgtatcatattgtatcatttgacatgtgtttggatcaatggatttatggatattttttagatgtaactagacaaaatgtttaagtgctccaaagactcctgcaaataaaccgtttattgaagagagtgctggtaagtcaagtgtaagtgcactttgcctactcctagtgtttgctattcatccataaaaatatgagccccaaatgatgattacctaatcaaagttggttatttatcattatcaatactatatagggtttatataccttgccctaaatgtatattctgcattgagatactaactaatgttagcatgaagtgatttttagaagacatttaaaaatattatttgtatttttttctaacttttgtttttgtggttttataatgtatgtactacaggtctataatttgcaaacatacacacattgttactgtgcactttaytgtaattaagggttcaagatttttaaaaaacgtagctgctcaaatatgccttgttcttttgtgttgagatagtgccatctcgtggatgtttagaataacagccccgtttttcttccccctctttccagttttgtactatttccaatcccttttagtttttctagaagaaatatctttattattatagtatttctaaatacaattttaattaatgtttactgatatattcacatgttttctgtcattcagtgctctaatattttaaatgattttgaatattgtttgtatgaaacttgaagatagaggctcaaaaaagaagtttgaaagaggggtgaataggtttgttaatatactttttcctcccatggtttatgatggaaagtttcaaatttttattaaagtagagagaatagcataatgcagccctttatatctgtcacccaacttaaactgcgttcatggtttatgtttaatccattttstcccaacctcaggttattttaaactaagtcattggcatttttttaatttataaatatttcctgagcagaataattttaacttttaaaaatataaccatgttcttgagttcttaattacctatgttaattccttacacttgccttttacgactgttattttcatagccgtgatcctggcatccgtagtcctgatagcataatctccttttccattcttctgggtacttattggttagacatgaggttttataagttttaatgggagtggttgaggtgtggtacgaatagtggttgttttgttttacctcttaagaatagttcattatttcttggagactaaagtagttgatagtcgtaaatctgctacaaaattgtaaaggagaaagactttagaatgttgtatgtatagtaaaatgtattattaaatgtagtacagaatatcttattcagattacttttgaataaccagaagatagcctattatactgctagatggatggttgacatgttttttgcattaaaaagtatgatttttacagcatatggaaaagaaggtgtgaaaatgaacttcatagatcggatctttattggtgaattaactagcacggtcatgtgtgaagaatgtgcaaatgtaggtactttagaattcaattcagcatggaatggattacaatcacatcatttttattatattttctttcacatataatcattggcagtcatttttaaaatttgacagatgattacataatgattcttgaaagtctttttatacgctacactcctagaaagtaaatgtgataatttatatatttttaaaagtaaatgtatttttgtgttatttttcctcatgacacacctatgaggcagttttagcctatcttaatatactgaaattcattagctatctgtttgaagtgagagaaaaacttctgtgaagagagtaactgtgctacgttgcagtgccctaaaatgtaattccaggctgggtgcagtggctcatgcctataatcccagtactttgggaggccaaggccggcggatcacttgaggtcaggaattcaagactagcctggccaacatggtgaaaccccatctctactaaaaaaatacaaaacaattagccaggcatggtggtgggtgcctatagtcccaatgactcgggaggctgaggcaggagaatcacttgaacccagcaggcagggttgcagtgagcygagatcgcactactgcactatagcctgggtgacagagcgagactcagtttcaaaaaaaaaaaactaattccaatagaaataacttaatgtattaacataatttagggtggttatatcacctttgatttaaagtttatatgacgtattaaagatttttgtgtagacttcactcactttgaacttaataatttttattttgaatgccatctttaacaacttaaagcatgtatgaattttttgtagattttcaattgcttggcaaggaatatttctgtaagtgtatgacttagagtatgataggtttaaatttctgttagattttaatagtaaaaggagcctttattcattttcctgtcccagattatgagtatttttctgtgttctctagccttaaagaagcaggattataaaatatatctcattctagcctgtcacattgaaacacagaatgcatgaccatgattatttaagtttctagactattcaacacagaagttgttttctctctcacaagatagagagtatcttttaaaacaaaattatcttaaagaatctataaaacacagccaagctctctgctttttttcatggctttttcttaacatttcatagtttacttatgttacagccctaagctaaccaaaaatgtctagtctctttagttaatctgttttattaaacagtttttttaagttattttaaatattacaggccagtcatattgacagtaatataaaattcaagtggatcacattcactgatgtttgagaatatcttgttttgattaacaatgtgctgcaatacccaattaaattgctatttttttcaggaacagtttttaacgtaaaattttaggttgcccgggaagtttgatttctttgtactttacaaaactgtatgtttatattagaattctaactgaagttttcaatgtgttttccttttaagatctccacggtgaaagatccattcattgatatttcacttcctataatagaagaaagggtaaggagaagaaaactaatgatgaagctttggtgaagaacatttaatcatttatttaaacatttgttgagtatattaccagatatctgagagtcattattttttatatataattgagtttgtattcataattgagtctgatttgggggtttgtgtaagtatgcataaagtatgatggtttttattctcaaggaatttaaactcttaaacactttttattttgataatttgttaattttttgtatttcaagtcagtcaaaaattttaagatgaggacatccagaatttatttactaaagaggttttggtttctgtatgtggcatttacataggtttcaaaacctttactttggggaagaatgaataaatatagaagtttacgggagacagatcatgatcgatacagtggcaatgttactatagaaaatattcatcaacctagagctgccaagaagcattcttcatctaaagataaggtaagaccataagcatctgttagacgtctgttttttaacagtttattaacaaaagtttcaagcacatctaaaagtagagaacatagtgtaataaactctcatgtacccattttttggcttcataattatcaacttggctacttgtatactmactatatatatcccacatcctccccttcctcccatcccagactatttttggataatcccagattatttttgaaataaatcccaaatatatcatatacttcaatgtgtatctctacaagagagtttttgtttgtttgtttgttttttaagacggagttttgctcttgttgcctaggctggagtgcaatggtgcaatctcagctaactgcagcctccgcctcctgggttcaagcgattctcctgcctcagcctcctgagtagctgggattacaggcatgtgccaccacgcctggctaattttgtatttttaatagagacggggtttcaccatgttggtcaggctggtctcgaactcctgacctcaggtgatctgcccgcctcggcctcccaaagcgctgggattacaggagtgagccactgcgcccagcactaaccgagggatactcttaaaaaccaaaaaccacagtaccattatcatatcaaaaatattaattcattataaataaataaggattcagtcattatttaaatttctgcagttgtctcataagtacttagttttttattttgctttctaaagtttggattttaggatttaaaagaggtctatggattgcagtgcctcttttttttttttttttttgagatggagtctcgctctgttgcccaggtggcgcgatcttggctcactgcaacctctgcctcctgggttcaagcgattctcctgcctcagcctcctgagtagctgggagtacaggcgcatgtcaccacaccyggytaatttttgtatttttagtagagaccaggtttcaccatgttggtcaggctggtctcgaaatcctgacctcatgatccasycgcctcagcctcccaatgattgccatgtctcttaaatctcttttcatctacagattccctctccctctttttcctcctttgcagtttatttgctgaagaaatcaggtcctttttttcagcagcatggtgttaacagattcctctgtcacctttatttctcctctgagacatttagatctagaggcctagttaggttcagatttaattacttatttaatttttagcaagaaaacttttaggtggtggcatgtatacttccatcagctagatgcacataatgttttatgtctctctatgatattaccagtcactgataaccattgtctagatctattatkttactagggacatacctggttgttgaattatcccatgaaaatggaaaattattccatgaaatggtgatcattgtaaccattgtctagacctattatttcactagggacatacctggctgttgtattatcccatgaaaatggaaagaaatcaatctgaacttatacttcagcaaaaaaaacttttttatatgaaatgatttgtattaatttggcaaattaatattaaatttaacttactctattaattaattaattaattaattattgagacagagtctcacrctgttgcccagccaggctggagtgcagtggcacgatctcagctcactgcagcctcccaggttcaagtgattcttgtgcctcagcctcccaagtagctgggactacatgtgcrcaccaccatgcccggctaatttttgttattttttgtagagatagggttttgtcatgttggctgggctggtctcaaactcctgatgacctcaagtgatctacctgccttggtctcccaaagtgctggaattgcaggtgtgagccacagcgctgggcctgaatttaacttactctgttagaagacttatgttagaagtcacaagacttcagaaaggacaacatgttttctataaataaaagctaattttgcttcataagatatataggacagttaaattcaatttgagcatatgctttattctaatggtataaaacaaagcatcttacagagtttgaaaaggttaaagcattaattgtgttgctattcccctaaaaagcactggttattaaaatataaatgtgtagtgattttttttctttatttttatttagtttaaagagttaggagattctgtggtactggccaaagtagttttaatacatccgctatccaaatgtatgagagaaatactttccacacagtattggttaggaactgagaatatgcatatatgatatatagaaactgtacctcaaagatctggacaccacatggatataacttgtgcttgtgctgaacaaattggacctactctttattgaaaatttttttcatataatattttttgttacttttttattggacctattctttattgaacgtttttttcatgtaatagagttaccttttttttggttttgatgggaaaaagtgcaagtttgcatacggttctaaaattagaaaagtacagttctaataacatctttaaggtactatattcaagaagcgaaaatttaaatgacataaatgtatttcagtcattaggaagtttacgtttagaagttatttccaatagttcaactacagaaccagtttaatcatggaaccagaatgattcagtagttaactactttcagtactagttttataaagatcaataaagtcttgttttgctgatwagtgaagctgttaataagagtataaagatatttgtgacaaactttatagtattttttaatctcttacagtaatagaagcaccttgcatcttttaaaattatactagaggcacaagtactgatttgatcataagtttttgagttttttaccttttctgtttgccaaattatatgagttatctcattaaaaccacacaaaaacttaatatgaagaatgataaaaataattacataaaaatagtgaaattagstgagaaaatcttgccctcaagttggaagatgttatctctgagtaccttgaaaaagtgcattttcttttgcttactgataacaggcaaataatccagttaaataaagcactgtaaaactagtgtgtgcaatttctggcctaaatacagaaaaaatagtaacaggaggcagatacgtaaacagagtaaatagccataggcctatataaacatccttcttgaaccaaaaactaaggtaaaatgagctgcaacaaatggctaccaaaagatattatgtgaagtctattccataggctatttttcttcccttctttcccctccccacagctttttaaaaaaccatcatgctgattgaataattgtagagactggaaaatctcaaattgatatccttatataaaatcctgcctcagctcattagttcagaaagaaatccaaaagttcagttctctgagttgcttcaacacataagtatattagttttatgaaagattttttttttatttcataaaacyttaatacttctgccagaatcagaagtgcattgtgctctggtacaatttacatgaactttggttcccaccacctgttagctgcgcagcgttttgccaattaagctctttgagactcagctcttaaattcaattataagaccagaatcttgctgttttttctatacatcccatctgttgtttatttctgtttctacttttcatgcacttttggttttaattgaataatttttgtgttccatcttatttcctctgttttctttttagttattataaaaggtgttattatggaattgctgaaacctgtgttgtgcctctcatcattggggttatattcagaaaatcatagtcctcttatttacatggaagaaattaagaaaatttcaatctttctattattttaccaatcagaccagtcaccaaaagaatactgtgtagttacggtatctatcaatayacttcaaaatagatttgaggaaaacgctgtattcgaagggatcttacctgattttaccatttttcctaggtgctaaattgctcaaggtattatacagagatatttgagaaaatggcaacttaacctatgtaaatttttttaaggataaaattgaacaggtacttagtagttttaaagtccaagtaaaacagttgcaaggatatttttgtttatcatgtggtgttggctcaatttactcttgggaattttggaaacacccagagaaggtcatatatctcccctttgatcattttcatttcttatatttttaaactttaaaagtgggcttttcccctctacttagtgtctgtaacaaaaagagaagctccttgcatcttttaataatagaggtacaagtactgatttgatagtaaattgagtttttcacttctctttgctaaattatactacagttatctcattaaaactgaacaaagtttaatatgaaggatgataagcatcaggtgaggaaaaaaggagaaataaaaccaagatatggtaatgtgaatacaaatgaaagttagcactggtggaaaggcaacagatctggcctgagtattttagaaagtttaaaaaatagtgaaaggaaacagtgaatagaaattttttattggaaaattatgtgaggcaaaaaaagcactacccaaaaggtctgagggaaaagatagggaattatcatgtagccatctgattaattttttgtttccctagaccccactcctctccctattccccaccaccatttggtgctccacattgcagacagggcaatatttctaaaatacaaaaataggtcatcatattccttgtagccctcagaatcaagtctgatacatgcagccaacaggcatatgaaaaactcagcatcactaatcattagggaaatgcaaatcaaaagcacaatgagataccatgtcacaccagtcagaatgctattattaaaaagtcaaaaaataaatgctggcgaggctgcagagaaaaggaatgcttatactctgttggtagaagtataaattagttcaaccgttgcrgaaagcagtgtggctattcctcaaagagctaaaaacagaactaccatttgacccagcatttccattactgggtatatacctgaaggaatataaatcattctaccataaaaacacatgtaggtgaatgttcattgcagcactattcacaatagcaaagacatggaatcaacctaaatgctgatcagtgacagtttggataagaaaatgttgtacatatacaccatggaatactatgcagccataaaaaagaataagattgtgccttttacaggaacgtggatggagctggaggccattgtcgttagcaaactcacacaggaacagaaaaccaaataccacaagttctcacttataagtgggagctaaacattgagtacacttgtacacaagggaacaaagacactggggcctactggagggtgcacagggtgggaggagggagaggatcagaaaaaataatattggatactaggcttagtacctgggtgaagaaataatctgtataacaaacccctgtgacacaagtttacctttataacaaacctgcacatgtaccctgaacctaaaataaaagttgaaaaaataaatctcattgctgttcaaaacaaaaacaagtctgtgacttatatgcatctggttaatttttgtgtgtccttctcacctccccacacttgtactctattttctagctagacttccctaatttcttgttctttgtcttacctgtgggcctttgaactgtctcttctgccacgaacagtcccattctcctcctgtagcctctgctcaatttctgcatatttctctgatccactcaattctggattagttcttttcctctggctttctatagcactgtatttctcctatcataacataagttgtacctaacatttgagttcttaattatgttatgatcactgttttcagttatttacaccaattatattgagccaagaggtggattaaataacatgcctaagatcatacaagtagtctggcagaaatggggattcagacaggttaaacaaggaccatgttcttaaccacgtatactgccccctgctgacttgaacttatgtctcaccatacttttattgggatggattgcaggatctgcaaacaggaactgagtctgtccttcttgccactatgtctcaggtgcctagttcagtgcttgtacatggatggtgtttagggagaccactgagctcattctcatgattgctgccaatcgtaatagctgatactggctgggtgcggtggctcaygcctgtaatcccagcactttgggaggccgaggcaggcagatcccaaggtccggagatggagaccatcctggctaacacagtgaaaccttatctctactaaaaatgcaaaaaattagccggtcatggtggcacacgcctgtaatccagctacttgggaggttgaggcaggagaatctctggraaccaggaggtggaggttgcagtgagccgagattgcgctactgcactccagcctgggcaacagagcgagactccatctcaaaataatactaatagtaataatagctgatacttacgctgcttactgtgggctacgcactgctctgtgggcttttctatagtctcaaaaaataaggatgggaaggggtacttttatatttcactaggagtaggaggataaaagggatagatagaatagtctcattcaaaagttcctaagaccagctgatgatgagaatcacctgtttattaaaacgaattctcatacccaacctcagacatgattaatgggaatttcttagtggtaatgcctcggatatgtatcttttaaaacaacaagccctcttaggtgagtctgataatcacctgaatttggaaactattcaatcagaattagattaattggattctggacacagctatttttattagttayatgatcttggacaagttactaaaaacctgtatgggtctatattttccattgaccattaattttctgttggtacataatatttgtacatatttatgaggtatatgtgatattttgatacatgcatagaatgtatcatgatcaagtcaggtatcggggaacctgccccrrtattcacataggttcttttctattttccttaagcatcggccagcttgagaaataaagggacagagtacaaaagagagaaattctaaagctgggcgtccaggggagacatcacatgtcggtaggttacgtgatgccccacaagccgcaaaaaccagcaagtttttattagggattttcaaaaggggagggagtgtgcaaataggtgtgggtcacagacatcaagtactttacaaggtaatagaatatcacaaggcaagtggaggcagggcaagatcacaggaccacaggacagaggtgaaattaraattgctaatgaagttttgggcaccattgtcattgataacatcttatcaggagacagggttttgagagcaccyggtctgaccaaaattattaggtgggtattttcccttcctaatgagcctgggagcactatgggagactggggtctatttcatccctgcagtctcgaccataagagacggctacgcccyggggggccattcataggcctacccccaggcrygcattctctttctcaggtatgttccttgctgagaaaaagaattcagygatatttctcccatttgcttttgaaagaagagaaatatggctctgttccrccygctcaccagaggtcagagtttaaggttatctctcctattccctgaacaattgctgttattctgttcttttttcaaggtgcycagatttcatattgctcaaacacacatgctgtacaatttgtgcagttaacgcaattatyacatggtcctgaggcracatacatcctcctyrgytgacaggattaagagattaaagtaaagacaggcataggaaatcacaagggtattgattggggaagtgataagtgtccatgcaatctttatgatttatgtttagagattgcagtaaagacaggcataagaaattataaaagtattaatttggggaactaataaatgtccatgaaatcttcacaatccacgttcttctgccatggcttcagccggtccctccatttggggtccctgacttcccacagtagtcagggtatttgggatatcagttaccttaagcatttatcatttctttgcattgagaacatttcagattttctcrtagctaccttgaaatatgtaatctatgttgttaactgtagttaccatactgttctatggaacattagaactattccttctaactctgtctttgtactcactaacatacctctctttttagcttctccactacamccccactcactcttttctaagcctctgatatctatcattctactctctactttcatgagatcttttttttttttttttttttttcygagacagagtctcgctctgttgcccaggctggagtacagtggcgcgatcttggctcactgcaagctctgcctcccaggttcatgccattctcctgcctcagcctcccaagtagctgggactacaggtgccygccatcaagcccggttaatttttgtattttcagtagagacagggtttcaccttgttagccaggatggtctccatctcctgacctcatgatccacccgcctcagtctcccaaagtgctgggattacaggygtgagccactgcgcctgccccaactttttttttttttttttttttttttttttagctctcacataagagtgagaacatgggatatttgcctttctgtgcctagcttgccttacttaacataatgacctccagttcaacccatgttgatgcaaatgacaggatttcattctttttagggctgaagagtattccattatggatatatactacattttctttatccattcatctactgatggacacttagattgattccatttcttggctattgtgaatagcactgcagtaaacatgggggtgcaagtatccttttgatacactggttttcttttctttggataaatgtctagtagtgggattgctggatcttatggtagttatattttagtttgttgttgttgttgttgttgttgtttgagacagagtctcgctccatcrcccaggctgaagtgctgtggcacagtctcagctcactgcaacctcttcctcctgggttcaagtgattctcatgcctcagcctccatctcccaagtagctgggactacaggcatgtgccaccacgcccagctaatttttgtatttttattagagacagggtttcaccatgttccccaggctggtggtctcaaactcctgacctcaagtgatctacccacctcagtctcccaaagtgctgggattacaggtgtgagccatcgcacccagccctattttagttttttgagaaatctccatactgttgtgttttgtttttttgttttttgtttttttttttttgagatggagtgtcgctctgtcacccgggctggagtgcagtggtgtgatcttggctcactgcaacctccacctcccaggttcaagtgattctcctgcctcagcctccygagtagctggcattacaggcacctgccatcacaccgggcttatttttttgtatttttggtagagacagggttttcaccatgttggccaggatggtcttgaactcttgacctcgtgatccacctgccttggcctcccaaagtgctgagcttacaggcataagccactgcacccagccatctccatactgttttctatgatggctgtactaattacattcccaccaaccgtgtttcagactccttttctmcacattcttgaaggcatcttattatttgtcttttttgataataaccattcaactggggtaaaatgatatttcattgtggttttaatctgcatttcctggatgattagggatgttgagcatttttttcatatacctcttggccatttggatgtcttcttttgggaaatgtctaacattagttccttataggatgaagagtttgcagatattttctcccattcaacaggaggtctcttcattctgttgattgtttccttttctgtgcagaagctttttacagtgtagtcccatttgtttttgttgcctgtgcttttgaggtctccataaaatcattacctagactaatgtcctgagtgtttctcctatgttttcttcttgtggttttatattctagattttacatttaagtcttttatctatcttgagttgatttttgtatatggtgagagataacattctagttgtattcttctgcatatggataaccagttttcccagtaccatttgttgaagarggcgtccttcccccagtgtttgttcttggcccctttgtcagaaatcagttggctgtaagtatgtggatttctttattctgttgcactggtctatgtgtctgtttttataccatgaccatactgttttggttactgtagwcttgtacattttgaagtcaggtagtgtgaggcttccagctttctcccttttgcccaggattgctttagtgattctggctcttttttggttctatacaaatttttttctttttttagatggagtttcactcttgttgccaaggccagagtgccactgtcagaggtgcaatgtcagctcactgcagtctccgcctcccaggttcaggcgattcttctgcctcagcctcccaagtagctgggattacaggtgcctgctaccatgcctggctaattttttgtatttttagtagagatggggtttcaccgtgctggccagactggtctcaaattcttggccttagttgatctatctacctcagcctcccaaagtgctgggattacaggcatgagccactgtacccagccaggttccatacatattttaggattgttttttctttttatgtgaaaaacgtcattggaattttgataggaattcatggagtctatagattgctttgggtagcatagtcattttaatattttcctgatccatgagcatgggatgctttttcgtttgtgtctccttcagtttctttcatcagtattttatagttttccttgtggaggtctttcacctcctcagttaaattattcctaggtggaatttttttttcttttgtagccattgtaaacaggattgctttgttgatttttttttccagctactttgttgttagtgtatagaaacgctactgattttcatatgttgattttgcattcaacaactttactgaatttgtttatcagttctaagagttttttgttgaagtctttaggttatcctatatgtaagattatgtcgtctgtgaagaggaacaatttgacttcttttccaatttggatgccttttatgtttttttttttttttcttttttaagttctagggtacatgtgcacaacgtgcaggtttgttacatatgtatacatgtgccatgttggtgtgctgcacccattgactcgccatttacattaggtatatctcctaatgctttccctccctgctccccccaccccacaacaggcccctgtgtgtgatcttccccttcctgtgtccaagtgttctcattgttcaattcccacctatgagtgagaacatgcagtgtttggttttttgttcttgtgatagtttgctgataatgatggtttccagcttcatccatgtccctacaaaggacatgaactcatccttttttatggctgcatagtattccatggtgtatatgtgccacattttcttaatccagtctatcattgatggacatttgggttggttccaagtctttgctattgtgaatagtgccacaataaacatacgtgtgcatgtgtctttaaggcagcatgatttataatcttttgggtatatacccagtaatgggatggctgggttaaatggcatttctagttctagatccttgaggaatagccacgctgtcttccacaatagttgaactagtttacagtcccaccaacagtgtaaaagtgttcctatttctccacatcctctccagcacctgttgtttcctgactttttaatgatcaccattctaactggtgtgagatggtatctcactgtggttttgatttgcttttctctgatggccagtgatgatgagcatttttttcatgtgtctgttagctgcataaatgtcttcttttgagaagtgtctgttcatatcctttgcccactttttgatggggttgtttttttcttgtaaatttgtttgagttctttgtagattctggatatttgccctttgtcacatgagtaggttgcaaaattttctcccattctgtaggttgcctgttcactctgatggtagtttcttttcatgtgcagaagctccttagtttaattagatcccatttgtcaattttggcttttgttgcctttgcttttggtgttttagacatgaagtccttgcccatgcctatgtcctgaatggtattgcctaggttttcttctagggtttttatggttttagctctaacatgtaagtctttgatccatcttgaattaatttttgtataaggtgtaaggaagggatccattttcagctttctacatatggctagccagttttcccagcaccatttattaaatagggaatcctttccccattkcttgtttttstcaggtttgtcaaagatcagatggttgtagatgtgtggtattatttctgcgggttctgttctgttccattggtctatatctctgttttggtaccagtactatgctgttttggttactatagccttgtagtatagtttgaagtcaggtagcctgatgcctccagctttgttcttttggcttaggattgtcttggaaatgcaggctctttttggtcccatatgaactttaaagtagtwttttccaattctgtgaagaaagtcattggtagcttgatggggatggcattgaatctataaattaccttgggcagtatggccattttcacaatattgattctgcctatccatgagtatggaaggttcttccatttgtttctgttctcttttattttgttgagcagtggtttgtagttctccttgaagaggtccttcacatcccttgtaagttggattcctaggtattttattctctttgaagcaattgtgaatgggagttcactcatgatttggctctctgtctattattgrtgtataagaatgcttgtgatttttgcacgttgattttgtatcctgagactttgctgaagttgcttatcagcttaaggagattttgggttgagatgatggggttttctaaatatacagtcatgtcatctgcaaacagggacaatttgccttcctcttttcctaattgaataccctttatttatttctcctgcctgattgccctggccagaacttccaacacttgttaaataggagtggtgagagagggcatccctgtcttgtgccagttttcaaagggaatgcttccagtttttgcccattcagtatgatattggctgtgggtttgtcatagatagctcttattattttgagatatgtcccatcagtacctaatttattgagagtttttagcattaagggctgttgaattttgtcaaaggccttttctgcatcttttgagataatcatgtggtttttgtctttggttctgtttatatgatggattacgtttattgatttgcatatgttgaaccagccttgcatcccagggatgaagcccacttgatcatggtggataagctttttgatgtgctgctggatttggtttgccagtattttattgaggatttttgcatcgatgttcatcagggatattggtctaaaattctctttttttgttgtgtctctgccaggttttggtatcaagatgatgctggcctcataaaatgagttaggaaagattccctctttttctattgattagaatagtttcagaaggaatggtaccagctcctccttgtacctctggtagaattcggctgtgaatccgtctggtcctcaactttttttgattggtaggctattaattattgcctctatttcagagcctgttattgatctattcagggattcaagttcttcctggtttagtcttgggagggtgtatgtgtggaggaatttatccatttcttctaggttttctagtttatttgcgtagaggtgtttatagtattctctgatggtagtttgtatttctgtgggatcagtggtgatatcccctttatcactttttattgtgcctatttgattcttctctcttttcttctttatttgtcttgctagtggtttatcgattttgttgatcttttcaaaaaaccagctcctggattcattgattttttgaagggtttttttttgtgtctctatctctttcagttctgctctgatcttagttatttcttgccttctgctagcttttgaatttgtttgctcttgcttctctagttcttttaattgtgatgttagggtgtcaattttagatctttcctgctttctcttgtgggcatttagtactataaatttccctctacacactgctttaaatgtgtcccatagattctggtatgttgtgtctttgttctcattggtttcaaagagcatctttatttctgccttcatttcgttatgtaaccagtagtcattcaggagcaggtttttcagtttccatgtagttgagcggttttgagtgagtttcttaatcctgagttctagtttgattgcactgtggtctgagagacaatttgttataatttctgttcttttacatttgctgaggagtgcttgacttccaactgtgtggtcaattttggaataagtgtratgtgctgagaagaatgtatattctgttgatttggsgtggagagttctgttcatgtctactaggtccacttgatgcagagctgagttcaattcctggctatccttgttaactttctgtctcattgatctgtctaatgttgacagtggggtgttaaagtctcccattattattgtgtgggagtctaagtttctttgtaggtctctggggacttgctttatgaatgtgggtgctcctgtattgggtgctcctgtattgggtgcatatatatttaggatagttagctcttcttgttgaattgatccctttaccattatgtaatgaccttctttctcttttgatctttgttgttttaaagcctgttttatcagagactaagattgcaacccctgcctttttttgttttccatttgcttggtagatcttcctccatccttttattttgagtctatgtgtgtctctgcacgtgagatgggtctcctgaatacagcacactgatgggtcttgactctttatgcagtttttcagtctgtatcttttaattggagcatttagcccatgtacatttaaggttaatattgttatgtgtgaatctgatcctgtcatgatgttagctggttattttgctcgttagttgatgccgtttcttcctagcattgatggtctttacagtttggcatgtttttgctgtggctagtaccagttgttcctttccatgtttagtgcttccttcaggagctcttgtagggcaggtctggtggtgacacaatctctcagcatttgcttgtctgtaaaggattttatttctcgttcacttatgaagcttagtttggctggatatgaaattctggggtgaaaattcttttaagaatgttgactattggcccccaatctcttctggcttgtagagtttctgccaagagatctgctgttagtctgatgggtttccctttgcgggtaacccgacctttctctctggctgcccttaacattttttccttcatttcaactttggtgaatctgacaattatgtgttttggagttgctcttctcaaggagtatctttgtggcgttttctgtatttgctgaatttgcatgttggcctgccttgctatgttggggaagttctcctggataatatcctgcagagtgttttccattctccctgtcactttcaggtacagcaatcagacatagatttggtcttttcacatattcccatatttcttggaggctttgtttctttttattcttttttctctaaacttctcttcttgcttcatttcattcatttgatcttcaatcactgatatcctttcttgcagttgatcaaatcggctactgaagcttgtgcatttgtcacgtagttctcctgtcatggttttcagctcaatcaggtcatttaaggacttctctacactgattattctagtcakccctttgtctaatcttttttcaaggtttttaacttatttgcattgggttcgaacttcctcatttagctaggagaagtttgatcatctgaagccttcttctctcaactcgtcaaagtcattctccgtccagctttgttccgttgctggcgaggagctgtgttcctttggaaggggagaggcgctctgatttttagaattttcagcttttctgctctgttttttccccatctttgtggttttatctacctttggtctttgatgatggtgactgacagatgggrttttggtgtggatgtcctgtttgttagttttccttctaacagtcaggaccctcagctgcaggtctgttggagtttgctggaggtccactccagaccctgtttgcctggatatcagcagcggaggctgcagaacagcgaatattgctgaatagcaaatgttgctacctgatcgttcctctggaagctttgtctcagatgggtacccggccgtgtgaggtgtcagtgtgcccctactggggggtgcctcccagttaggctactcggaggtcagggacccacttgaggaggcagtctgtccgttctcagatctcaaactctgtgctgcgagaaccactactctcttcaaagctgtcagacagggacattcaagtctgcaggggtttctgctgccttttgttgggctgtgccctgaccccagaggtggagtctacagaggcaggcaggcctccttgagctgtggtgggctccacccagttcgagcttcctggccggccgctttgtttaccaactgttartattatatgtataataggaaagtttgtttccaaaaaaaagtactatataaattcagyggagtggaacttgttggctaatgttatttttcctgattttgcagataaaaaaaattgaggcaagacactttttataacttactcttcttcccctgaataactaaaactgagtatcaattactcatgatagtcttttctttattttttgtcttgacccttcagccaaggtataggaaaagaaaaatgtacttcaagccatcagctgtgtggaaactttagtgaaacatttcaggtagcttaaaatttttaattagttgattccccccttcccaaacttaggttatttttttcccgtaattttcttccagatctatggcaaccaagcaacactgtgtcataatagtttatagtttacttttgttactttttaatttgtttaaaaaacagatacattttcagtgtttaaaaatgaacaagtatggaaaggcttatacagtaactgaaaagtctcctttgggaagccaaggtgggaggattgcttgaggtcaggagttcaagaccagcctaagcaacatggcgagactttatctctacaaaaaattaaaaaattagccaggtatggtggtacatacttgtagtagtaactacatgggaggctgaggtgggaggatcacttgagtcygagagtttgaggctgcagtgagctgtgattgtgccactgcactctagcctgggcaacagagcaagatgctgtctctaaaagagatttttcttttaaagaaaaaagtctccctcatagccctgttctacaaaagtcctatttccttccccacaaatagcctctgttacactgttgttagtttcttgtgtgaagatttacttttaaaatagaactattttttagtatatcttctagtgatcttagtttcagtaggcttaggaaatggatctgagagaaatggtatttaataactatgatatgtttaagaattattggcatttattttcaatgaggttacaagactcttttctttgaaaacactgtcaacttacagagtcaactaattcatgaccgaaaatgtattagaaaattgtcatctggagaaactgtcacataccagaaaaatgaaaaccttgaaatgaatggggattctttaatgtttgccagcctcatgaattctgagtcacgtctgaatgaaagccctactgatgacagtgaaaaagaagccagccattctgaaagcaatgttgatgctgacagtgagccttcagaatctgaaagtgcttcaaagcagactgggctgttcasatccagtagtggatccggtgtgcagccagatggacccctttaccctctgtcagcaggtaaactgctgtacaccaaggagactgacagtggtgataaggaaatggcagaagctatttctgaacttcgtttgagcagcactgtaactggrgatcaagattttgacagagaaaatcagccactaaatatttcaaataatttatgttttttrgaggggaagcatttgaggtcttatagtccccaaaatgcttttcagacyctttctcagagctatataactacttctaaagaatgttcaattcagtcctgtctctaccagtttacatctatggaattactaatggggaataataagcttctatgtgagaattgtactaaaaacaaacagaagtaccaagaagaaaccagttttgcaggtaattatttttttaattacataattattgatctcctgatagtgtctagtgagttacaaatttcactgagaatttyactgagaatcttgtccctatacttgtgttacttaggcagagattgtttcattcatatttgtacctgagcgcttacaatactgggcagaacagattttcaagtttttttatttaaataaagagcaggaagtatacaactctgccttgaaaatgcaaacccatataatcttatttgagggaactacctatctgaaatctatccagaagaaatatccctacaacttttttttttttttttggagatggagtctcactctgttgcccaggctggagtacagtggcgcgatctcggctcactgcaacctccacctcctgagttcaagcgattattctgcctcagcctcctgagtagctgagattacaggcgcccaccaccatgcccagctaatttttgtatttttagtagagatggggtttcaccatcttggccaggctggtcttgaatgcctgacctcatgatccacccgccttggcctcccaaagtgctgagattacaggtgtgagccaccatgcctggcctccctaaaacttctaattgtatcactggtaagataaatgataaagctaatgtgtttcacagatcctatcaatctgttgtaaactcaacgtaagataaattttgaagattttaaatagtagcatgtcataaagctagcgctataattaccatgattagttggtcagagagaagtggagaaagggggaaaataagaaattttcagttcatctttatccttgagtaaatggaaagaatactctgattcttagtgactacttgttttaaaatgtaggctttattattcaggtacggtgaggctraaagatcaggagataattgccactgaagaaatagtgtgttattcatagttcccaagaagtgggggcccaccatgctgcacaggaccacacagggaagcaccagcgtcagtcaggaggtaggggagtgaggggaaaacatgggcaggagcctttagtgtgatttctaaaggaagaaatgggtaaggcaggctaagcaggcttaggattggctagtttgaataatattagtgggctctgggatataggagctgtctytagttatcaggtgcctggtcctagagtgattacagcaagtggatagtgtcccagagtgtaagagcccagtgaaggaggttgttggggtatgcgctctgggctctggattggtttgcatgtgacaggcatgcatatgtaagttgtttactatctctaggaattagccctgggaggggttgtccctccaatgttaaccagaccctagatgtcaaagcatcagaataaagacatacttaatacactagtaataaagaaatgggagaaggaagaaatacctatatgcaattggcaatgttcaaatactaacataaatcttaggaatttagaaattggggctgggcacagtggcttacacctgtaatcccaacactttgggaggccaaggcatgaggatcgcttgtagccaggagttcaagaccagtctgaggaacatagtgagatcccatgtctacaaaaaacgttttaaaaattagccaggtggggtggcatgcacctgtagtcccagctacttgggaggctgaggtgggaggattgcttgtgcctgggaggtcaaggctacagtgagccatgaccacctcactgcacttcagcctgggtaacagcaatctcaaaagaaaaaaaaaaaattagaaatctagaaatctttttaaacccaaattcttcaactacacgtgcttctggtgatttttggctggagggcattgacagaaattaattctagtccatctgctttctaccttccaaaattttgtttcgtgttacctctcctattctttgttcttattaactgtgtgccttaaaaaaaattcctttactttcattttagcagagttttaggaaggagtaaagactgtcctttcatcagaagtccaatttctttaacatttttaaaaatgtggtatgatacytctgtataaatttttattatatggtagataatgtataaaatggaattttataaataaatttattgtattttatgtagaaaagaaagtagaaggagtttatactaatgccaggaagcaattgctcatttctgctgttccagctgtcctaattctccacctgaaaagatttcatcaggtaagtttcttcagtagcaccataattttcatcatgtgttttacagagcrttaagtcctatagaatattgtcaagaattagacaataaccagtaacttattgcattttaaaatgtgtcatgtgagatttactgctcatctagccataatagtttataagactttcctgattaaaattgtttaattcacaatatttgaaaatttaggcagcaggaacctaaatggtatctctgtgtgtgtttgtgtggtaatagaaaataagttttgtggctgggcacggtggctccctcggcctttgggaggctgaggtgggcagatcacctgaggtcaggagttcgagaccagatggaaataagagtcttgctctgtcacccaggctggagtgcagtggcacaatctcagctcactgcaacctccacttcccgggtttaagcaattctyctgcctcagcctcccaaatagctgggattacaagtgcccaccaccacactggctaatatttgtatttttagtagaaataggatttcaccatgttggccaggctggtttcgaactcctgacctcaagtgatccacctgcctgggcctcccaaagtgctgggattacaggcatgagccaccacacccagcccatacaattttcaaataaaaatcttaattgtataaaacaaattatcaagaaaacaaggagaaaacttaaataatttttttgggagggtagaggagagaatctccctctgttgccaggctggagtacagtggcacaatctcggctccctgcaacctccaactcctgggttcaagcgattctcctgcttcagcctcccaagtagctgagattacaggtgtgtgccaccacacctagctaatttttgtatttttagtagagatggggtttcaccatgtcggccaggctggtcttaaactcctgacctcaggtgatccgcccacctcggcctcccaaagtgctgggattttaggcgtgagccactgcacctggcccttaaatgaatatttaacttgacctctgtgtgaaagactttctaaatataaaaccttaagaaggaaatctcaaggaaaactattgatagtttacatatttgcaacattttaggtgggatccagatgtgcgagaggagatttttctccatcctgccatccctatccacagattagattaagttctgaattcttccatagccaaggttgtagaagctcaatggaactgaaatgacacagagaacagaagcagatgtattatgtcttgtcatatcagagcgcctaatggaaagggtacatctgcagtgattctgtgtgaataagagaggataatgccagattgcagaagctaatttcatgatgcaccgcagttattttatatttggtacttgcatccctgtttagaaacaacttacagaaataattcttgcccttaaagggaaatatttatggacatccatctaggtccctttttctctcaagctaaatgtaatgtcagcaaagccacattcttattcccagggtttgrgcattgtagggagcagagtccctaagcaatgcctgtgtttctagttcattgacatccctgaacgccttctctatggtagctttagggctgtatatcagaaacatccacaacacttaaatgcaaatctgaaactgaatagagatctttgtcataaatatgccaaaattttaatattgtaagtatataaagagtcttaaagatcaataagaaaaatatcagaccctaatagtaaaatgggaaaagaatatcaactgacatttctagaagtacaaagtccaggcaagtatgaaaaaggtccatccttcccagcaaaagaaaggcaaaataaaatggcagattcttttttcaacctgtccaaattagcaaagatgtagtagtgttgataaggatgaactgagatagagacattttcatttaccagcattgggagtgtaagttggtaacaccwgctagaaagcaatttagtaatgaatatgaagaacattgagtaattttttttttttttggagatggagtttcgcttttgtcgcccaggctggagtgcartggcgcgatctcggctcactgcaacctccgcctcctgggttcaagtgattctcctgcctcagcctcctgaatagctgagattacaggcacccaccaccacrcctggctaatttttgtatttttagtagagacagggttttaccatgtcagtcaggctggtcttgaactcctgacctcaggtgatccacccacctcggcctcccaaagtgcttggattacaggcatgagccaccgtgcccggccgagtaatgttttaaacaaaacaatttttgaacaaagctaattactcttgactaagaatctaccacaaggaaatagagatatacacaaaaatttgtgtgtgccccactcagatcatgccagacgtaaggcctagcttaaatgtccaatgtgcaggatatcaaatttatattttaatatsgaaaatgcagtgtatcatttcattaaagggaaaaaggcaggagactgtatatgcaaatataagtctagatattttccaaaaattaccacctaaaaaaagattcatcttatattaaagtccttcacacagtctcttgtatgatggggtagtttctcaacagcaaagtactgattgaggagaacacaatagctgaaatgatctcagacagtgctggtattgggtgcttatagaggtcacctgatgaaaaaggcaaagaaattgaatgtagattaaatattcctgggatatgatgtcataatttcatgtcagctattttcaagccttctaaagatcacttgaaaaaacaaatcagtaggtgaatacacttcggcaaaaaaaaagggttttttgtttttaaagaaagataagccataaaaaagcaacagatctacagtaaacttgtgattagtatgcaaatgaaagatcagtcattgacgtcatgacaggttgccccttttcgtttttgtctacccattcatttcagatttaggtatcttttcattccaacagagtccatttctatttatgggtctcctcaatacctttgatattttattagctagtttttattaccattacataatgcaaagcatatactttttaaggtttgcctttgaaaattagaaaaagagagcatatttaagaacataaaagtacaattttattkatgtaatatatagcatttacttttactgataaaatgttttgagtgttcaggttgtttgttttaatgaatgaatataattgaattttagaactgaaaaggacctaatctcatccttttatatatggaatcaagttgacaaccagtcactgagttaggcctagaacaccaatctgtttactctttagttgaatatattttcatgatagcataygtgtcagtagcttagctttyatattgaatttatttttccataagtgttgaaaagccataatgaaagtaactattccccctattgtttgtggtaaaaatccccatgtaaatgaataatctttgcagtaacaatttatgaaacctaatttttaatttattcatattaattttagactatacattagtcacattttttatctatgaaaaaactaagtcctacaatttctcttttggttttagttaacaaagacaatgctttatttctaattgttgcatttcaaaaatgttttggtctttttaaggctggcttgagtcttcgtaaagtaaacagacatgtagattttccacttatgctcgatttagcaccattctgctctgctacttgtaaggtacagtatattaagatatttaattgatttataaattaatatgcttgaaagtatcctatatattattagacaatgctttttctaaaaaaataacttctcttctgaaagggaattttaatagccagtgattaagtcagtaatatgtggaacacttaatacattgaatatgatttttgtcctttgggagacaaaggaaaattgaaaaggtaaggcatgaggcatgatggttatgaaggtctaagctgtttgtaagtgctactggaagctgatggttgctgagagaaggaggttttgtgtcctcgattgttccttgtgaactgtttaatcagtagtagttttaccatttgcggagttctgtatcttttgcaaatcagtgtagaagtgaattgtctttcgtgccacttcatgtgtactactgagagtggtgtacttgtcagcggagtgtgatacttcaaaactgctgctactttaataattaggtacagaaagcagactggcttatcattgcttattttacatgtaagaattgtgtagatgaagtagatgacttggtcttccttgaaggaagcagttatggggtaacatactgtcctgttcatgattactggctagaagtctagattttgtagtatgtaatagaatgcttattgaacttaatactttcagcacattgataatcaaaacaaaatcatcttaaatgcaatttttggttgaattacagtgtatctgctgtggaataccagcactatctgtcaattgttaatactcagtattcctagaatttaataatgtggtaaataataatgaaatttaacaatctttgtgttaaacttatgaaaacatatttttaaaaagtacctattacggagaatttccaataaacacaaaagcaaatagaacagtaccatgaacttccagcacccagccctaaaaccttacatccatggccagtcctgccctatccacacactaattcactttcttctcctttattattttgaagcaaacatcaggaatcatttcacccataatatttcactatgtatctctaacagataagaattgctccctctacactttttaacataaccacaatatcatttaataattctgtcatatcacctagtgttcatattttcaattgtctcataaatgtgatttttaaaatcaattattatccagataaggactggatctattgttcatttgtgcaatttttaattttcactttttggaatttcttttaaaatttaattttgtttaataattacataacatatttatataggtccaaagtcaaatgtacctaaataaggtaaattgaaagatatctggcttttctccatgacattctacctgtttgctccttccccttataggtaaccattttaaaaattatggcttattcttttataattttttttaaatataagcagacaggcatgtatattttcatctcccctcttaaataatggtagctgacactgtgtatccttttttctgccttactcttaacattatatcctacagcttattccatagcaccatttagagatagtctacactccatttttcaagcagcataatactctattgtgtggatgcatcatagtttattcaaccagtccccaatttacagacattttaattcgtgttttgatattacagataatcctgcaattaatagtgtggtacatgtcttttgacattttgctcatgtatttgtgggatcaaatcctagaaaaaggattaatgaatccaagagtaatacatacagaacttagcctgataacatgaaatatccctgcataggccaggctcagtggcttacgcctgtaatcccagcgctttgggaggccaaggcaggtggatcacctgaggtcaagagtttgagaccagcctgtccaacaaggtaaaaccctgtttctactaaaaatacaaaaattagctgggcgtggtgacagacccctgtaatcccagctacttgggaacgtgaggcaggagaatttcttgaacctgggtggcggaggttgcagtgagccgagatcacaccattgcactccagcctgggtracagagcgagactccatctcaagaaaaagagagagagaaaaaaagaaacatccctgcatagggattgtaccctttgcattcccatgtgcaatatgtgtgagtgctcttttccccacaaatcagccaacagagaaccttgttaaggtttttccattttgccagcctagtaagtatggaaagtatctcagttttactatgcatttttcttatgttaagcagatatacatttacttacttttccttaaaacagtatttaacaaatattactaatttgggtttttttctttgtttaaaagaatgcaagtgtgggagataaagttctctacggtctctatggcatagtggaacatagtggctcgatgagagaaggccactacactgcttatgtgaaagtgagaacaccctccaggaaattatcggaacataacactaaaaagaaaaatgtgcctggtatgccatcctaagtttattttattcttaaaaacaaacgaatatgtgcttccttttctgggagagctaagttattatttcatagatgcctctagtggatttgcttgcttgctttattttaacttaattgattgattgattgattgattgagacagagtctcagtcatccaagctggagtgcagtggcacgatcttggctcactgcaacctctgtctcctgggttcaagtgattcttatgcctcagcctcctgaatagctgagattacaggcacgtgctaccacacgtgactaattttttatatttttagtagagacggggtttcgccgtgttggccaggctggcctcaaactcctgacctcaagtgatttgcccgcctcggcctcccaaagtgctgggattacaggtgtgagccaccatgcccagcctcaactggattcaccttaagaattccctctaggagtgcctagaaaatctcaaatattatgaagactgtacccttctaggtcatatgagatgacatggtattttaaggtactgagtcattgtgtattatagtggagtagcattttatttaacaataccaaaagtttttgaagccatatcagattgtcagaagagttggagttgaaaatttgctggctttgtttatgggtcatccaactaactttgctttttttgtttgtttttgaaatgaggtctcactttgtcacccaggctggattgcagtggcaggatctcggctcactgcaacctctgccttccgggttcaagcgattctcctgcctcagcctcccaagtacctgggactccaggcrcctgccaccacacccggctaatgtctgttgttttttaaattagagacggggtttcaccatgttggctgggttggtctcaaactcctgacctcaagtgatccacccacctcagcctccccaagtgctgagattacaggcatgagccactgcgctgggccagacagcattattaattatacctataatattaatgctttgaaagaatttgttctaatgagtacacatggacacagggaggggaacatcacacactgggcctgtcgggggaggggggctaggggagggatagcattaggagaaatacgtaatgtagatgacaggttgatgggtgcagcaaaccaccatggcacatgtatacctatgtaacaaaccacattctacacagatattccagaacttaaaaatataatttaaaaaaaaaaaagttctttttggaaaatgcttaacccaagaaaaaacagacttctcaggtaaaatttggcattagatagagtttgtaatgaatatgttattgtttgtaatttagagtaagaacctaaagcatacttactttaaaattgtacttctttttgttttgctaggtttgaaagcggctgatagtgaatcagcaggccagtgggtccatgttagtgacacttacttacaggtggttccagaatcaagagcacttagtgcacaagcctaccttcttttctatgaaagagtattataactattaatggtaatgattatttaggtcatttgtttttgaatgccacagtgataactataatatataatgtgcctttstagtcttccctcttctgtaggaatagcatgttcctcaaatggtcctgaactttttcaccattttggtgaacccttttaaagtaaatttactcaatgctttaaaattcatagtcttaaaataaatgtgaattttgtttccaggtatttattctggggtacaaaaacttcccagaatttacagtaggaaaggaaacccctttatgatgtggcttattattacaagcattcagaaatgatgctggctaagtcaaatcattccttgagacagtgattcctaaatgtaatgccaccttcctgaactctcacatattctatatcatggttattttaaaaaatatatttttagccttttgtaaccttagtcttgttttgagcaaycatattccatgttttatgtgcttttatatttttataataaatattaaagtaaaactattaaaaattgtttatccacgtaccacttaacttaaaatcatctcagggccatctagtggtatatatgtgtactaccatttaggaaactgctataacacataatttcatgaagtaacacctaatacggtgtagttccctggtcatattttatacaattcaaccatataaaagggtgtcactgtaatttcagtagtgtgggtttacaaataatctgctggttagcttattaccttgaggttttgaaaaactagaattatattgaggcatttcataaacatatctcttgcaccctcttcatggtggagttaaggataacttgcaggtggttggccaaggcccaatatagatgattataacatttagaattggcaattagaagttgataatccatataggaccataggatagctttgaaatataaattaccaaattatatttgtaaatgatagagaattatattcttaacagaaaaatatatackttttctacttcttgtaaatactaaacacagttttgrggttttgaaatcactttgtcttcagcaagcatcattaataagttcaggtgaatttagcttttaatggggcattaagctggcatttttkattttctttttaaataatagcaaaaatatcatttttcccctctagaatacaaattattgagctgtcaaaacttggcatgaagaatatactattacttaggcttaaatatcaaaagataatggctacttcagtgtcatattgttgaaatagaaacaaaactgcatggttcaagcatcctaatcattagtgccaatgaatgatagtgcaggcaagtgccaggtaaatgcctagtcccacttcattctcctcctgggaagaaaggataagaatagtggctgcagataaggtatggaaatatttaatcaagactgtcttaaacacataagcatatataatgttatcaaggttaccagtgctgccttttgatatatggatgaacataactgtaattaaagacggtaatagtatacaaaatgcagagcttaaaaatgtcattgcataaattctatttttaagatgttgaaatgttagtagtgtttttcttgatttttaacagtgaaataatcaagaaatatatctttaagttaatctgcaaagtcaggctgtgttctgtaaaaggtatttcacagcattttctgtttaactgtaatctgttatcatggagatctcagtaccagagcagtgaattttttgaaaaatattgactgtctttattcaagtcagccatcttggtaagagcagttttcatccccccactgcccaaatgtaaatatagatcacctaatttttcttacagaaagatactgttaagaggcatgcacttttcatcggatggtcacttgtttcttgtttcaaagacaaatatttggatagatacccatacttgctatgagtcagtcacagtgctgacactattttaacatcatttaaaatggaaagatctacatagatttttgacattattccagaagtaacatgcaagtaagatatttttattgtcattttcttcatgttaaaggagctacttatgaaacctatttttttatggcctagagtttatgagtgctttttccttgtcttctgaaaatggaataaattggatttttgatacttaagaatttcctaaagatagcttttgtaacagagaaagcatgttaaattacacatgggtctaccttaaaatttttgttattatttccaaagcacatttgcagggatagtaaatgtatatagtagcaagtctactataataacagtagtttctggatcacctcaggaaacagtataaataaataataatgtttacttatcatcaacataactaccatagtgtttgaatgaattaaagtttcattagctttatttagaaactggtttaccccagcttcccgtttttttccaaatataaaatgataaaatattgattatgtgccaatattgtcatttaatgttcttaaaacttgtgaagrccacctttttaggtagctgagaagagtgatagttggtatcaatttgttagccaggcatggtggctcatgctgttgggaggctgagtggggaagatgcttgagcccaggaggtcaaggtgcagtgaaccatgatcacaccactgcattcctgcagagtgacggagtgagaccctgtctcaaaaataaataaaaagaagacagttggtatcaattcaaagaatagttgwtgcctgttctcttattttaaatgtaccaacagagctattttactgtatttaatagttcttagcttccatgtgtgatgattttaatcagtgattttatgcaatagctgaagaaaattttctgaagattaagctgtgaaatgtatcaaccctcatctaatttttgtagtacaaaatgacatcctgattccttttaaaaattcacgtttgtaatttatttttctgcatgtattgatcaaataagcctaaaccaaatatgtgcaataaaaytgagcctttagatagtatctagtgcattgttaaaaaagattatttctagatatttatgatgtttttgtttacgtagaaatcatgaattcaaatctgtttaaaagatgaccatattttcaattttgagtaatacatattattcctactgttttttttcttttgccatgtttctagaaaacagctgtgtaacttaytgagcgttattttggtgttactgtataaaacatgcataataaatattcttatttatctcatgttacaagattggtcctggaattttcacagtttacgttattgacagaatgttttatcaacaatgcatttgcttatgtcttagtccactcaggctgctataataaaataccatcaactatgtggtgtattaacaaaaatttatttctcacagttctgggagctgggaacttcaagatcaaggtgccagcagacttggggtctggtgagggcccacttctgttcataaagacagtgctttcttgctgtgtcctcacatgggaaaagtacaaggcatctctgtgggtccttttccatgcagcccattcatgagggttccatcctcatgacctaatcacttctcaaaggccctatctccaaataccatcacatttgggatttgtgaatgttgtaggggacgtaaaccttcagttcatagcagctttctcagctatattcaaaataccctacatattttagaaattctctatttcaaaacagtttatgggccactttacctcagatttcagtatctaccaaggacgatcatcttcctttcaggggtttcttaaaaggtgtattacttagacaggataattattaagacaagggtaaggtcttgcaccagcaattaagaaatactttgcctacccatttgtgtctaaacttcttccagatcatgaagctctttgagattatgatgaaagttagagactatcttttatttgtttagtcatttagtaagtattttttaggccaggcacagtggctcatgcctgtaatcccagcactttgggtggccaaagtgggcaaatcacctgagaccaggagttcgagaccagcctggccaacatgacaaaaacccatctctactaaaaatacaaaaattagctgggcatggtggcacaggcctgtaatccctgctacttgggaggctgaggcaggagaatcgcttgaacccgggaggcagaggttgcactgagccaagatagtaccactgcactccagcctgggtgacagagactgtctcaaaaaaaaaaaagtatttgttgaatacctgttgtgtggtaggtactagggatacagcagtcaacataagagccagaaatctaaaaggtgaggaaatacacattctaagaatgtaaggaaaatttatgtcaatggtaatgatatggagaaaaatcaagcaatatggactccctatgaagtcatgcagaaattaaggtacaggggatgaagatatcctagagataaaaggcatggtgatattagtactgatattcctgaaagagaaagctgagtgttgtaggaaggatggggttttaattctggggccctctcttctggcaatatagagacggagaagggaagtcttaacatctgtatgttcccagaaaaatgtatctccctaattcttgtatgtaattttgaaggttcatggacacttctgaagccatttcatacgtattttaaattgcacccaagaagaaatatctgagatgtttgcattcccatatgtattaggataggctgagttgtgctgcagtacaaccccaaatcccaactcttaagggaccggggccaaaagtcccatcaaggtaaagttttatcctccaagaccaggctctctggaagtgctatatcagatttggatgtttgctcctactgttctggagacccaggaaccaaaaggatatcttctgttttccacatacttaatgtagagtggtggaactgtatctgcaacaaacattctgaatggggaagaagaatgggagatacagttaggatccctaagtctaggtatggggtatattcatgattagggttcttttctatctcctaggaagaattcccttgtatattgttctccgtgactctagagtccaacctctgggaaagttttggtggttttttttttttttttttttttttaatcttcatggctacatctgaacagctactgagggatatatatgccaactttgggagttgcacagcttttttgagaccatttcttagatgactagggactgtaatttctcttaatttggaatagccacaagttgttgtagccaaggtttgtgtgtgtttttaatacaattcttaaaattttagtaggcttctcatctgtagatagatttgaaggggtgggttgcccctccacacctgtgggtgtttctcgtaaggtgggacgagagacttaggaaagaaaaagacacagagacaaagaaataaggggacccggggaaccagcattcagcatatggaggatcccgccagcctctgagttcccttagtatttattcatcattcgtgggtgtttctccgagagggggatgtgtcagggtcacaagacaattgtggggagagggtcagcagacaaacacgtgaacaaaggtctttgcatcatagacaaggtaaaggattaagtgctgtgcttttagatatgcatacacgtaaacatctcaatgctttacaaagcagtattgctgcccacatgtcccacctccagccctaaggcggtttttccctatctcagtagatagaacgtacaatcgggttttatactgagacattccattgcccagggacgggcaggagacagatgccttcctcttgtctcaactgcaagaggcatgccttcctcttatactaatcttcctcagcacagaccctttacgggtgtcgggctgggggacggtcaggtctttcccctcccacgaggccatatttcagactatcacatggggagaaaccttggacaatacctggctttcctaggcagaggtccctgcggccttccgcagtttttgtgtccctgggtacttgagattagggagtggtgatgactcctaaggagcgtgctgccttcaagcatctgtttaacaaagcacatcttgcaccgcccttaatccatttaactctgagttgacacagcacatgtttcagagagcacggggttgggggtaaggttatggattaacagaatctcaaggcagaagaatttttcttagtacagaacaaaatggagtctcccatgtctacttctttctacacagacacagtgacaatctgatctctcttgcttttccccacaagtttgaatcacaaaagattttaggtaagaacaggcagtcattgaacataagtttaccttactttctccaacctggcctaaatggacaatacctgcataaagcccaatgggatctattgttaaataactaaagtattattttataccctcgtatttcattatgccagattcactactatctaggaaatgcttaagtaactatattaagaatcaaagagtaggctgggtgcggtggctcacacctgtaatcccagcactttgagaggctgaagtgggcagatcatgaggtcaagagatcgagaccatcctggccaacatggtgaaactctttctctactaaaaatacaaaaattagcggggcgtggtggcatgcgcctatagtcccagctacttgggaggctgaggcaggagaatcgcttgaacccaggaggcagaggttgcagtgagccaagatcacgccactgcactccagcctggcaacagagtgagactccatctcaaaaaaaaaaaaaaaaaaagttgtaatttgtaatgatgtgcctgtagcatactagctttaaatatttttcatcctccattgtattatgtggtaaaatatatacaacataaaatttaccactttaaccatttttaggtgtataattagggtcattaagtgcattcacatttccagaattctttcatcatcccaaacggaaactctgtacccattaaacagtaacttctcattcccgccttctcccaactcctgggaacctctattctactctccatctgtgtgaatttgcccattctaggcgcttcatataagtgaaattgtacaatatatgtccttttgtgtctggtttatttcatcttgcatgttttcaaggtttatccatattgtagcatgtatcagaatttcattcccttttaaggctgaataatattcaattgtatatatataccacagctttaaatttttattaggttttaagatggatgtgatatggcacctaataacactataaaggttcaaatctcaagaaacagcaatagttcctatttcgatatattttccacatatcatcttacttagcttatttccattttgctttaaggataatttgtttctgtaataatggaaggtgacatgtcctcccctagaattttctacttcactccattcattcattcattcattcattcattcattgagacagagtctcgctgtgtagcacaggctggaatgcagtggcacgatctcggctcactacaacttccacctcccgggttcaagtgattctcatgcatcagcctcctgagtagctgggccaccacacccagctaatttttgtatttttttgtaggcagtttccccatggtggccaggctagtctcagactcctggcctcaggtgatccaccctccttggcctcccaaagtattggcattacaggcgtgagccacattggccaaattttctactttaaacactgaaaacagaggaagttaataaaaattttaacctataaagtcccctggttgttagtcattaacagcagattgtcagataagactggtaaaatgatggctgctaagcatttgatgatccaggcgcaggatgatcaaactgcagcagatcatgcacgtgacagctgcttacatagaaatttaacaccacaacacacattcttagaaaattctgtgttgaaatacatacacttacctgatgtgtccataagatcataatgttacggggaactcttagaacagagtggttagagaaagggaactggaattggaactgtaaaattcattttctggtctggtaaatagcaattgctgagggtgtctcattaaactggcacaaggaacaaaatgtgaggtatttaataatcctctccacttcacaatgcatttccaaaatgactggcctacattaggatcattgttgaacatattaatgcaaacatatagcagatgtaaaaatttctgtgtgcaaagcagatgctggccacttggagggcagaggtgagggggaaatcccttacccgaaaattgcctcacctttactagggaaacaagcaaagaattacaatatgattatagagagtaggaacatgacagtttcactaggccaatcaggtttctctaagaagatagaacattcctctgatgagaatgtttctcagagaattaaacttgaaaatcagacctgatgcaaaaaacttggaaaatgcacaaaatcacagagcaaaattagagattactgataacatgtggtatatgtccttctagtttttgctccatacagtggtttttatttattttattcttttgagacagagactcactctgttgcccaggctggagtgcagtggagggatctcggctcactgcgacctctgaccctgagttcaagcaattctcctgcctcagcccccctagtagctaggattacaggcgcctgccaccacgcccaggtaatttttgtatttttagtagagacggggtttcaccatgttggccaggctggtcttgaactcctgacctcaagtgatctgcccgcctcggcctcccaaagtgctgggattacaggcgggagccaccaagcccggcccatacagtgattttttaaaatcagactgtccagtagtcttatttgtgctaagtggaaattagggaaagggtcagagaaatagggatttccttttgccttcagtagtatcctcatgaacctgcgtcatggtgttgttaggtgtaattaatgaaggtttctcacaagataaaatgttattttgaggaccacgtccgtggattggaggaaaggcagatggttagctagtgacgactttattataatgctaattcaggagtatctgggtctctagtgctgaggaaaactgaattttcatgcaaagggcatctatattttcacatctgta

SEQ ID NO: 94846 - DNA, 46181 bp, Homo sapiens
  misc_feature (1)...(46181): n = A,T,C or G
atcccttgaacccgaggggtggaggttgcagtgagctgagattgcaaactccagcctgggggacagagcgagatgccgtctttaaaaaaaaaaaaaaaaaagtagcagaaaaactgggaggttgagggtgttccattggtagccccagagctggggttccagctaggagaggtcaccccggccctgctgcccctgccagcgtcccctcctctttctctctccccgtcttcctgcctgggaaagcagcagacattctcagggctgtggagggatgggggaggcccagagcccagggacgtccaggcagctgtgttcagtgggcatcagccctgaggactccggtgcgggggtctctgcattggggtttctctcttgtgccttcagaaacccgatgaaggcaatgtatccaggcacattctacttccaatttaaaaacctatgggaagccaacgatcggaacgaaacttggctgtgcttcaccgtggaaggtataaagcgccgctcagttgtctcctggaagacgggcgtcttccgaaaccaggtagcaccaaagtcctagttacaccctaaataggagctaagcagctgggaatgcagaaaacgcaacaataagtgatgtgcccggcgtgggctctcctgtgtgcactttcctgccacatttctatttttttttttttttttttgagatggagtctcgctctgtcacccaggctggaatgcagtggtctgatttcagctcacggcaacctctgctttccaggttcacgcgattctcctgcctcagtctcccgagtagctgggattacaggcacctgccaccatgcccagccaattcttttgtatttttagtagaaacaggattttgccatgttggccaggctggtttcgaactcctgacctcaagtgatccaccagccttggcctcccaaagtgctaggattacatgcgtgagacaccatgcccctggcctcctccccacattatttatttatttatttatttattttgagacggagtcttgctctatcgcccaggctggagtgcagtggcacaatctcagctcactgcaagctccgcctcccgggttcacgccattctcctgcctcagcctcccaagtagctgggactacaggcgcccaccaccatgcccagctaattttttctttttttctttttttttttttttttagtagagacggggtttcatggtgttagccaagatggtctcgatctcctgacctcatgatccgcccgccttggcctcccaaagtgctgggattacaggcatgagccactgtgcccggcctccccacattttttaagtccatggcccagatcttcctccctgactctcctgtgatcagatcgtggagggggtttgcttcctcccaaaaggccttgtttagcgcccagcaccctcactcttgactttgtttcccaaaatcttgttatggagctgtgcgtccggcagtcctcgggaatcagcagctgtgggaagcggggggtgttgtgtccagcgctgtgtctgggccagtgactgcgggctggtggggccgcccccgccactgccctgattcctcagcagaaggcaggcagggaacaaagctgaccccagagagccaggccatagcaggggctgaggatgcctggtgaatggatgcctgggagaaaagatggcagaattcacacatgagtctatgagacagggaaagaatcaataaaataaagaaggaaggggccgggcacggcgcggtggctcatgcctgtaatcccagcactttgggaggctgaggcaggcggatcatgaggttgggagttcgagaccagcctggctaacatgatgaaacccagtctctactaaaaatacaaagattagccaggtgtgggggtgcatgcctgtagtcccagctactcaggaggctgaggcaggagaattgcttgaacctgggaggcagaggttgcagtgagccgagattgtgccactgcactccagctttggcgacagagcaagactccatctttgaaaaaaataaaaataaaagaataaagagagaaggagaaggatagaagaagggaaactcaatgaataaaacaccctggggcctactatgtagccagaaaaatgaaaagtaaagaaataaaataaggccgtgcatgtggtttatgctcatagtcccagagctttgggagggtgaggcaggaggatcgcttgagcccaagagttcaagatcagcctgggcaacatggtgaaaccccgtctctaaaaaaattatttaaaaaattaggcaggtgtggcggcatgcacctgcatcccagcttatcaggaggctgaggtgggaagattccttgaacctgggaggtcaaggctgcagtcagcccagatcccaccactgcaccccctaacctgtgcaccagagagagaccctgtctcaaaaatgagtaaataaggaaatggcccggggctccaggcccgccctctgctcccatcgccccacccctgcactcctcctgctcctggtctgagctcccctgtcctcctcctcctccttcgccaggtggattctgagacccattgtcatgcagaaaggtgcttcctctcttggttctgcgacgacatactgtctcctaacacaaagtaccaggtcacctggtacacatcttggagcccttgcccagactgtgcaggggaggtggccgagttcctggccaggcacagcaacgtgaatctcaccatcttcaccgcccgcctctactacttccagtatccatgttaccaggaggggctccgcagcctgagtcaggaaggggtcgctgtggagatcatggactatgaaggtgagacgtggggggctgaggagagtgggtgcaggagggacagcatgaggggcagatggttctccaatgctgtggggcgggtcagtgtcccctgggtgtctgtggggaccgggccagcgcccactgcaactggcagcctggatacctgggctgggaggggagggcccagggccaggagagaggcctgctgggccctcactgttttctccttgttttttctcagattttaaatattgttgggaaaactttgtgtacaatgataatgagccattcaagccttggaagggattaaaaaccaactttcgacttctgaaaagaaggctacgggagagtctccagtgaggggtctccctgggcctcatggtctgtctcctctagcctcctgctcatgctgcacgggcctcccctccaccctggacccgctctgtttctgcctggtcatcctgagcccctcctggcctcagggccattccacagtgctcccctgcctcaccgcttcctcctcgctcttccagactcttcctgcagaggctcctttctgcctccatggctatccatccacccccacagaccccgttcctccagcctgcgtgcccctaacctggcttttcccatctccccagcataaccaaatcttactaaactcatcctaggctgggcatggtgactcacgcctgtaatcccccagcaatttgggaggcaaaggtgggagaatcgcgtgagcccaggagttccagaccaggctgggtcacatgacaaagccccatctctacaaaaaaaaaaaaaaaaaaaaaaaaaagccagatgtggtggcatgcatctgtagtccaagctacttgggaggctgaagtgggaggattacttgagcccgagaggtggaggctggagtgaacagagatcgcgccactgaactcgggtctgggcaacagatagagaccctgcctgaaaataaatcgataaataaactcaacctaaacaggtgtgaatatatgtaagttgaaaacccgaagttttgagaaacatcctttgtaaatttcatcctatgaattgggtcattcatgtcctacccagctaaaacagaggccaggagccagggaggaaaagcagtcaggccacacaacattgtttccgaaatggacttctctgcaagcctgactcctgagactgtgcattgtaccctgaaaccagctttatccatagcttctgcgataaatggctgtaagtcttggactccttgctccaaacgcagcgactcagcaatagaacctcccagctcccagcccttcctagtgcccatgggctttacatagggcaagagaacatttctccttctataattgccatctctttgctctctcaacatggtgaacaccatccggactccgtgtatgtctcaaattacaattctttctttgcaaatgaaatatgaaatttagaggctcttctaaacactttaaatttgatttgacattttcaaagcagatgtaagttttagagaatgagattctccataaaaatgaccctttcatgctgtggcctccatagaagatgtcccaggccaggtgcccacatggcaggcatttattttctcacagatctggaagctgcaggtccaacttcgaggggtgggtggggttgtttcctctgaggccgctccttctggctggcagggagtctcttccagccgtgtcctctgtggcctttcctctatgcacacgcacctctgggatctctctgcctccaaatatcatcttttttttttttttttttttttttgagacagagtgttgctcctcttgtccaggctggaatgcaatggcacaatctggactcactgcaacctccgcctcccgagtttaagcgattcttctgcttcagcctcccgagtaaaaggcatgcatcaccacacctggttaattttgtagttttagtagagatggggtctcaccatgttggccagactggtctcgaactcctgacctcaggtgatccgcctgtctcagcctctccaagtgctgggattacaggcatcagccactatgcccggctgggatcatatgttccacacatgtttgttcaataagcatggactgcaaccacctacatgaatattcatagctcctcctgtagcctgttgaatatgtatgtttagccaacctcttcagcataaagctcctgcccaaacccctcctgctcctaaatgtctgtctctggtgttaaccagaggctgctcttcccaggctgctggatggctaccttgcaggctgtcacccttaacaagaaataaagtgtcctttgcaaatgcatcccttgtgtaatttgtaggtcaccgcgccatgggaacacgctaccatgggaagggagctgtgagacgcgcagggaggctccagacaggctggcctgggacaccagccgctgcccttccataacatggggacaagagagggcaaaagttcagcccaacacggaggatcttcgggcaggagatggggaagaaggagaagcaggaaggaaagagctcagtgtgggggcgcgcatggcatcccggtgggacatctgaggcccacacccacctgctgtccctccctcccacggtggccaccgagggtgaaggcctggggggaggcagacgcctggccctttactctccctccctgtccccatggccgctgggtgggggccgtctctgggatgatccccgagggcaggatccgggagtccctgcagaggcatcagcctgtctgtcttgatggtggagtggcggctccagctgggcgggaccaccaggggaggggcttgtgctctgctggctcagcctggtgtggacccacctcccgggcgctggctgcaatgactttctctttccctttgcaattgccttgggtcctgccgcacagagcggcctgtctttatcagaggtccctctgccagggggagggccccagagaaaaccagaaagagggtgagagactgaggaagataaagcgtcccagggcctcctacaccagcgcctgagcaggaagggggaggggccatgactacgaggccctgggaggtcacttttttttttttttttttttgagaggaagcctcgctctctcacccaggctggagtgcagtggcaggaacttggctcactgcaacctccgcttcccaggttcaagtgattctcctgcctcagcctccagagtagctgggattacaggcgcacgtcaccacacctggctaatttttgtatttttagtagagacggggtttctccatgttggtcaggctggtctcgaactcctgacctcgtgatccgcccgcctcggcctcccaaagtgctgggattacaggcgtgagccaccgtgcccggccgggaggtcactttaaggagggctgtccaactgcaaggagccgcaagcaggaagtgaaaccacagcacttcaaaaaaagagggagactgggacaagcgtatctaagaggctgaacatgaatccacagatcaggtaccgctgcccactatgtccgcagggcccctccggccccttccttctggtggtcctgctgggcctcagccctggcctccccctgccccagccccagccctggacttccttccctctggcttccctgccgcccccactcccagccagactccttgccctgctgtgtggtcgccccactgctgcttctgaatgggccaccttccccacctgccacagtccaggccccctcctgagactcttccctgaaagtcatggccaggccggtgctccctgccctgagagggtgctccctctgtgtgcttcccaccattcctgagctcaggaactgggagaattgaaccaaaggatgactggggcaatcaggcattttgttctcagtgctttgatgaactttctgtaagatttactttgtttaaatacaaagtcttaggagagggtgtggggagggaatggtctctgaagcacaagataaatcacatcgtccaaggatgactccacagtcagcagatgtccccagacaggttccactccaaggtcactcttcatcttttagaacatgaccagtaacatggaatgtgagaaagaacgcgatgatcaggagaaatgctcttattttaaatttagtgaaaagagagcccagtccccaacagctttctcctgcagggcccgtgatgcagaggctgcacagggctggcctggaaaggggcccctgctccaactgtccccagctctgtggcctgggcaggttaccccacctctctgtgcctctgacccctcctctgtaagatgggaatggtccctgcaggcctagggcagcctcacatgagcccacccccacgcagcacttagaagagaggcctgggcctcagaattcggttctaccatgattttaaaataatgttaacacgcagagtgaaacatcaggaaggaattgagctgaaaggttaaaagctatcttttaagggtgaagagttttattctcttttgcattttcctaatgggttggggagtgggtgggcagaaatactgagagggtggggaatatacccctggaaaggccagagttgggccygagctgggagagatcaccccagcccccctgccagcatcccctcctcttcctctcccctcagtcttcctgcctgggaaggcagcagaaattctcagggctgtggaggggtgggggaggcccagrgccgtcccgggagctgtgttcagtggacatgagscccgaggactccaggagggctccctgcatgggccggtttctctcttgtgccttcagaaatccgatggagcggatgtatcgagacacattctacgacaactttgaaaacgaacccatcctctatggtcggagctacacttggctgtgctatgaagtgaaaataaagaggggccgctcaaatctcctttgggacacaggggtctttcgaggcccggtactacccaaacgtcagtcgaatcacaggcaggaggtaagcagctgggaatgcagaaaacacataagtaaaatgtctggcggcgggctctcaactgtgtattttttccccacatttatttattttttctatttatttatttatttatttattttgagacagagtctccatctgtcgcccaggctggagtgcagtggtgcgatctcagatcactgcaacctccacctcttgggttcaagcgattctcctgcctcagcatcctgagtagctgggactacaggtgcgtgctaccacgcccggctaatttttgtattttcagtagagatggggtttcactgtgttgagcaggctggtctggaactcctgatctcaggtgattcacctgccttggcctctgaaagttctgggattacaggcataagccaccgtgcctggccacttcctatatttcttttttcttttctttctttctttttttttttttttgagacagagttttrctcttgttgcccaggctagagtgcaatggctcaatcttggctcattcaacttccgcctccygggttcaagcgattatcctgcctcagccacctgaatagcagggattacaggtgcacgccaccgygcccagctaatttttttgtatttttaatagagaagggatttcaccatgttgtccaggctggtcttgacctcctgacctcaggtgatccacccaactcggcctctgaaagtgctgggaatacaggtgtgagccactgcgcctggcctccacttcccacatttcttaagtccgtggcccagaccttcctgcttgaccgccccggccaccgcccggattcctccttggcaaagatgcctcatcacagtttggtgaaccctcactcctcaccctgccacccccactggggacactaagttccccgccttgtcccacccatccctacggccccctccacccagggaggagacttttcagagtgtgtttggggagggagtcgtctgtatgctgggcagtcctggcctacagcggtgctggccacggaaacacccaggactcaggaatgaagcacaagtgtttccagtccccacacgctaaaaaggcgacargaaccggtgaaagtaattttaatattctatttaatccagtgtagctaacatattacttcaacgctgattaacataaaattcttcgcgagatagtgaagtttctttttcttctcacactgaaatgagtggtgtatttttgatgtgccgaggtctctcatcagagccctgtttcagatgctcagtagcgcccttggccagtgccccccaatatgggacagcgcaggtccagtggcctccccagtggggaacaaggcggaccccagagggccaggacacagtaggggctgaggatgcctggtgaatggatgcctgggagaatggatgccagaattcacacacgaggccatgaacagggctgggaaaacttccaaacacagggaagcacgtgtcttggtgcaccttgtgatgcttcaacagcaggactgagacggggacatttacagtgaacagaaatgtgttggctcgagttctggactccaggaagtccaacgtcaaggcaccagcaacyttccagggccygcgagctgcacagtcacatgggggtgaaggttgttgccagaagctcaggggatgctccagacagagtggcctgggatgtcgagtcactggtgctccgtgacatggggacaagaggaagcagtttagtctgacatactgcccccccagctagagggcaagagacagaaagaggggctgaggtcacctttgaataaccacagcagtggcacccacaaaggtgcagtccccacagcctcatagcctcttctaggtgccacctcttaaggccagtaccatagcaattaacactgaaggtcagcttggagcagacaatcactcaaaccaaacaggggggatggaggaaaggagcttcaatggcaagatcccctgggctcctgtcctggcccctcctccccctgccccaccccgcacccctcctgttcccccgtcccagagcttcccctgcccctgctcctctcccaggtgtatttccggtttgagaaccacgcagaaatgtgcttcttatcttggttctgtggcaaccgactgcctgctaacaggcgcttccagatcacctggtttgtatcatggaacccctgcctgccctgtgtggtgaaggtgaccaaattcttggctgagcaccccaatgtcaccctgaccatctctgccgcccgcctctactactaccgggatagagattggcggtgggtgctcctcaggctgcataaggcaggggcccgtgtgaagatcatggactatgaaggtgagaggtgcaggggtcaggggagcatgacggggaggaacagcctcagagatggatggatctgcaatgccatggctgggggtgttccagggcagcctgcaggggtggggctggcactgattgcaactgacagccaggagaccaggcctgggagggcaggcccagggtcaggggagagcctgagtgcttcccacctcttcatctcagactttgcatactgctgggaaaactttgtgtgcaatgaaggtcagccattcatgccttggtacaaattcgatgacaattatgcatccctgcaccgcacgctaaaggagattctcaggtgagggtctccctctggcctcatcgtctctctcctctcgcctcctgctcatcctcctgaggmctcccctggctgggccctcctgccctccgtcctgcccccctgcctgccctcatggttacaccccctcacccacactcctcatgctccctccaccttggtgcctcccccctgctttcctgggctcttcctgtgagtgagaggccccttctgcctccagagcgacctccatccacccccgaggctgccctccccacagcctgggagccccaacctggctccttcyatctccctggcataaccgaatttgtcataaaactggacgtagtaagtgggcatgaatagtcacaagcccgacagtcggaagctttgagcaacatccttcaaggccgacctgagcccctgagaaggagccgccaccatggaaacagagcttcaggcttccgcggccatagaagatgcccccgggccgggtgcccacagggcaggcatttattttctcacagatctggaggctgcaagtccaaggtggaggggtgggtgrggttgtgtcctctgtggccgctcctcctggctggcagggggtcccttccagmcctgtcctctctggcctttcctctgtgcacctgcactcctggggtctctctgcctctaaatgtcctccttgtttatggaccccagtcagacaggattagggcccaccctaagggccatgagttaatttaatcaccactttagtgtacttgtctccaaatacagttatcctgtgaggaggtggggttgagggcttcgacatgtcaatgtagggaagatacaatttagcccatgacaatgacccagggggcttgggtcaagcttgggtggggtgtgcaggggtccccgttctgtgtgtctgtctcccaggcgagtcctgccctgactcccacagcccctccctccagaccatggcttccccacctaacagcacctagctgggcctccggctcacgcctgtcccttctcaaatccctcccacagggatggagatgcagaaagagtcaagcaaacactcagtgatcaaggtcccatttgagtaaggtttttttktttktttktttttgagacagcgtctccctctgttgcccaggctggagtgctgtggtgcgatctcggctcactgcaacctctgcctcccggttctagcaattcccttgtctcagcctcccaagtacctgggattacaggctcatgccaccatgccggctaatttttgtatttttagtagagacggggttttgcaatgttggccaggtgttgagtaagattttacaaaagagtaggcttggatcatgggaggcttgagatgctaggagctctccaggaagcacaacagaaaagggcaaccagggaccagagaggccctagaaagagatctaaggccctcgggagagatgggaactgagcacctgggtcttagaccggaggagcaaactgcaagacagggtggccggggacaccagcctccgcccttctgtgacatagggacaagagctcagcctgccagggaacaactctgggcaggagatgtggaaggaaggagctcagtgtgggggcacgcatggcatcctggggggacatctgagggcmcccccacccactattcctccctccaatggtggcctctgagtgtgaaggcaagggggaagcagacacctgcccctcactctccctccctaccacatagctaccgggtggggggcgtccctgggatgattcctgagggcaggatccaggggtccctccggaggtcctcccatccaggtgagaaagcagcataaagtgaggcctgcactcagatgggcctgggaggtcactcacagcgcaggtgtctcctggaacaagggccctggacgatagaaatagaacccaagcccaggactaaaatcagggccaggacaagcctgccagggaggctacacatgaagcctcagatcagggaccactgcccgttctgcccatggggcctctgctgccccttcctgcctggtggccctgctgggcctcagccctggcctccccctgccccagccctgggctccctcccctctggttcctctgctgctcccactaccagccaggctctttgccctgctatgtggtcgccccactgctgcttctgaatgggccatctcccccacctgccccagcccatgccccctgctgagattctcccctgagagtcatgcccgggctggtgctccccgccttgggagggtgctccctctgtgtgcttcccgccattcctgagctcaggaactgggagaattgaaccaaaggatgattggagcaatcaggcattttattctcagcactttggtggaatttctgtaagatttactttgtttcaatacaaagtcttaagagagggtgtgggggaggaaatggtctctgtaccagaaaataagtcatttcttccaaagacgcctccgctgtgagcagaggaggatgcacacgaccccagacacaggctcctcctccgtgagcaccattcaccttttagaatgacacctgcaacatggagtgtaggaaaaaatatgatcaggagaaatgctcttattttaaagtttagtaagaagacagcgtggttgcctacagctccccaccgcagggcctgcgatgcagaggctggacagggctggcctcgaaaggggccccagctccatccaccgccccagctctgtggtgtgggcagattatctggcctccctatgcctctggcacctcctctgtaaaatagggatggcccctgcaggcctcaggcacatgccatgagctcagacatatgcagcacttaggagagtagcctggaccggccgggctcagtggctcatgcctgtcattccagcactttgggtggttgaagcaggcagatcacgaagtcagttcaaaagcagcctggccaacatggtgaaacatgatctctactaaaaatacaaaaattagggccaggcgcggtggctcacaccggtaatcccagcactttggtaggccgaggtgggtggatcacaaggtcaggagttcaagaccaccctggctaacgtggtgaaaccccgtctctactaaaaatacaaaaaattagacgggcgtggtggcatgcacctgtagtcccagctacttgggaggctgaggcaggagatttgcttgaaaccaggaggcggaagttatagtgagccgagattgcaccactgcactccagcctggtgacagagtgagaccgtgtgcaaaaataaataaattcgctgtgatcccgatataaaaataatcatcatcatcatcggacaggtgaaatgtgaggaaggaattgagctgaaatgttcaagcaattatttcagggtgaagagttttattctctgttgcattttcctaatgggttgggagatgtgtggcagaaaaactgggaggttgagggtgtcccattggtaggcccagagctggggttccagctaggagaggtcaccctgtccctgctgcccctgccagtaccccctcctctttctctctcccagtcttcctgcctgggaaagcagcagacattcccagggctgtggagggatgggagaggcccagactccagggacgtccagggagttgtgttcagtgggcatcagctccgaggaatctctgcactggggtttctctcttgtgccctcagaaacccgatggaggcaatgtacccacacatattctacttccactttaaaaacctactgaaagcctgtggtcggaacgaaagctggctgtgcttcaccatggaagttacaaagcaccactcagctgtcttccggaagargggcgtcttccgaaaccaggtagcaccaaagtcctatttacaccctaaataggagctaagcagctgggaacgcagaaaacacaatacgtgacgtgccccgcgtgggctctgctatgtgtactttcctcttacatttctttcttttttttttttttaagacagagtctccctcatgcaacctctgcctcccgggttcaagcgattctcctgcctcagcctcatgggtagctgggattacaggtgcccgccaccacactcagctaatttttattttatttatttatttttttagtagagacggggtttcaccgtggtggccaggctggtttcaaactcctgacctcaagcgatccgccccgcttggcctcccaacgttctaggattacaggcatgagccaccacgcccaacttcctcccacattttttaagtcsgtggcccagatcttcctccctaactttcctgggatcagattgtcgaggggttttgcctcttaccaaaaggccttgtttagcgcccagcgccctcactcttgactttgtttcccaaaatcttgtcatggagctgtgcgtccggcagtcctcgggaaacagcagctgtgggaagcggtgggtctggtgtccagcactgtgcctgggccagtcactgtgggctggtggggccgcccccgccactgccctgattcctcgatgtcaaggacacatcctcacagggtggtgaaccctcgctcctcaccctgccgcccccacagcagccactgacctcccacccaccctgycgtgtcccacccaaccctgcggccccctcctcccaggcaggagatttttttcagagtgtgtttggggagggagccgtctgtgtgctgggcaggcctggcctacagcagtgctggcctcggaaacacccaggactcaggatggaagcgcaagtgtttccagtccccacacgctaaaaaggcgataagaactcgtggaagaaattttagtgtctgcattagctcaattatctcacataggatttcaacatatacttaatataaaatgcctcatgagagagttaaagtttgtctattctcacaatgagattttgaaatgcgctgtgtattttacacgtgccaacgtttctaatcagagccccatttcaagtgctcagtagcccctttggccarccttcaactccatgggacaatgtgggtccaatgaccttcccagcagaaggcagacrggggacaaggcagaccccatrggaccaggccacagcaggggctgaggatgcctggttaatggatgcctgggggaaaggatgccagaattcgcacttgagggcatgatgagacaggaaaagactcaataaaataaagaaggaaggggccaagcgcggtggctcacgcctgtacgcagtagctcacgcctgcaatcccaacacatcgtgaggcctaggcgggcggatcataaggtcaggagttcaagaacagcctagctaacatggtgaaaccctgtctctactaaaactacaaaaattagccaggcgtaggagtgcgcgactgtaatcctagctactccggaggctgaggcaagagaatcgcttgaacccaaggggcagaagttgtggtgagctgagatcgtgccgttgcactcccgcctgtgcwacagagcaagactccatctcagaaaaaaataataaaaaaataaagaggaaggagaaggatggaataagggaaactcaatgaataaaacgccctggggcctactatgcacccagaaaaatgaaaagtaaagaaataaaataaggtcgtgcatgtggtttatgctcatagtcctagaaatttggtaggctgaggcaggaggatggcttgagcccaagatttcgagatcagcctgggcaatgtggcacgactccgtctccacaaaaattacaaaaaaattagccgggcgtggcagcacacacctgcagtcccagctaatcaggaggctgaggtgggaagattccttgagcctgggaggtcaaggctgcagtcagcccagatcgcaccactgcaccccagcttgggcaacaggagagaccctgtctcaaaaataaataaataagaaaatgccctggggcttcaggcctgccctcttctcccatcgccccacccmtacactcctcctgctcctggtctgagctccccctgccctcctcctcctccttccccaggtggatcctgagacccattgtcatgcagaaaggtgcttcctctcttggttctgtgacgacatactgtctcctaacacaaactacgaggtcacctggtacacatcttggagcccttgcccagagtgtgcaggggaggtggccgagttcctggccaggcacagcaacgtgaatctcaccatcttcaccgcccgcctctrctacttctgggatacagattaccaggaggggctctgcagcctgagtcaggaaggggcctccgtgaagatcatgggctacaaaggtgagacgtggggggctgaggagagtgggtgcgggagggacagcatgaggggcaggtgggtctgcaatgccgtggggcggggcagtgtccccgggaagcctgcagggatggggccggcgccagctgcaactggcagccaggagacctggcttgggaggggagggcccagggccgggagagaggcttgctgggccctcactgctttctccttgtttttttctcagattttgtatcttgttggaaaaactttgtgtacagtgatgatgagccattcaagccttggaagggactacaaaccaactttcgacttctgaaaagaaggctacgggagattctccagtgaggggtctccctgggcctcatggtctgtctcttctagcctcctgctcatgctgcacgggcctcccctccatcctgsaccagctgtgcttttgcctggtcatcctgagcccctcctggcctcagggccattccatagtgcccccctgcctcaccacctcctccccgctctcccaggctcttcttgtagaggctctccatccacctccccagtcctgttcccccagcctgggtgcccctaacttgactcttcccatctccccagcataaccaaatcttttttttttttttttttttttgagacggagtttcactctgtcgcccagactagagtgcaatggctggatctcagctcactgcaaactctgcttactgggttcaagtgattctcctgtctcagcttctgagtagctgggattacagatgcctgccaccacgcccagctaattttttttttttttttttttttttttgtatttttagtagtgactgggtttcaccatgttggccaggctggtcttgaactcctgacctcaggtgatctgcccatctctgtctcccaaagtgctgggattacgggcgtgagccacccggctcggcygcacaaccaaatcttattaaactcaatctagtctggccctggtgactcacgcctttcggaggcagaggtgggagaatcgcttgagcccagaagtttgagaccagcctgggccacacgacaaagccccatttctacaaaaaaaaatacaaaaaaaaagccagatgtggtggcatgcacctgtagtttaagctacttgggaggatgaagtgggaggactgcttgagccggggaggtggaggctggagtaaactgagatcgcgccacagaactccagtttgagcaacagatcragaccctgcctgaaaataaatcaataaatacactcaacctaaatggatatgaatatatgtaagttgaaaaccagttttgagaaacatcctttgtaagtttcatcctacgaattgggtcattcatgtcctacgcagctaaaacagaggccagcagccagggaggaaaagcagtcaggccacacaccattgctcccaaaatggacttatctgcaagcctgactcctgaaactgtgcattgtaccctgaaaccagctttatccatagcttctgccataaatggctgtaagtcttggactccttgctccaaacgcagtgactcagcaatggaacctcccagctcccaacacttcctagtgcccatggtgggctttcccacagggcaagagaacatttctcctttttttttttgaagtggagtctcgccctgtcacccaggctggagtgcaatggcgcrgtctccgctcactgcaacctccacctctgttgttcaagtgattctcctgtctcagcctcccgagtagctgggattacaggcgtgcaccaccacaccgggctaatttttgtattttcagtaaaaacgggtttcatcatgttgcccatgccaggcttatttttatttttttcagatgaagtcttgctctgtcacccaggctggagtgcagtggtgcaacctgggctcactgcaacctctgccacccgggttcaaactattctcctgcctcagcctcccgagtagctgggattacatgggtgtgccaccacgcctggctaatttttgtatttttagtagagatggggtttcagcatcttggctaggctggtcttgaactcctgacctggtgatccacccgtctcgggcacccaaagtgctgggattacaggtgcgagccacctggccaggcttaggctggtcttaaactcctgacctcaagtgatccgacctccttggcctcccaaattgctgggattgctggtgtgagccacagcgcctagcccatttctcctttttataaaacctgttgctgtctctgttctcccaacatggtgaacaccacccrgactgcgtgtatgtcccaaattctttctttgcaaatgaaatgtgaaattagaggctcttctccacactttaaatttgacttgtcattttctaggcagatgtaagttattagagaatgagattctctataaaaatgaccccttcatgctgtggcctccacagaacatgccccaggccaggtgcccacacagcaggcatttatttcctcacacatctggaggctccaagtccaagttcgaggggtgggttgggttgtttgctctgaggctgctcctcctggctggcagggaatcccttctggctgtgtcctctgtggcctttcctctgtgcacctacctgcacctctggggtatctctgcctccaaawatcatcttttttttttttttttttttttgagacagagttttactctcgttgcccaggctggagtgcaatggcataatcttggctcactgcaacctccaccttcagggttcaagcgattctcctgtctcagcctcctgagtagctgggactacaggcatgcgccaccacgcccggctaattttrtagttttagtagaggcgaggtttctccatgttgctcaggctggtcttgaactcgtgagctcaggtgatccaccctcctccacctcccaaagtgctgggattacaggtatgagccaccgtacccggcctttttgttttgttttgtttttgtttttgtttttgtcttgagacggtgttttactctgttgcccaggctggagtgcaatggcatgatcactgctcactgcaacctccgcctcccaggttcaagcaattctctggcctcatccttctgagtagcggcgattacaggcgcccagaaccactctctgctaatttctgtattttttagtagagatggggtttcaccatgttggccaggctggtctcgaactcctgactgcccacctcggcctcccaaagtgctgggattaaaggcatgagccagggcacttggccacccttctccttgatggacccccgccaagtgaatttgtgcccacactagaggtctcgtttaaattaatcatcttggccgggcgtggtggctcacgcctgtaatcctcccactttgggaggctgaggctggcagatcacttgaggtcaggagttggaaatatgcctggtcaacatggtgaaaccccgtctctactaaaaatacaaaaaaattagcagggcgtggtagtggatgccagtaataccagctactcgggaggctgaggcaggagaatcgctggaacccgggaggcagaggttgcagtgagctgagatcgtgccattgcactccagcctggaagacacagtgacgctgcatctcaaaaaaaaaaaaaattaattaattagttaatcatctgttggctgggtgcggtggctcacgcctgtaatcccrgcactttgggaggctgaggtggcggagttggaggtcagcctggccaacatggtgaaaacccacctctactgaaagtgcaaaaagtagctgggcatggtagtgggcacctgtaatcccagctactcgggaggctgaggcttgaatcacttgaaccagggaggcagagtttgcagtgagccgacacggtgccactgcactgcagcttgggcgacagagtgagactccatctccaaaaaaattaattaattaattaactaatcatctgttgaaaaggacctgtctccaaatacaaccacacattgaggtagaggggttagggcttcagtatattgatttttgggagaaacagggcaacatggcaacaagccacagtcactgtgggcgggcctgagtggggagtgcaggggttcctgtcctgtgtgtctgtctcacaggggagtcctgacctgaccctcacagcccctccacccagaccttcctgcatgttccacccagcccaccctcctgcacccaagagcacccagccctcccttctgctcatgcccctcccttctcaaatccctcccagcagtgcagctctgggctaggacacagcctagggaacgtgactgagaaagagccaagaaaacttgatcagtgatcaagttggtgtttaagtaagattttcaataaaaagtagaattgggtactacatggaggcttgagatgctcagagcttttcgagaaagcagaacagaaagtagaagggcaaccaggaaccagaggtgccagagaactggaagcgcgggccctccgaggagacagggagtgggcacctgggtcttgggcctgtcgacaaaaagagtcaaactctgtaaaatatttgaagagacgtattctgagccaaatacgagtgaccatggcccgtaacacagggctcaggaggtcctgagaatgtgtgtgtgctcaaggtggtgtgggtgcggcatgactccccagaccccttagataggaatttggttttatatattttagagaagcatcagctatcaatcaaacacatttaagaaatacagaagctgagcgtggtggctcacgcctgtaatcccagcattctgggagactgaggcagatggatcatgaggtcgggaattctagaccagcctggccaacatggtgaaaccccgtctctactaaaaatacaaaaaattagccaggtgtggtgctgggcacctgtaatcacagctactcgggagactgaggcaggagaatcacttgaacccaggaggcagaggttgcagtgagccaagatcacgccactgcactccagtctgggcgacacagcaagactccgtctcaaaaaaaagaaaagaaatacttcggattgctccagaaaggtcggacggctcaaagtgagggcaggagtgctggggggcttccaggctacaggtaaatttaaacattttctggttgacaattggttgagtttgtctagagacctggcatccatagaaaggaaacgttcaggttaagataaaagattgtggagatcaaggttcttttgaagtctcatagtggctgcccttagagacaatagatgacaaatgtttcccattcaggcctttaaaaggtgcaattagttcatctgtttaggaccgggagggcctagaagaaaaagatccagctatgttaatagagattctttacagatacaaattttgccccacaaaggacaactttgcagggccatttcaagatatggcaaagaaacatgttttggggtaaaatattttgtctttttactttgtcacataatgttgtgcctgagtcagattggaaagtaactcacaatatatagggttaaataaaacccatgtgggccgggcgcagtggctcatgtctgtaatcccagcactttgagaggcctaggtgggtggatcacctgaggtcagcagttcaagrccagcctggccaacatggtgaaaccctgtctctactaaaaatacaaaaattatccaggtgtggtggcgggcacctataatcccagctacttgggaggctgagacaggagaatcgcttgaacccgggaggcgaaggttgcagtgagccgagaccacaccattgcactccagcctgggcaagaagagtgaaactcggcctccattaaaatacaataggaaaaaaaaaaaaaaaaatagaacccctctgatgaggatgtacgggttgtaaggcatgactccccagaccccttagataggattttgggcaagattaaataaaaacaaatcagagcttagtccaaaggcctatgaactaaaaataaagtctttagcccccaccgatcccccccaactttggcccccagtggccaggggtatctcagaaaaaccttaaaactgagttcccagccatgatgggaggggaggtcaggcacgcctcattatcaccccgcccttttgcagtttagacacaactgaccagcagtaatgttaaaacagaatcataagatgggcagaaccagaacagactcttcatggcaatcagataccaaatcacaaccaggacctcaggccgtgccaggcaagggtgagatcacacaccccacacttaaacagtcaactctgttctgcctgccccaaggttttttttttttttttttttttgctctagcagctaaacaagcactgcctccagataaagatgaaaacaatcacagctcacccagcgcccggacgcggagcaacagagcccctgctccacagccctaattccaggtttccctggacaagagactgatttcagtaactttctccagatcggaagaccacggaccacggactagttctgaatggtttacagacctggcaaattttggtgccttcatgtcctgaaaggaccttttgacatacaggcttaattgtggtacatttaaatgttgtctccaccgcaatgtgaggacggattatacggttgctttttttttttttagatttttgtttgtttgttttttgttttgagatggagtctcactctgtctcccaggctggagggcagtggcgcgatctcggcccactgcaacctctgccttctgggttcaactgattctcctgcctcagcctcccgagtagctgggatttcaggcacgtgccaccacacccggctaatttttgtagttttagtagagaccaggtctcaccatgttggccaggttggtctcgaactcctcactgtcatgcgtgtctgtayagaaaaccacctaaacaggctttgtgtaagcaataacgccatttattcacttgggtgcaagtgggctgagtctgaaaagagagtcagcgaagggagataagagaggggcagctttataggacttgggtaggtggtggaaagttacagtcgaaggtggtcatctgttgtcagcaggggagggggtcaccaggtgcatggtgggagaccatgagacccattgtccagaagaagaatgtcataaggtcgattgatcagttagggtagggcaggaacaagtcctaatggtggaatgtcttaaggttggttaatcagttaagggagaaactggctgtttcacttcttttgtgtttttttggctgctccagacttcttggctgctgcaggccatctggatgtatatgtgcagttcacaggggtcacaatggcttagctccggctcagaggcctgacactgacctcagatgatccacctgcctcggcctcccaaaatgctgggattacaggcgtgagccactgtgcctgcctgggatcatatgttacacgcatgtttgttcaataagcatggagtgcagccacccacatgaatattcatagctcctcctatagcctgttgaatatgtatgtttagccaaccccttcagcataaagctcctgccccaacccctcctgcttctaaatgtctgtctctggtgtttcccagaggctgctcttcccaggctgcgggatggctaccttgctgcctgtcacccttaacaagaaataaaatctcctttccaaatttatacattgtggccaggcgcggtggctcacacctgtaatcccggcactttggtacgccaaggcgggcggatctcctcagatcgggagttcgagatcagctgaccaacatggagaaaccctgtctctactaaaaatacaaaaattagccaggcatagtggtgggcggctgtaagcctgaccaacatggagaaacactgtctctactaagaatacaaaaattagcctaggcgtaggggtgggtgcctgtaatcgcagttacatgggaggctgaggcaggagaatcttttgaacctgggaggcaaaggttgcggtgagctgagattacgccactgtactccagcctgggtaacagagcaagtctccgtctcaaaacaaacaaacaaacaaaaaaacacaaaaaaacaaaagcaaacaaaaaaaccaaatgcatcccttgtgtaatttttaggtcaccgcgccatgggaacacgctaccaggggaagggagctgtgagacgcgcagggaggctccagacaggctggcctgggacaccagccactgctcttccatgacatggggacaagaggaggcgagagctcagcccaccagggaggaactccgggcaggagatggggaagaaggagaagcaggaaggaaagagctcagtgtgggggcgcgcatggcatcccggtgggacatctgaggcccacacccacctgctgtccctccctcccacggtggcctccgagggtgaaggcctggggagaggcagacacctggccctttactctccctccctgtccccatggccgctgggtgggggccgtctctgggatgatccccgagggcaggatccgggagtccctgcggaggcatcagcctgtctgtcttgatggtggagaggaggctccagctgggcgggaccaccaggggaggggcttgtgctctgctggctcagcctggtgtggacccacctcccgggcgctggctgcaatgactttctctttccctttgcaattgccttgggtcctgccgcacagagcggcctgtctttatcagaggtccctctgccagggggagggccccagagaaaaccagaaagagggtgagagactgaggaagataaagcgtcccagggcctcctacaccagcgcctgagcaggaagggggaggggccatgactacgaggccctgggaggtcactttagggagggctgtcctgaaacctggagcctggagcagaaagtgaaaccctggtgctccagacaaagatcttagtcgggactagccggccaaggatgaagcctcacttcaggtaccgctgcccgctctacccgctgggcccctctgctgccccttcctgcctggtggctctgctgggcgtcagccctggcctccccctgccccagccccagccctgggctccctcccctctggctcccctgcccccgccactcccagccaggctctttttcctgctctgtggttgccccactgctgcttctgaataggccgcttccccacctgccccagcccaggtgccctgctgagactctcccccgccaccgaaagtcatggcagggctggtgctcccggccctgggagggtgctccctctgtgttctttccgccattcctgaactctggaactgggagaattgaaccaaaggatgattagagcaatgtggaattttgttcacagtgctttgatggattttctgtaacatttactttgcttaaatascaagtcttaggagagggtgtggggagggaatggtctctgaagcacaagataaatcgtatcttccaaggatgtctccactgtgggcagaggaggatgcagatgaccccaaacacacgctcctcctccactatcagcattcactgtttataaatgacacgagtaacatggaatatagtggcckggtgcggtggctcacacctgtcatcccagcactttggtaggctgaggtgggtggattgcctgaggtcgggagttcgagaccatcctgatcaacatggataaaccctgtctctactaaaaatacaaaattagccgggtgtggtggcgggcgcctataatccagctactccacaggctgagacaggagaatcgcttgaacccaggaggcggaggttgcagtgagccgagatcgccccatcgcactccagcctgggcaacaagagccaaatttcgtctcaaaagaaaaaaaaacaaaaacaaaaaacatggaatatatgggaaaaaaactcaatgatcaggagaaatgctattattttaaaatttagtaagaagagagtctggtccccaatggctccctcctgcaaggctggtgacacagagactggacagggctggtctggtaagaggccccagccccatccgtccccagctctgtggcctgggcaggttaccccatctctctgcgcctctggcacctcctctgtaagatgggaatggcccgtgcgggcctagggcagcctcacatgagctcacatccgcgcagcacttagaagagtggcctgggcctcagaattcggttctaccatgatttaacaatagtaatatacagaggtgaaatgtcagaaggaactggctgaaaggttaaaatctattattttggggtgaatagttttattctctctctcttttttttttttttttttgagatggagtttcgctcttgtagcccaggctggagtgcagtggcacgatctcggctcactacaacctccgcctcccaggttcaagcgattctcctgcctcagcctccacagtggctgggattacaggcacccactaccacgcttggctwwtttttatatttttagtagagactgggttkcaccatgttggtgagactggtctcaaactcctgacctcaagtgatgggcctacctcggcctcccaaagtgctgggattacaggcatgagccataatgtccagccaagaactttgttctcttttgcattttactaatgcgttggagartgggtgggagaaatactgggaaggtggggaatgtactcctggaacgaccagagctggaccctgagctggaagaggtcagcctgcccctgctgcccatgccagcatccccttttcttgctctctccccggtcttcctgcctgggaaggaagcaaaaattctcagggctgtggaggggttggggaggcccagagccatgcagggggctgtgtttagtggacatcagccctgagggctcccrggagcgctctctacattggctggtttctctcttgtgtcttcagaaacacagtggagcgaatgtatcgagacacattctcctacaacttttataatagacccatcctttctcgtcggaataccgtctggctgtgctacgaagtgaaaacaaagggtccctcaaggccccstttggacgcaaagatctttcgaggccaggtaccacccggacttcaatcactttgcaggcaggagctaagccagctgggaaagcaaaccacgcactgataagtgaagtgcccggcggcgggctatccagtgtgtccttctctcccacactttccaagtccgtggccctgaccttcctgctggaccgtcctgggatcggatcgtggagggggtttgcctttgcacaaaaggccttgtgtttttttttttttttttttgagacagagtttcactcttgttgctcaggctggagtgcaatgacgcgatctcggctcacagcaacctctgcctcctgggttcaagcgatgctgtcgcctaagactcccgagtagctgggattacaggtgcccaccaccacgcccagctaattttttttttttttgtatttttagtagagacaggattttaccatattcaccaggctggtctcgaacttctgacctcaggtgatccacctgcctcggcctcccaaagtgttgggattacaggtgtgagccacagcgccggcctaattttaatatttaattaatccaatgtggctaacatattacttcaacattaattaacataaaattcttgacaagataatgaagtttctttttgtcacactgagtctttgaaatgagctgtgtaggccacgcttggtgggtggctcgcgcctgtaatcccagcactttgggaggccgaggtgggtggatcacctgaggttagatgtttgaaaaccagcttggccaacatggtgaaatcccgtctctactaaaaatacaaaaaaaaaattagcccggtgtggtggcagtcgcctgtaatcccagctacttgggaggctgaggcaggagaaccgcttgaacccatgaggcagaggttgtagtgagccgagattgcatcattgcactccagcctgggcaacaagagtgaaactacgtctcaaaacaaaaacaaaaaacaaaaaaagataaatgagcggtgtatggtgtatttttcaggtgcccaggtctttcatcagagccccatttcaagtgctcagtagcccctttggccagtgcgccccaccacatgggacagcgcaggtccagtggcctccccagctgaccgcaggcagggaacaaggcagaccctagagggccaggccacagcaggggctgaggatgcctggtgaatggatgcctgggagaatggatgccagaattcacgcatgaggctctgaacagggctgggaaaacttccaaacgaagggaagctcatgtcttggtgcactttgtgatgatgcttcaacagcaggactgagatggggacatttacaataaacagaaatgtatgggctcgagttctggcctctgggaagtccactgtcaatgcaccagcaactttccagggcctgcgagctgcacagtcacgtgggggtaaaggttgttgccagaagttcaggggatgctccagacagagtggcctgggatgtcgagtcactgctgctccatgccacggggacaagaggaagcagtttagtctgacatactgcccccccagctagagggcaagagacagaaagaggggctgaagtcgcccttgaataaacacgccagtagcacccacaaaggtgcagcccccacagcctcatagcctcttctaggtgccacctcttaaggccattacaatagccattaacactgaacgtgagctttggagcagacaatcactcaaactaaacaggggggatggaggaaaggagcttcaatggcaagatcccctgggctcctgtcctggcccctcctctccctgccccacccctgcactcctcctgctccccctctcagagcatcccctgccccctgctcctctcccaggtgtattcccagcctgagcaccacgcagaaatgtgcttcctctcttggttctgtggcaaccagctgcctgcttacaagtgtttccagatcacctggtttgtatcctggaccccctgcccggactgtgtggcgaagctggccgaattcctgkctgagcaccccaatgtcaccctgaccatctccgccgcccgcctctactactactgggaaagagattaccgaagggcgctctgcaggctgagtcaggcaggggcccgygtgaagattatggacgatgaaggtgagaggtggaggggtcaggggagcgtgagcgggaggaacagcatgaaagatggatggatctgcaatgccatggctgggggtgtcccagggcagcctgcaggggcggggccagcactgacagcaactgacagccaggagaccaggcctgggagcgcgggcccagggtcagggcagagcctgactgcttcctgcctcttcgtctcagaatttgcatactgctgggaaaactttgtgtacagtgaaggtcagccattcatgccttggtacaaattcgatgacaattatgcattcctgcaccgcacgctaaaggagattctcaggtgagggtctccctctggcctcatcgtctgtctcctctcgcctcctgctcatcctcctgaggcctcccctggccaggccctcctgccctccgtcctgccccctgcctgccctcatggttacacccctcacccacactccttgtgctccttccccttcttgcctcctccctctttcctgggcccctcctatgagtgagaggccccttctgcctccagagcaacctccatccaccttcgaggccgccctccccacagcctgggatccccaacctggctccttccatctccctggcataatcgaatttgtcataaaactggacgtaagtgggcatgaatattcacaaggccgacagccagaagctttgagcaacatccttcaaggccgacctgagtccctgagaaggagcagcctctgtggaaacttcaggcttcgactgccatagaagatgcccccgggccgggtgcccacagggcaggcatttattttctcacagatctggaggctgcaagtccaaggtggaggggtgggcggggttgtgtcttctgcagctgctcctcttggctggcagggggtcccttccagccctgtcctctctggcctttcctctgtgcacctgcacccctggggtctctctgcctctaaatgtcctcctcgtttatggaccccagtcagacaggattagggcccaccctaagggccatgagttaatttaatcaccactttagtggacctgtctccaaatacagttatcctgtgaggaggtggggatgagggtttcaacatatcaatgtggggaagatacaatttagtccatgacaatgggtcaagcttgsgtggggcatgcaggggtccctgttctgtgtgtctgtctcccaggcgagtcctgccctgactctcacagcccctccctccagaccttgctgcaccctgggccccaccccatggcttccccacccaacagcacccagcccggcctctgctcacgcctgtcccttctcaaatctgcccccaacagggatggagatgcagaaagagccaaacaaacactcagtgatcaaggtcccaattgaataagattttttttttttttttgagacactgtctccctctgtcgcccaggctggagtgctatggtgcgatctcggctcactgcaatctctacctcctggttctagcaattctcttgtctcagcctcccaagtacctgggattacaggctcatgccaccacactggctaatttttgtatttttagtagagacggggttttgcaatgttggccaggtgttgagtaagattttgcaaaagagtaggcttggataatgggaggcttgagatgccaggagctctccaggaagcacaatagaaaaaggcaaccagagaccagagaggccatagaaagggatctaaggccctcgggagagacgggaactgagcacctgggtcttagaccggaggagcaaactgcmagacagggtggccggggacaccagcctccacccttctgtgacatagggacaagagctcagcctgccagggaacaactctgggcaggagatgtggaaggaaggagctcagtgtgggggcacgcatggcatcctggggggacatctgagggcacccccacccgctattcctccctccaatggtggcctttgaatgtgaaggcaagggggaagcagacacctgcccctcactctccctccctaccacatagctaccgggtggggggcgtccctgggatgattcctgagggcaggatccaggagtccctctggaggtcctcccatccaggtgagaaagcagcataaagtgagacctgcactcagatgggcctgtgaggtcactcacagcgcaggtgtctcctggaacaagggccctggaagataaaatagaacccaagcccaggactaccatcagggccaggacaagcctgccagggagggtgcacatgaagccccagatcagggaccactgcccgctctgcccacggggcctctgctgccccttcctgcctggtggccctgctgggcctcagcctggcctccccctgcccctgccccagcgctagtctctctcccctctggttcctctgctgctcccactaccagccaggctctttgccctgctatgtggtcgcccctttacagcttctgaatgggccatctcccccacctgccccagcccaggccccctgctgagactctcccccgaaagtcacccctttgctattgctccccgccctgggatggtgctccctctctgtgcttctcgccattcctgagctcaggaactgagaaaattgaaccaaaggatgattggagcaatcaggcattttgttctcagcacttccatggaatttctgcaagatttactttgtttcaacacaaagtcttaggagaggatgtgggggagggaatggtctctgtaccagaaaataagtcacttcttccaaagatgcctccactgtgaacagaggaggatgcacatgactccagacacaggctcctcctccgtgagcaccattcaccttttagaatgaaacctgcaacatggagtgtaggaaaaaatatgatgatcaggagaaatgctcttattttaaagtttagtaagaagagagtccggttcccaacagctccctsctgcagggcctgtgatgcagaggctggacagggctggcccggaaaggggccccagctccatccatccccatctctgtggcctgggcaggttaccccgcctctctgtgcctctggcacctcgtctgtaaaatagtgatggccccctgcaggcctcaggcacataccatgagctcagaccctcacagcacttaggagagtggcctaggctggccgggcacagtgactcacgcctgtcatcccagcactttgggaggctgagtcgggcagatcacaaggtcaggagttcaagaccagcctggccaacatggtgaaacccagtctctactaaaaatacaaaaactaggtctggccgcgatggctcacacctgtaatcccagcactttgggaggcaggcgggcagatcacaaggtcaggagttcaagaccatcctggctaacatgatgaaaccccatctctactaaaaatacaaaaaattagccgggtgttgtggcacgtgcctgcagtcccagctagttgggaggctgaggcaggagaatcgcttgaaaccaagaggcagaggttgcagtgagccgagattgtgccactgcactccagcctggcgacagactgagaccccgtataaaaataaataaataaataaaagtacaaaaatcagccggacgtggtgacacaagctcgtaatcccagctactcaggaggctgaggcaggagaatcacttcaacccgggaggtgcaggttgcagtaagctgagatcgcgccactgcactccagcctgggcagcagagggagactatgtcccaaacaaaaacaaaaacaaaaaaaaaaagagtagcctgggcctgggaattcggtgtgataccaacgtaaaaagaatcatcatcatcggacaggtgaaatgtgaggaaggaattgagctgaaatgttcaagcaattattttagggcgaagagttttattgtctgttgcatyttcctaatgggttgggagacgtgtggcagaaaaactgggaggttgagggtgtcccattggtaggcccagagctgtggttccagctgggagaggtcaccccggcccttctgcccctgccagcatcccctcctctttctctctcccagtctttctrcctgggaaagcagcagacattcccagggctgtccagtgagtggtgttcagtgggcatcagctccnaggaatccaggggggtctctgcattggggtttctctattgtgccttcagaaacccratggaggcaatgtatccacacatattctacttccactttaaaaacctacgcaaagcctatggtcggaacgaaagctggctgtgcttcaccatggaagttgtaaagcaccactcacctntctcctggaagaggggcgtcttccgaaaccaggtagcaccaaagtcctatttacaccccaaataggagctaagcagctaggaatgcagaaaacacaataagtgacgtgcctggcgtgggctttcctgtgtgtactttcctcttacatttcttttttttttttttttttgagacagagtctcactcagtcacccaggctggagtgcaatggcgtgatctctgctcactgcaacctctgcctcctgggttcaagcaattcttctgtctcagcctcctgagtagctgggattacaggtgcccaccaccacacccagctaatttttattccatttttagtagagacggggtttcaccgtggtgaccaggctggtttcgaattcctgacctcaagygatccgccccsctyggcctcccaamgtkctaggattacaggcatgagccaccacgcccaacttcctcccacattttttaagtccgtggcccagatcttcctccctaactttcctgggatcagattgtcgaggggttttgcctcttaccaaaaggccttgtttagcgcccagcgccctcactcttgactttgtttcccaaaatcttgtcatggagctgtgcgtccggcagtcctcgggaaacagcagctgtgggaagcggtgggtctggtgtccagcactgtgcctgggccagtcactgtgggctggtggggccgcccccgccactgccctgattcctcgatgtcaaggacacatcctcacagggtggtgaaccctcgctcctcaccctgccgcccccacagcagccactgacctcccacccaccctgycgtgtcccacccaaccctgcggccccctcctcccaggcaggagattttttcagagtgtgtttggggagggagccgtctgtgtgctgggcaggcctggcctacagcagtgctggcctcggaaacacccaggactcaggatggaagcgcaagtgtttccagtccccacacgctaaaaaggcgacaagaacttgtggaagaaattttagtgtctgcattagctcaattatctcacataggatttcaacatatacttaatataaaatgcctcatgagagagttaaagtttgtctattctcacaatgagattttgaaatgcgctgtgtattttacacgtgccaacgtttctaatcagagccccatttcaagtgctcagtagcccctttggccaaccttcaactccatgggacaatgtgggtccaatgaccttcccagcagaaggcagacrggggacaaggcagaccccataggaccaggccacagcaggggctgaggatgcccggttaacggatgcctggggaacaggatgccagaaatcacacatgacctatgatgagacaggaaaagactcaataaaataaagaaggaaggggccgagtgcagtggctcacgcctgtaatcccagcacttagcgaggctgaggcgggcggatcatgaggtcaggagtttgacaccagcctgcctaacatggtgaaatcccatcactactaaaactacaaaaattagccaggcgtgggggtgtgcccctgtagtcccagctacttgggtggcttaggcaggaaaatcgcctgaacccaggaggcagaggttgcagtgagccgagatcttgccactgccccccagcctgggtgacagagcaagactctgtcactcaaaaagataaagaggaacggccaggygcagtggttcacgcctgtaatctcagcactttgggaggccaaggcgggggatcacgaggtcaggagcttgaaaccatgctcgctaactcggtgaaaccccatctctactaaaaatacaaaaaattagccaggcgtggtggcgggcgccygtagtcccagctacttgggaggctgaggcaggagaatggcgtgaaccccggaggcggagcttgcagtgagcggagatcgcgccactgcactacagcatgggtgacagagcgagactcagtatcaaaaaaaaaaaaaaagaaagaaaaagaaaagaaaaaataaagagcaaggagaaggatggaagaagggaaattcaatgagtaaaaagccctggggcctagtatgtacccaaaaaaatgagaagtaaagaaaataaggccatgcatgtggtttatgctcatagtcgcagagttttgggagggtgaggcaggaggatggcttgagcccaagagttcgagatcagcctgagcaacatggtgaaacccastctctacaaaaattacaaaaaaattaggcaggcgtggtggcacgcacctgcagtcccagctaatcaggaggctgaggtgggaagattccttgagcctgggaggtcaaggctgcagtcagccccagatcgcaccactgcaccccagcctgggcaacaggagagaccctgtctcaaaaataaataaggaaacgccctggggctccaggcccgccctctgctcccatcgccccacccctgcactcctcctgctcctagtctgagctcccctgccctcctcctcctccttccccaggtggatcctgagacccattgtcatgcagaaaggtgcttcctctcttggttctgtgacgacatactgtctcctaacacaaactacgaggtcacctggtacacatcttggagcccttgcccagagtgtgcaggggaggtggccgagttcctggccaggcacagcaacgtgaatctcaccatcttcaccgcccgcctctactacttctgggatacagattaccaggaggggctccgcagcctgagtcaggaaggggcctcygtggagatcatgggctacaaaggtgagacgttggggggctgaggagagtgggtgcgggagggacagcatgaggggcaggtgtgtctgcaatgccgtggggcggggcagtgtcccgggaagcctgcaggratggcgccagtgtccactgcaactggcagtcaggagacctgggcttggaggggagggcccagggctgggagagaagcctgctgggccctcactgctttctccttgttttttctcagattttaaatattgttgggaaaactttgtgtacartgatgatgagccattcaagccttggaaaggactaaaatacaactttctattcctggacagcaagctgcaggagattctcgagtgaggggtctcccmgggcctcatggtctgtctcctctagcctcctgctcatgytgtgcaggcctcccctccatcctggaccagctgtgcttttgcctggtcatcctgagcccctcctggcctcagggccattccatagtgctcccctgcctcaccacctcctctccgctctcccaggctcttcctgcagaggcctctttctgcctccatggctatccatccacccaccaagaccctgttccctgagcctgcatgcccctaacctgccttttcccatctccccagcataacctaattttttttttttttttttgagacggaatttcgctctgtcacccagactggagtgcaatggcttgatcttggctcactgcaaactctgcctaccaggttcaagcgattctcctgcctccgcctcccgagtagctggaattacagacgcctgccaccacgcacagctaactttttttttttttgtatttttagtagtgactgggtttcaccatgttggccaggctggtcttgaactcctgacctcaggtgatccgcctatctcagcctcccaaagtgctgggattacaggcgtgagccactggcccggcggcacaaccaaatcttattaaactcaccctaggctggccgcggtgactcatgcctataatcccccagcaatttgggaggcagaggtgagagaatcgcttgagcccaggaattcgagaccagcctgggccacatgacaaagccccatctctacaaaaaaattacaaaaaaaaaaaaaacaggtgtggtggcatgcacctgtagttkaagctacttggaaggatgaagtgggaggattgcttgagccggggaggtggaggctgcagtgaactgagatcacgtcactgaactccagtctgagcaacagatcgagaccctgcctgaaaataaatcaataaataaactcaaccgaaatgggyatgaaagttgaaatgggtatgtaagttgaaaaccagaagttttgagaaacatcctttgttaactttcatcctacaaattgggtcattcatgtcctacgcagctaaaacagagcccaggagccagggaggaaaagcagtcaggccacacaccattgctcccaaaatggacttctctgcaagcctgactcctgaaactgtgcattgtaccctgaaaccagctttatccatagcttctgcaataaatggctgtaagtcttggactccttgctataatcgcagctattcagcaatggaacctcccagttcccaacccttcctagtgcccatgggctttcccataggacaagagaacatttctccttttctttttttttttctttgaaatggagtctcgccctgtcacccaggctggagtgcaatggtgcggtctcggctcactgcaacctctgcctcccttgttcaagtgattctcctgtctcagcctcccgagtagctgggattacaggcgtccaccaccaaaccaggctaatttttgtatttttcataaaaacgggtttcatcatgtttcccaggctggtcttatttttattttattttttgagatggagtcttgctctgttgcccaggctggggtgcagtggtgcaatctgggttcactgcagcctctgccgcctgagttcaagctattttcctacctaagcctcccaagtagctgggattacatgcgcgtgccaccacgcctagctaatttttgtgtttttagtagagacggggtttcaacatcttgaccaggctggtcttgaactcctgacctcgtgatccacccgtctcggcctcccaaagtgctgggattacaggcgtgagccacctggscaggcttaggctggtcttaaactcctgacctcaagtgatccaacctccttggcctcccaaattgctgggattgctggtgtgagccacagcgcctagcccatttctccttttaataggacctgttgctgtctctgttctcccaacatggtraacaccacccggactgcgtgtatgtcccaaattacaattctttctttgcaaatgaaatgtgaaatttagaggcccttctccacactttaaatttgacttgacattttctaggcagatataagttattagagaatgagattctctataaaaatgatcccttcatgctgtggcctccacagaagatgccctgggccaggtgcccacatgaataatgcgggccacaggcaggcatttattttctcacagatatggaggctacaagtccaaggtggaggggtcggcggggttgtttgctctgaggccgctcctcctggatggcagggatcccttctggctgtgtcctctgtggcctttcctctatgaacctgtactgtacctctggggtctctctgcttccaaatatcttttttttttttttcagacagttttgctcttgttttctaggctggagtgcaatggcacaatctcagctcactgcaacctctgccttccgagttcaagcgattctcgtgcctcagcctcctgagtagctgggactacaggcgtgtgccaccacgcctggctaattttgtagttttagtagagacggggtttctccatgttgctcaggctggtcttgaactcatgagctcaggcgatccactctcctcagcctcccaaagtgctgggattacagatataagccaccatacacaacttttttttttttttgagatggagtttcactctgttgcccaggctggagtgctaaatagcagaatcactgctcactgcaacctctgcctgctgggttcaagcaattctcccacctcagcctcctgagtagctgggattacagatgcccagaaccaatctctgctaatttttctattttttagtagagatggggtttcactgaggaaggagaccacctctctcattgtctcctatttcagaaggaagcaaaaagttagaaagatgcagaagtaagatcaatggccagactgtttggcgctgctacctgggcctggtagttaaagatcaactcctgacctgaccgcttgttttatctaaagattccagacattgtatgaggaagcattgtgaaactttctggtctgttctgctagcccccaccactgatgcatgtagccccccagtcacgtagcccacgcttgcacaatctatcacgaccctttcacgtggaccccttagaattgtaagcccttaaaagggccagggacttcttcagggagctccaatcttcagatgcaagtctgtcaacgctcccagctgattaaagcctcttccttcctaaaactggtgtctgagaggttttgtctgcaaccgttcctgctacatcaccatgtacattccaggcgaggctggtctcgaattcctgacgcccacctctgcctcctaaagtgctgggattaaaggcatgagccatggcacctggtcgaccttctcctttatggaccccagacaaattaatttgtgcccacactagaggtctcatttaaattaatcatcttggtcgggcgtggtggctcacgcctgtaatcctagcactttgggaggctaaggcaggcagatcacttgaggtcagtgtcacacgtgtccatgtgaagagaccaccaacaggttttgtgtgagcaacaaggctgtttatttcacctgggtgcaggtgggctgaaccagaaaaaggagtcagcaaagggtggtgggattatcattagttcttacaggtttgggataaacctatcccaaacctataagtgtacattcttaaaggcatacaaagtacattcttaagtgtgggggagaatattacaaagtaccttcttaagggcaggggagactatatggtatcagttggggtggggcaggaacaaatcacaatggtggaatgtcatcagttaaggctattttcgcttttttttgtggatcttcagttgtttcaggccatctggatgtatacatgcaggtcacaggggatatgatggcttagcttgggctcagaggccagacattcctgtcttcttatatgaataagaaaaaacaaaatagtggtgaagtgttggggtggcgaaaattttggggggtggtatggagagataatgggcgatgtttctcatggctgcttcaagcgggattaggggcagcgtgggaacctgtggtgggagagattaagctgaagaaagattttggggtaaggtgatattttggagttgttagaaggagcatttgtcgtatagaattattggtgatggcctggatgcggttttgtatgaattaagaaactaaacggaagacacaaggtctgaataaaagaaggagaaaaataggttggtttttttttttttttttttttttttgagacagagtctcgctctgttgcccaggctggagtgcagtggcacgatctcggctcactgcaacctctgcctccctggttcagacgattctcctgcctcagcttcctgagtagctgggactacaggtgcacgccaccacgcccgactaatttttttgtatttttagtagagaagggggtttcaccatgttagccagatggtctcaatctcatgacctcgtgatccgtccacctcagcctcccaaagtgctgggattacaggcatgagccaccacacccagccagaaaaataggtattaaaggactaagaattgggagtacccagaacatctaattagacagtgtccaagggggttcaacataattatttgcttggttggtgagtttttggcctctatccttgaatttttttatgttgtcatatacctgtccagattgatttaggtaaaaacaacactcttcgtttaaaaatatacagagtcctcttttttttagcagtgagtaagtcgatgcctcggcaattttggaggaaagagaaatgcaaagccagcaattgttcatttaagaaggattagaaatggctaagagagagtttgatagtgtggtggagatagctggggagaggtagagggtagcataagaacggaaccagaataagagtgagtataaaagtaaagaataggacttcatcagggtgaaagtactggagggtaccttgccactgaagatcttctatcgacttcaagagcgacttaagggtggtgatttgaagtaaaaccaggagcctccaaataccaagagcctgagaaccttcttgggtgatttgactaataaaggccggtgcgttatcagactgtatagaggtgggaaggacaaacccaggaattctgtctaaaagaaaggaagaaatgatcacggtggacttctcagaccctgtgggaaaggcctctacccatccagtgaaagtgtctacacagaccaagaggtattttagtttcctgactcagggcatgtgagtagtcaatttgccagtcctgggcagggccaaatcccagagcttgatgtgtagggaagggagggggcctgaacaatccctgaggagtaatagaatagcagatggaacactgagaagtgatttccttgaggatagatttccacaatggaaaggaaatgagaggttctaagaggcaggctagtggcatgtaacctacatggaagaggttatgaaaggacgacagaatagactgggcctgtgaggctggaaggagatatttttcttggtccaagaaccatttgccttgtgtgggaagagattgataggtggaagtttcggtgggggagtaggtgggagtgactgatgagaaggagaaaaaccggccatgagggacagaagttggaatgctagctgcttctttagcattgccctgagcgatgggatccgatgccttttgatggcccttgcagtgaatgactccagcttcctttggaagtaaagcagctttaagaagactttttattaaggaggcattgatgatggaggacccttgcgtagtgaggaaacctctttctgcccatataacagcatggtggtacaggatatggaaggcatatttagagtcagtataaatattgatgtgtagtccctttgcaagagtgagggcctgagttaaggcaatgagtttggcttgctgagaagtagtggagtggggcagagtggtagcctcaaggataaatatggaagatactatagcatagcctgcctttgctggtgagtggcaattaggcctgatggaactgccatcaataaaccaagtgtgatcagggtgaggaacaggaaagaaggaaatatggggaaatggagtgaatgccaggtgtatcagagagatacagtcatgggtgtcaagtgtggtatcaggaataatgtgggaggccagattgaagtctgggccaggaacaatggtaattttgggagactcaacaaagagtgagtatagctgaaggagccggagagcagaaagtatatgcatcaggtgtgaggaagaaaatagattttggaagttataagaactgtagagagtgagttgagcacagtttgtgatttcaagggcctctaaaagtattaaggcagtggcagctgctgcacagagacatgatggccagcctaaaacagtaaggtcaagttgtttggacaaaaaggctacagggcacagtagccttgtgtaggaatcctggtccttgtgtaaaaattccgactgcacagccctgtactttggctgtgtgtaatgaaaagggttgggatgagtcagggagagctagtgtgggagcagtctctaaagctgtcttcaaggaacggaaagaggagtagggaaaggatttaggatctatggggtcagctaggtttccctttatgagtttacattaggttttgttagtacggcaaaaccaggtatccaaagatgaaagtatccaaccatgcccaggaaggaaagaagttgtttttttgtagaaggggttggagtttgagagattagccagacatgattggcagggagaacatgcatgttttcatgaagaattatgctgaggtaggtaacggatggggaagaaatttgagctttggaggggggatacctgatatcctctggagaataaatgttgaaggagcaggagggtatcttactgagaagactcaaaggagggactacaaagtaaaaggtcatccatgtattgaataaggtgggaagcagaggggtggaaagaaagtaaatcacgagaaagggcttggctgaagtaatgagggctgtccctgaagccttgtggcactatagcccaggtaagctgctgggactgacgtgtgtcagggtcagtccaggtaaaagcaaagagaggctgggatgaagggtgcaaaggaatagtaaagaaaccatgtttgagatccaggacagaataatgggttgtggagggaggtattgaggataggagagtatatggatttggcaccatagggtggataggcaagacaatgtggttgataaggcacagatcctgaactaacctataaggcttgtccagtttttgcacaggtaaaaggggggaattgtaaggagagtttataggctttaaaaggccatgctgtaacgggtgagtgataacaggctttaatccttttaaagtgtgctgtgggataggatattggcattgagcagggtaagggtgattaggttttaatgggatggtaaggggtgcatgatcagtcactaaggagggagtagaggtgtcccatacttgtggattaaggtaggaagacacaaggggaggacgtgaaggaggctctgaactggggaaaagggcggcaatgaggtgtggctgtagcccaggagtagtcagggaagaagaaaatttggttaaagtgtcctgacctaataagggagctgggcaggtggggataaataaaaaaagagtgcataaaagaatgttgtccaagttggcgccagagttggggagttaagaatgttgtcccagttggcgccagagttggggagttttaagaggtttagaagcctggctgtcaatacccacaacagttatggaggcaagggaaacaggcctttgaaaagaaggtaatgtggagtgggtagcctccgtattgatcaagaaggggacagacttaccctccactgtaagagttactcaaagcgtccgtgatggtccaggaggcttctgaggcaatcggacagcgtcagtcttcagccactaagccgagaagatccgggaaggagtcagtcagagaaccttgagccagagttcgaggggctctgggactgtctgctgggcgagttggacagtccgatttccagtggggtcctgcacaggtggggcatggcttaggaggaatcctgggctgtgggcattccttgccccagtggccagatttctggcacttgaagcaagatcctggggaaggcagtcctggaggaatgcctgacccttgcagtttaggcgttctgaagttcttgtgtgctggagatgtggctggggtttctctcacagaagaggcaagtaatcgcaactcttctctattattgtacaccttgaaggtgaggttaattaagtcctgttgtggggttgagggccagaatccaatttttggagctttttctaatgtcaggagcggattgggtaataaaatgcatattgagaatatgacggccttctggcccctctgggtctagggcggtaaagcatctaagggttgttgccaaacgggccatggactgagcggggttttcatatttgatgaaaaagagcctaaacactaactgatttgggagaggttgggtaaagaaaaaggagcattaaccttg

SEQ ID NO: 94847 - DNA, 24423 bp, Homo sapiens
  misc_feature (1)...(24423): n = A,T,C or G
gcatcaaaaattttgtgaaggtatttcaaatcaccatgcaagagatactattatataagtgttgaagaactcagtgagcaggaattgaaggaggggaggaagagagctatgactacgtggatacctagggacgagcactacggtcagaatagcaggtacaaatatcctgggatagaattttgcttgatgtgttggaagaaaagcaaggaggccactgggttggaataggggggctgaaggggtgagtggttggaatgtctgatcagaggaaacatgggccttggagtaggcccttgtaaggagtgaaaggacagaatgagatggaaagccactggttaggtctcagcagagagtgaaagtctgactggctgctgcgtggagaaccctccacacaagatgcatgcgtgaagatcagttagggggccattgcaatagtctataggcaagagatgatggtgtcttagaccagggtgggggcagtggaggtgagaaggcatgattagagtctggatatattctgcagataaaaacagtatttgatgatggattggatgtgggacatgagagaaacagatgtgtccaaaatgactctgggcagctgggtaaatggaggtgcccttaattcacagtaaagactacaggatggtggtggtgtggggctgggagagaattcggtttgctttggatatctcaagtctgagatacctattagacagccaagtggagatgttgagtagagatgaaggcagtaagatttccaactctggtgctcagggcagagatttaggctgagacaaaaatttagaagtcaagatatatagatggtaaagtcacagaatcacctgggaaggggtgtaaacagaagaggtttgaggactaagcccaagaaagtcagagaatgaggagataggaatccagtagctgggtgcagtggctcacacctgtaatcccagcactttgtaaggccaacatgggcggattacttgaggtcaggagtttgaggccagcctggccaacgtggtgaaactcttgtctctactaaaaaaaaaaaaaaaaaaattccagtaaaggaggcaattaaggaggagtagtgtcccagaaactaagagtgccttcagagtgattaccctgtgtcaaatgaaagctaagaactatgaaacgaccaacggatttagcagcagagattaggaggggcctgggagcctagtcctttgtggacgtttgggaggaatgacagggcaagctgggtcatccctgacatgtgggctctgagcctagaggcagagctgggttacagagtaggaatcccccaggaggcatggatttgcaacctggggtgagtggagaggagccagccagggcctactatgcctgacacggtggtattgggggtgaagagtyggtttcaggttggccaacttacctggactccacattcagtcacaaattgacttttgatgttgtttctaaatgcagttatacatatagtctttcggatttgtgttctttagaatgttaaaatatctaatttttataaccatgtttcttccatttttaaaataccaggaatcctgagaagcaggagtgatctatgccttaccctcagaacagggccaggacgagggtgaggcatgcttggtgtgtaaaatgcagaagttaaggcaagagcagggtctttgggaatgaatgcactttaggcacctctcttgccttacctgagtccaggccctacctacctcacatactgccaggtagtgtgccttcctttcattgtgggagcctccacattagtggtgggtcctggagaaggcagaccatagactggaggatctcctgttttgggtgggggcagacactactctgggagcccagaaaaaaagccaactgagaactatgcctttcagctaaaaagtgggtgcacactgccaccctgtggtcagccaggggaagattcttaggactgttcccaggattgcaccggcagaggtaagaccaagacacactccaggtcaccctgccctgaatttctcaaattgtggcattcgcagctgtgttggaagaaatcttattgaacatgttgatctctggcaatggagctcagtagtctgagttactgactcaaagagtgtcttaggtgattctaaggcacactcaagtatatagtccctactagtcaaaagccactgtcttgtcaggcatggtggcttgtttctgttatctcagctactctggagactgaggaaggatcacttgaggccaggagctggagatcagccggggcaacatagcaagaccccatttctaaaaaaaatttaaaaagctaaccaggcatggtggcatttgctactcataaggtcccagctactcataaggctaaggcaggaaaattgtttgggaccatgagttcaaggctgcagggagctatgatcatgtcactgtgccactgcactccagcctgggcaacagaggagaccccatctcttaaaaaaaaaaaaaaaaaatctaccatgaatcacacagcaagagagagatcttcctgaggtccccaggggtcagaggctttttccggctgctcagacacacaaaaagatggaacagatcaacaaatctttattaatagaaacagacagatggacagagaatgcagcaggggctgtgtgaaaactgtgatatgtgtgtgtgtgtgtgtgtgtgtatgtgttgtgtgtgtgtaaaaggccttctccaggccaggaagggccccttggaattaggcccacctgtctagatcctctcctcagtggtgggtcctgggctgaaaccagcttccacatcatacccccaaaggaagaatgggggtctttctggaatggaagacgctgacttcaagcattcttcaaattactctcgttccccagctgagctttgttgctgagggggttggggacaagccacaggggcacttgcatagcaggggagtagaatggggataaggcatatggtgaggacaggggagaaggggaagggcatcatagctgcaggtgaagggggcctccaaaaggcagctcctcttccccctcatcccctcaaattgctgctgggttgaggagtcagactgaggcagtataataccctcccccatccttaactctagaaccccggtttggtggggaggaggtgggaagctgtggagctatggaaaggcctcagttagtgagtcaagctgtgatgtgtgtgtctgaacacaactggctcccttggtataccgggggctccctctccagatgggtgtgagtgcatggtcctactgtacacacaggtctcagtatctatatgtgtctcatttgttcccatgggtctctgtgtttggatacataagcatggatatccctgctcatacagcaggaactcaggatctgcatggtgtatgtccctgtctgtaaacatgggctccagcaagtggatatgtgcgggcctgccygctcctgtcyatcygcaggtcttccttcaggcctggctggtcaagggtcctggccaaagaggtaggtggtgagctcaagccggaggccccragcataggagcgaagagtatagaagagggtgaggaagtcctgggtgctgaagacagtgtcggccagcgcraaggccagggtggatgggatgacgccccggccgtactccaccatccatgtgtttggcccccactccacagctgttgcctcaccaggcccgtgtactaccgtctcccctgggggacagggagcacccaagtgaaaagccagctctgccctgcccttccatggctgctgcttccctggcccatggactaactaggggtggggaatggagagggagcttcagaaaaacaaaaagccctacctcactgggctggcccagatggccactcctaaatgttctgtggcatcatctgacccacgtcctctctttggagaagccatggacggctacctcgcttggccatggacccactgtatggaagtctgcactcccaagcctcactcgaatcaagcagaaatttagctaaacctgggctgggcttgtagctaggaaaggggtagttccaggacttgtgaggctttatctgaaaagtgtagctgttcaaccaccatgcctgcgatgcatacacccaacctcaaatatactgggaagtccagtgctctatttcttaagtaaattgtttcactattaaaaaaaaaaaaaaaaaaaaaaggcaggggagcggccgggcgcggtggctcacacctgtaatcccagaactttgggaggccgaggcgggtggatcacgaggtcaggagatcgagaccatcctggctggtatggtgaaaccccgtctctactaaaaatacaaaaaaaattagccgggcgtggtggcgggcgcctgtagtcccagctactcgggaggctgaggcaggagaatggcgtgaacccgggaagcggagcttgcagtgagccgagatcgcgccaccgcacgccagcctgggcgactgagcaagactccatctcaaaaaacaaacaaataaaaagataactgtctgtcttgtcttttggggtattgagagcatttctgattacccattgtctccccaacagttgttggaatactgtctgggcaaaattgtgcctgggcagataaaaatcagacatgtttaataggaagttgttatgttttgtttccccttgacagaggaaagcaagagtccctcagctctgccccaaccaatcacctgtggcttatgggagggtggaggaagggaaccatgaggagggcccccccaacacactccttttccatgccatgctccccgcaattgtgggcaccccccgcgtgaagggacccacttctctgacagagccttcttacccacctgggtagaagacctcacttttggtggtgccctctctccactggtggaaggtgccagagatgatggtatccgagatctcagcccagtagcgccctgagtgacaatcgcacatgacactatcagggtattcgcgccattgcatggcccagccaaacatcagaaaggagggcatgggcccctttacaaccccagcctcccagtctggcccgccgctagcactgacccgagtggccgcgggagcccaaggcggtgccgaagagcagcacatactcggacagcgaggcgtgcagaaggcacatggcgcccatccagccacccgcattcacgaacacccactgcagctcctcgtcgggcagcacgtggcctgggtgcagccgccgcagctccacgatcagacgagagaaggccagctcgtggtccagccctggcggaggcagaggggcggcggagtcagggctggcaccggtcctaggtccggggatggcgccttcggaaccctaggctccgctcccaggccggccgctcccctccctgccctctgcccgctcaccagcgtactgccgcgccaactgcgctatctcttcgcgctggaagacgaagctctgcgtacccagccagagccagacgacctgggtcagcaccgctgcgacagccaggagcagcgcggcccacgcccaccgccggcccacggcccackgcatcccggcgggcggcctggcacggcgcagctcaggagggagccggggcctgaggctttgcgctcacggcctcggagcccgccggctgcccacgaagcgctcccccgccaccgccgtggtacggctcgccctgaccaatcggagcggcccgggcaccttggcaccgcccttcggttgaaccatttcctcggggggagcacggaggagtggggcggtgccgcgcaagggaggcaagggggcggggccaagtcgcccagcggcagatgtcagggtcttcaggcgaggtctgacctagctagcgccactctacatacggataggtgtggggatagtgagacccagaatggacgggctcgcccgagctcactggctggtgaagcagacgagcccggaagtgaagccttctgggactcaacgattgttaaggcccgcctttaccaggactgaagcggagaggaggcagttcaagctgggagccccagggtgggcattccagaggcggtgacacctgagcagtgtctttaagagctcgcagaaggggcatgccagcccacagggaccagcccctagagcaaaggcctccgaggagagacagcttggggtcttcaggggcctacaattccttctctgttctgcggcacaaaatgtgagaggaggccttgtaaaccagctgagggttatcagcaagggaggaaggggattagattttgccaccgagtggcacaggactgtcgagtggaggggagcaagatgagtcagggagaccatgactgtgggccaggtaagagggaaggtctgtgtcagtggagatggaagaaagaaatgagcttaacaactctggaaatggagttggcagggcttgatctcttcttcctggaatactctttccccctttatcctatccccactttccccttatttggctaacatcctttgcatgtctagtgggcagttgagtgtccaggtctcgaagctcagctccagtctggagatagagctgggagttgtcattcattcagatactttgttggcacttgtatgtgccaagttctgtggtggccattagggatatggctagaaacaatggtcctactccccagcttagagatctcactggagagtctacagaaaacctctaagaatggatgaaatctcacagggagagagaatagagtaagataaggctaaagacagagccctggagagcaccaacagcaaagggtaggcagaggaagaagaaagcaaaaaggaaaagaaacaaaagagaaaagaggtagcattgtgcagtgattaagaaataaactctggagctggactgcctgagttcaaggcctggctcctgctacctactagttgtctgatcttgggcagtttacttaaaatctctgtaacttagttttcttacctgtaaaatggaatggagataagtacctacctcatagtacatatcttcattgtgatgagattagatgggttaatatttataaagcagttagtgcctcacatggtgagaattttatgtgatggttatatatataaaacataaaggaactggaaaaaagtagcctcatacatttttgmccttaaagaaagaaactgaggccgggcgaggtggctcataactgtaatcccaacactttgggaggctgaggcagacggaacacttgagtccaggtattcgagaccagccttggcaacatggtgaaaccccatctctgcaaaaagtacaaaaattagtcaggagtgggggcgcacacctgtagtcccagctactcaggaggccgaagtgggaggatcgcttgagcctgggaagtggaggttgcagttgagccaacagagggagactctgcctcaaaaaaaaaaaaaaaaaaaaaaaaaaaagggccaggcacagtggcacacacctgtagtcccagcactttgggaggccaaggtgggcaggcagatttcctgagctcagaagttcgagaccaccctgggcaacatggtgaaacctcgtctctactaaaatacaaaaaattagccgggcgtggtggcaggtgcctgtagtcccagctactcgggaggctgaagcagaagaatcgcttgaacccagaaggtggatgttgcaatgagccaagatcgtgccactgcactccagcctggacaacagagggagaccctgtctctaaaaaaaaaagaaaagaaaaaggggccgggcactgtggctcacacctgtaatcccagcactttgggaggccraggcgggtggatcacctgaggttgggaatttgagaccagcctaaccaacatggagaaaccctgtctctactaaaaatacaaaattagctgggcgtggtggcgcatgcttgtaatcccagctactcaggaggctgaggcaggagaatcacttgaacccaggaggcagaggttgcggtgagccgagatcacgccattgcactgcagcctcagtgtgaaacagcaaaactccgtctcaaaaaaaacaaaacaggctgggcggggtggctcacgcctgtaatcccagcgctttgggaggccgaggcaggtggatcacgtggtcaggagttcgagaccagcctgaccaacatggtgaaaccccatctctactaaaaaatacaaaaattagccgggcgcggtggcgcgtgccacccacttggcccagctacttggggggctgaggcaggagaatcgtttgaacccgggaggtggaggttgcagtgagtggagactgcaccattgcactccagcctgggcgacagagtgagactctgtctcaaaaaagaaaaacacacaaacaaaaacaacagtgaggaaaaaaaaaagctgaggcaaaattaatatagagagtttatttgggccaaggtagagaacgactgctcgggacacttttccaagttgccttggggaatgttgatacaagcattttttatttttatatgtggtttttatttttattttttattttcttggagatggattcttactctgttgcctaggctggaatgcagtagtgcaatcttggctcactgcaactcccgcctcccaggttcaagctatcctcctccctcagcctcccgagtagctgggaccacaggtgtgcaccaccatgcctggctaatttttgtagttttagtggagacaggtttttgccatgttggccaggctggtctctaactcctgacctcaggtgatccacactcctcggcctcccaaagtgtgggattacatgtgtgagccactgcacctggccactttattttaacttaatttaattttattttttttgagatggtgtctccactgtcgcccaggctggagtgcagtggcgcaatctcggctcactgcaacctctgcctcccagttcaagaaattctcctgcctcagcctcccgagtagctgggactacaggcacctgccaccacatccagctaatttttttgtatttttagtagagatggggtttcaccatgttggccaggctggtcttgaactctgacctcgtgatttgcccgcctcggcctcccaaagtgctgggattataggcgtgagccaccgcgcccggcctatttttattttttgagaccggatcttgctctgttacctaggctggagttcagtggcacgatcacagctcattgcagccttgacctcttgggctcaagggatcatcctgccttggcctcccaaagtgctggaattacaggtatgaaccatcatgcccagccacaagcaagtttttaaaggcaaaagaggacaaggagtgggctgacacaaaattgtttaacaggaattctcattggcttacagaaacaacattgattagtgattggctataccttgttgaactatagggtatgagttatggtgtctagactatggcattttatggctatgtggtatcaatttagagcccacatagcaagtggcttcaaggggtaattatttggctccatgggggtgggggaaggtgagatatgactgctgttacatgctgtcacttttttttttttttttttttgagactgagtcatactctgtcgcccaggctggagtgcagtggcgcaatctcggctcactgcaacctccgcctcccgggttgaagcgattctcctgcctccgccacccaagtagctggaattacaggcacctgccactatgctcagctttttgtatttttagtagtgacagggtttcaccataatggccaggctggtctcaaactcctgacctcaagtgatcccgcccgccttggtttcccagtgtgctgggattacaagtgtgagccactgcacccggcctttttttttctttttaaaattattattattattattattattattttgagacggagtctcttgcactgtcgccggggctggagtgcagtggcatgatcctggctcactgcaacctctgcctcccaggttcaagcaattctcctgcctcagcctcctgagtagctgggattacaggcgcccgccaccatgcccaactaattttttgtatttttagtagagacagggtttcaccatgttggccaggctggtctcgaactcctgacctcgtgattcgcccaccttggcctcccaaattgctgggattacaggcgtgagccaccgcgccaggcccatgctgtcacattttaatgcctctctgggcctgataattaaaagaggctggcatttctcagataaaaagtttcttttctttctcaagagtgatggaatgggccaggcacggtggctcacacctgtaatcccagcactttgggaggccgaggtaggggaatcacctgaggttgccagttcaagatccagcctgaccaacatggagaaaccccatctcttctaaaaatacaaaattagccaggcgtggtggcgcatacctgtaatcccagctactcgggaggctgaggcaggagaatcgcttgaacctgggaggcggaggttatggtgagctgagagcacgccattgcactccagtttgggcaatgagagcgaaactccatctaaaaaaattaaaaaaagagtgatggaatgaagggttaacacagtgaaatataatggtgagattcaatgagatgatgggaaatgatcattagacttctcagtaggggcatgtggcagagacaatgctatacattcacaaatccatttccttttgctcttggacagctagattacattccacagtctactctggatcatgtgattgcattctggccaatgaaatatagatagaaatgatgtatgacatttctagggctggctcctaaagtctcctctgaaattcttttttttttttttctctttctctttttaagagacaggattgtgctatgtcactcccagactggtatcaaactcttgggctcaagtgatctcccaccctggcttcccaagagctgggggactacaggcacatagtactatgcccagcttgaagttctttacattttctttcttcccatgtctattactgtagttatagaggatctctagtggagtattctgagaccctaggacatggcatagctactagatggatggcacctggatccctaaatactgcttggaacagagctccctgttacccccagaattgactgtagtgctaagccattgagktttgggagtgtttgttacagcaattaagattacttaccctgacaaatatagggcaaaagatgtgttacaatataccatgcagctaagagtagagaccagaaagatggcctctgtttttaagaaacttggcaggccgggcacggtggctcacgcctgtaatcccaatactttgggaggcagaggcaggcggatcacctgaggtcaggaatttgrgaccagcctggccaacgtggtgaaaccctgtctctactacaaatacaaaaattagctgggtgtggtggtgcatgcctgtaatcccagctacaggggaggctgaggcaggagaatcacttgaatcaggaggcggatgttgcagtgagcctagattgcaccactgtactccagcctgggcgacagagcgagactccatctaaaaaaaaaaaaaaaaaaaaaaaaaargaaacttggcagagaaattaaggataaagaaaggattatctagaggagaatacaggattgagggaacatgtttttgtattggttctggcttctgtggcattcccgactcgacaattcactaagaaccctgggcagcagggattagcccccaaatttggtctctgctccccattccaggaacagctttctgggatcatctgggcctacacctcccctatctggtctttcagaaagcttttccaggcctttccaggtgtggtgacttatgtctgtaatcccagcactttgggaaggccgagatggacagattacctgaggtcaggcgttcaagaccagcctggccaacatggtgaaactctgtctctaaaaaatacaaaaattagctagtcatgatggtgggtgcctgtaattccagctactcgggaggctgaggcaggagaatcacttgaacctgggaggcagaggttgcggtgagccgagatcaagccactgcactccagcctgggcaacagagtgaaactccgtcttaaaaaaaaaaaaattatatatatatatatataaataaatatatataaatggataaccagcagccctcaggggtgctctgtctatggagtggccatttttttattccttcactttcctgataaacttgctttcacttcacactatggactcaccttgaattctttcttgtgtgagatccaagaatcctctcttggggtctggattgggaycyctttactgtaacaacacctctgggatctggcagggagggagctggttaggcccatcttagtcattctcctcttcctccaaaaaatgaccttggggagtcatagaggagaattatggagatgttcctgaagagatgttcctgatgggggtcaggatttaattagcatgattcagggggcggcactgaagcactggtgttcttgggaaaatggagctgtctacaagctctagtcactcaaacaaatataaatgagagaatggaaaagcagatctcctgttcctgtctcacctctttgggtaatatgaacagccagtgggacaggtaaaaccyctgtttctcagtcctcagctccctgccccctacctctgaaggtagcctcttcctattccagtctgaggaccctagggcagagatcaagtaaatgacccatgacctagtttttgcagctcaattgcaaaacacctggcttggcttggtcttgattgggggaagggatgtccctgctatggctcaacttctaactcactgggtctctgtcctgcattccactgaagcctcagaggcatctcacagcactgggaaaagccttggaaacttgcattcaaatctcagcttggccactaattctctgggtgaccttgagtcctctgggctccaatgtgaaatggggaagaggtttagacaatatttagatggctctttaaaagtactgggggccagctgtttgggaggctgaggcaggaggatcacttgmagtcaggagttcaagaccagcctggccaacatgtgaaaccccgtctctactaaaaatacataaattagcccagtgtggtggcacacagctctaattccagctacttggaggctgaggcaggagaatcgcttgaacctgggaggtggaggttgcagtgagccaagatcacgccactgcactccagcctgggtggcagagtgagactctctctcaaacaaacaaamaaaagtaccaggggaggaattaatttgaattttatcctagtgttagccaattggtcccatccaaggaaaatttagaaaagggaaggggatgtgtaaaggaaacactaggccccacctagatggtggctggagcttctgatagtcctgtactctccacatttttagactttcttgtacttttttttttttttttgtgacggagtctgctctgtcgccaggctagagtgcatgggcacaatctcggctcactgcaacctctgcctcctgggttcaagtgattctcctgcctcagcctcccaagtaggtgggactacaggtgcacgccaccaagaccagctaattttttttttttttttttttactagagacggggtttcaccatgttggccaggatggtctcaatttcttgaccttgtgatccgcctgccttggtctcccaaagtgttgggattacaggcgtgagccaccgagcccggccatttttagatttttttttatagcccttttacccctcccacttcttgtgctgtcttggtgtgtgtatgaaaaagagagagagagagagaggaaggagagcaagagtgagagaaaaagagaatatggttacttagccctttttcccaaatctgtttttgcttttggggataggatatggttatggtgaagtactccacacagaccccaccaagtttgcctctcctgcgctacagccactgagcaggtgactgaggcgctgttgatccagggtcatatccttactcgccctagaatgtaagctcaggcagggcagaggccatgcctgacatgtgcatcccaatgctttacacagcctagktgcctagcacatgctagatgcttggtaaatatttgctgaatgaaagatcaaatgaatgattgcagcaagcaagtcctgtaggcatcctggagcccaaggattctgcagtaggcagctttcacagaggttcttccagtgtagtggctctagctctgggtgaagtaggatcatcaatgtcggcccccagggttcacagctgttctgagccccgcccccaggtggcagggcagcccagtcagtcagtcacgtgctggcggctggccaatcatcgggggcggcgcggggaggggtggtgtggacggagaaagtgaaaggtgaggcacggccctgcagattttccagcggatcccccggtggcctcatgtcgcgcagtggaaccgatcctcascaacgccagcaggcgtcagaggcggacgccgcagcagcarccttccgggcaaacdgtaactgcaccgcggcagggactcgctggggcgcggagccgagccctccccttccttaggaagctttcgtcccctccgaaggttggaacgctcatcccgagccagaccgacaaggcgtacagtctgcaggcctstacgagcagcaggccaattggcgctgggaaagtccaatcctgggcctctagctcctgagcgggacagggccgagagggcgctcccgagcttgggcctgctggtgggtgagacccaggagagagggagctagagagctctgaggactgatcttgactgtctgcccccagaccatcagcatawccgctacaacccgctgcaggatgagtgggtgctgdtgtyagctcaccgcatgaagckgcccwggyagkgtcaagtggagccccagcttmtgaagacagtgcycyrccmtgaccctctcaaccctctgtgtcctggggccatcygarccaacggagaggtaagcctgtagagccctgcatctgcaggctgggccacggggagtagttccctcttagaactgtcctccacccacagggatagtgaacctccttctgggtcatatcccaccaagctttttggtcccctagggtgggccttccctactcccttgtagcctgtccagtctttgaagcccaccaggtaactggtggtatggggcagtgagtgcttctagcctatccttgtcggtaggtgratccccagtacgatagcaccttcctgtttgacaacgacttcccagctctgcagcctgatgcccccagtccaggtaacctggctccaactgctgctggggaggagggtggctagacctcttgagggacttctgctgcagagagtgatactcctttacctcaggacccagtratcatccccttttccaagcaaagtctgctcgaggagyctggtaactatggatttcccctcttacaactttcaaaccagagttggagactcagcaytggggttcggccctgcccgtagcacagccaagccctacctctcgsttatcttttctcccgtcaccacccagtraggtcaygtrcttcyacccctggtcggatgtaacgctgccactcrwgtyggtccctgagatcbrggctsttgytgatgcakgrgcctcagtcacagaggagctgggtgccyagtaccctygggtgmaggtttgtgaggtcgccccttcccctggatgggcagggagggggtgatgaagctttggttctgnggagtaacatttctgtttccacagggtgtggtcaggagggagttgacttggtgtcttttggctaacaragctccrtatccctatctgatagatmtytgaaaacaaaggtgccatgatgggctgttctaaccccsamcccyactgccrggtaagggtgtcaggggctccagtgggtttcttggctgagtctgagccagcactgtggacatgggaacaggattaatggatgggacagaggaaatatgccaatgatgtggaggcttggaggtaaaggacctgcctgttcttctctgcttttgccccttgacaggtatgggccarcagtytccygccagatattgcccagcrtgagragysatctcagyaggcctvtaagastyagcatggagagcccctgytaatggagtacagccgccaggagcyactcaggaaggtgggagagagccaagccctgtgtccccaaggagtccctaactttcttatcccatgagagaggtgtgtaaaggagaaagctagaggtgaactagtagagagagacttgctaggaggccttagcaataatccagtaatctaaaggaaagatgatggtgacttagactcgggtggttagtggtagaggtggtgagaagacatcagatcctgggcacattcttttcttctgcttcccttgcctatttgctgaccacactccggctcctatgtcaccttgatgacttcctatccattctgtcttcctaggaayrtctggtcctaaccagtgagcactggttagtactgktccccttctgggcaacaygrccctvccagacactgctgctgcccygtyggcatgtgcggcggctacctgagctgacccctgctgagsgtgatggtcagtctcccaagtaggatcctggggctaggcactggatggaggttgctcccagtagggtcagcatctggaccccaggctgagagtcaggctctgattccagatstagcctccatcatgaagaagctcttgaccaagtatgacaacctctttgagacrtcctttccctactccatgggctgkcatggtgaggcttttcaagtacctatatttagccccaacaccatttctgggctcctggggctcakcctagtgaactgcaacctcaaaggagcaagccttgaaacagttgctgggggaagtggccagagtagagatgctgggactgagggtggagcagcaaacttggtgaaactacatctccaatgtgctttctaatctcctgccagctcttctcaagcaggggatcctgggagatgtagttttcagatacctggttgggtttgggagtaggtgctaacctggataactgtaaaagggctctctctccccactgtctctcttctttctgtcaggggctcccacaggawcaraggctggggccaactggraccaytrgcrkctgcasvctyattacbacyctcygytcctgcrctytgycactgtcbrgarattcwtggttggctacdaaatgcttgctcaggctcagagggacctcrcccctgagyaggtcaggactcagaacagtctggcgtctccagactctcacatgcagtatgtgcaggcacctgatacttctgttgcccttgtgctccagtcattgcacaaggcagaaaacagctctggcaggaagggactgccaaagttaggagccctagggcctggaaggagagtatggtcctcagatcccccttctctcctgcttcctccagggaacccaacagtcatgaccctgatagtttcccataacaacctgggcattccttgggactcaggagctgctaaactctttcatcccctggtggcttcagcagtccttatcaccagcctcacaatcccacaggcccacccccagtgggcctgtggcattcatatttcatattcatatttcaaaccacaatatccagcaaaatgtctcctgagcacccagaactccataccatcggccgggtgtggtggctcatgccttaatcccagcactttgggaggtcaagatgggaggattgcttgagcccagaagttcgagactagcctgggaaacataggaagscctcgtctctacaaaaaaaatttaaaaagttagccaggtatggtggcatatacttgtggtcccagatacttgggaggctgagataggatcacttgggcccaggagtttgaggctgcagtgagccatcatcatggcatcattgcattccagcctgggcaacagagcaagacctcgtctcaaaaaaaaaaaaaaaatgaagtccatgccaccattcttggcagcccagcccttatcctccttaattgctccctgtcccttttccaggctgcagagagactaagggcacttcctgaggttcattaccacctggggyagaaggacagggagacagcaaccatcgccygaccacgccgaccacagggccttgaatccttttttgttttcaacagtcttgctgaattaagcagaaagggccttgaatcctggcctggaatttgggcagatatagcattaataaaactgtgcatctcaaacttttatcacatactctaatatcagaggagtgtgaaccttcagagatctagggttaaaagctaaaggcatagctccagctacaacttttctttgtctacagatgtgtaaaatcttgatgcaaaaatctaccccaaatttctgaacaaaattaatattcagtattatatctagcctatagattctcttactcttggtgtaatgacagcattcccagtttaggaaactgttttaaaatcttgtgtcttggttgtggctgaggctttgggaaggccagagccccctttgccaccacccctagggtgtcagctccaagcctgggcctgagggtttgatggggagcgggtgagctggatcctgatcccagtggtcagtggccagatcctgggctgctggccagaaccctggctttgtgagtggctgcagcttggctctgctccagcccacaggggctaaaggggcgggtagggagtgtgtagggagcgtgtacgtggctttgtgtccttggctcctccagactctcacatgtgcgggcaccatatacttctgctgcccttgtgccccaatcattgcacaaacagaaacagctctgacagagaagggactgctagagttaggaaccctagggcctggaaggaaggtatggctctcagagtgacctggggtctattcagtcccctctggacctgtttccctggcaacgctgtgggaacaacagtctatgcaacacaggagacctgatgccactggtgtcctccaaattttaaggcgaaggcaggcattgtgaatgatgcagggatggccagaatggtttttgccttcgttctttccccaggggaaccaagcctgtgggtggggaaatcacactaaggctggacagtgactgaatctggcccaggagaaacttggctgcctgccttccagaccagggtttttcttccctgagatcctggaggggaagtacctggaacttgggagtgttgccctggtctggaagatctgatagacatagtatgcacacatttccctcgagcttcccatgactggggagtagatgagaaccctgagtgggtggctggtttcttgaggcatacatatacccgacacaccttacacctctgatttggctgcattttggaatcatctgggaagttttaaacaatactggtgcctaggtccaacctccagagactctgatttaattggtatggggtggggttttgcagttttcaaaccacaatatccagcaaagtttgagaaccactgccctacacagccctccttcttctttatcttatctggagtcaggggcaccttcagcttctccaatcacctggccagtggctcttgtttccagtcctgctgttccagggtggataggccttcaggcggagacccaggaatccagctccagactctgtcccaagcagcctcttcagtccgggacgggacaggaagtgtccggcggaggtgggggtggaggtgattggcagttggagtctccaatgggccaggagcccccctatttcactcctctccttccattggcgcctgggcggagccacccccgctgcgggggcccagggcgggagggagtagaggccggggcagagggcgagggcgagggcagagggcgctggcggcagcggccgcggaaggtgaggcctggtgtagacgccaaagtcttgtcaggagtgggcggggcagggtgatgtatgatctgaaaggccgggagtgactaacgactgtcagtgtgtgtgtgcctgtgaggctgtgtctgtgtgacagtatcattgtgtgcgattctgagtgtcacttggtgcagctgtcagctaatgtgactgcgtgtgtcagtgtgcatggagctggaggtgcatgtggctgtgcaagtgtgggattatgtgtgtatctgtcaatgcacatttttggtgggactgggttgtgtgtttgtgtgagagggactgtgaccacatgagggaatgtgttttgggaaggtctctgtggggtttgagaccatgtctgccagcgtgagagtgggtggctggctttgtgtgtgccaatgtgtgacttcagcagtagcagagcaaaagtgaggtttgtgactatgtgtgtgtcctgggtcctaacttaaaccgtgtgggagtacagctgtattcatgtattgggggacctacctcaagagcccatgggactgacctttctcttaagtgtccagcattgacagacacacccacaacacacgtggcttcccctccttcctctgctcaagaatccccagcatcaggtctactgctccttattttctgtttccctgcttggctcagtttcccttacgtgccgttttctgtccctattgctgtcttactagagatacctctgtgtgtttcttcacagctttgttcccctggtctctctgtgtgggtgcatttccagttttgcctttcctgcctctctgtctctctctgtgcccctatgcctgccttccctgctgatcttgatctctggctagttgggggcctgtaacagtgatgagatgcgggtctgccccggctaagagctccctgagagagggggcttagaccatgatgaagagttgcttttaggcggtgctgtgagccctggtaggggctgtgtgcgtgtgtgactgcgtgagtgtatgaatatgtgtaagtgtgtctgagtctgaggcggtgtggctgtgcccgtgtgactgtgagtgaccgcatgtgagagtgtatgagtctgagggtaactgtgggtcttgtgtatctggcaccaagggaccaaaggcatttcctggtgctggggcccaaagaatggagggggaggtgagaaatggctggaacttccaggggagggggaactggactctttggcctctccttatatcccccaacctggggcctcccttcccctggaagcacagccagctgtaccctaaggaaacatttggtgaggagtgaaaagagggggagtttgtatctgatttttcatttgattgtgtccacgtgtgttcaaaggcatgcccttttgttaactgtgcctcttgagtctgtgtgtgaatgtgactgtgtctggctgtgtgaaaacacagggcatctctcactgacagggacataagtattagccaccctcctttccctcttgctggccttggctgtgtctgtggcttcctttccagacttgggggaggcctcttcccttcccagggccttgggtgggagggaaggagggaggaggcaggagcagggagggggcctggctaggggcggcagagctccagggcttagagggggcggggcagggaaggggaaggaggggatggctctggggtcccagaactgagtggagtaggagacgggggctgtagctggtgagaggaagtcctagaggctatggacactctgctgctgggatcaccgaggtagggtggggctaagcagggtaagtgtggctgggtggccaggggtgagccaactggacacactcagacagacacacagacaggtggaggccctgctctgctctactcctactcctgaagggtccgtgctcttcctcttctggtcttgttcccagagccctttccccgcctgccccttcgttctccatccacttcaccactgccttcctccttctgctcccccttgtccagaatctctctctcctagcatcccccacctgccatatagacacactgttagctttttgagtttccgctgaccccaatccagtctttccaacacttcccacactgccccatcacctcctagtcctgatctctgagtatctcttggtgctgtggcccccatgcctgtccctgcaggctcccagttcctctcagcctctcatccccttccctcccctcccctccccgccaccctgtctccatttccatctgctggctcctcgcccacccccagcctctggcagcagccagggcatctggatctgcttaactacacagccccagcctgcaccctagccccatccagcttcacaaactggagaccaacgaagtgtcaagagccaggcccagctgagtggcccaagtagccagaccaaggagccaggttcaggcgagaagcctggcagccagggcaggggtgggcctcagggtgggagtgcaggatgggctcagatccatgatgacacccttcccccagggtgataaggtctgcctaggttaatcagaggcagtgataagccctggaccaggtgggggtaaataccagaattcccaacagctggactggaggggttaatgggagtggctgagctggtgccagtgcttggtgccaggggtgggcgccaagggcagtggagggggagttgctggcacagtctgttgcctccggcttttgttctgggccctaagcccaggactgagatggagggtgtgagggggtgtgtgtgtccgtgtgtgtgtgtgtgtgtgtgtgcgcgcgcacgcacatgcaaagcactgggtatacagtgggaaaggggacctcaggtcagttcccgcagtgatttctaacagccttaccccacttggtgcatcaatttttctcctaggaagcctcagttttggagaggaagagccaggctttagcctcccatctcaggggtcggggatttttgactctacctctccccacagatgagcagcagctgctcagggctgagcagggtcctggtggccgtggctacagccctggtgtctgcctcctccccctgcccccaggcctggggccccccaggtgagaagaaccctgctctacaacctcccaactctgacttgtgacttgccaccctcactgtggccccttcccatgcctaacttgtgacaccacccctgctcctgtcatccaacctgggtcctctctctaccctgttctctgacctctgtctccagattataacatgatgctttgatccagtgagccccccaccacccaggttttaacagtctgcttcttatctgtcattctcacaaagtggggaggggggtaaaggaagagccttacctcagaagtgccctccacaggggtccagtatgggcagccaggcaggtccgtgaagctgtgttgtcctggagtgactgccgggtaagtgccccacctgcctgttggtctgacactcatgaccctttcttgactctgcctagtcctcatgtcccgcccctcccatccttgcccgctctgtccgtaatcctcacctctctatctgtcctaaccgtctaactatccttattcaacagaaaattcaactggtatgttttgagcatctgccaagtgccaggtctattctaggctctgggatacagcagtgctaatgccaggcaaggtgcctgccttcaaagagcttacatcttagtggggaagacaataagcaaaggagaatcttgccagatagtaatacctgcagggcagaaaaaccaaagtgagggatgtcgaagaggacaactgagtggttactttttttttttttttttccgagagtctcactctgttgcccaggctggagtgcagtggtgcaatctgggctcactgcaacctctgcctcctgggttcaagcaattctcctgcctcagcctcccaagtagctgggattacaggtatgcgccaccaggcccggctaatttttttttgtatttttagtagagacggggttttaccatgttggtcaggctttgaactcctgacttcaagtaatccacccacctcagcctcccaaagtgctagattacaggcgtgagccaccgtgcctggcccgtggttaccttttaattggtagttaggaaaggtctctctgaggagatggtgttgaagctgatttctgaaggtcaggaaggaggcagccatgcacacattaaggtataagcgctcgtgacagagggagcagctagtgcaaaatgtcctgaggtgggaatgagctcaatacccccgaggaatagaaagaagaccaatgtagctggagttttcagtgggtgagggggagagagataggagctgaagaaggaaaggaag

SEQ ID NO: 94848 - DNA, 27289 bp, Homo sapiens
  misc_feature (1)...(27289): n = A,T,C or G
cacttttccaagttgccttggggaatgttgatacaagcattttttatttttatatgtggtttttatttttattttttattttcttggagatggattcttactctgttgcctaggctggaatgcagtagtgcaatcttggctcactgcaactcccgcctcccaggttcaagctatcctcctccctcagcctcccgagtagctgggaccacaggtgtgcaccaccatgcctggctaatttttgtagttttagtggagacaggtttttgccatgttggccaggctggtctctaactcctgacctcaggtgatccacactcctcggcctcccaaagtgtgggattacatgtgtgagccactgcacctggccactttattttaacttaatttaattttattttttttgagatggtgtctccactgtcgcccaggctggagtgcagtggcgcaatctcggctcactgcaacctctgcctcccagttcaagaaattctcctgcctcagcctcccgagtagctgggactacaggcacctgccaccacatccagctaatttttttgtatttttagtagagatggggtttcaccatgttggccaggctggtcttgaactctgacctcgtgatttgcccgcctcggcctcccaaagtgctgggattataggcgtgagccaccgcgcccggcctatttttattttttgagaccggatcttgctctgttacctaggctggagttcagtggcacgatcacagctcattgcagccttgacctcttgggctcaagggatcatcctgccttggcctcccaaagtgctggaattacaggtatgaaccatcatgcccagccacaagcaagtttttaaaggcaaaagaggacaaggagtgggctgacacaaaattgtttaacaggaattctcattggcttacagaaacaacattgattagtgattggctataccttgttgaactatagggtatgagttatggtgtctagactatggcattttatggctatgtggtatcaatttagagcccacatagcaagtggcttcaaggggtaattatttggctccatgggggtgggggaaggtgagatatgactgctgttacatgctgtcacttttttttttttttttttttgagactgagtcatactctgtcgcccaggctggagtgcagtggcgcaatctcggctcactgcaacctccgcctcccgggttgaagcgattctcctgcctccgccacccaagtagctggaattacaggcacctgccactatgctcagctttttgtatttttagtagtgacagggtttcaccataatggccaggctggtctcaaactcctgacctcaagtgatcccgcccgccttggtttcccagtgtgctgggattacaagtgtgagccactgcacccggcctttttttttctttttaaaattattattattattattattattattttgagacggagtctcttgcactgtcgccggggctggagtgcagtggcatgatcctggctcactgcaacctctgcctcccaggttcaagcaattctcctgcctcagcctcctgagtagctgggattacaggcgcccgccaccatgcccaactaattttttgtatttttagtagagacagggtttcaccatgttggccaggctggtctcgaactcctgacctcgtgattcgcccaccttggcctcccaaattgctgggattacaggcgtgagccaccgcgccaggcccatgctgtcacattttaatgcctctctgggcctgataattaaaagaggctggcatttctcagataaaaagtttcttttctttctcaagagtgatggaatgggccaggcacggtggctcacacctgtaatcccagcactttgggaggccgaggtaggggaatcacctgaggttgccagttcaagatccagcctgaccaacatggagaaaccccatctcttctaaaaatacaaaattagccaggcgtggtggcgcatacctgtaatcccagctactcgggaggctgaggcaggagaatcgcttgaacctgggaggcggaggttatggtgagctgagagcacgccattgcactccagtttgggcaatgagagcgaaactccatctaaaaaaattaaaaaaagagtgatggaatgaagggttaacacagtgaaatataatggtgagattcaatgagatgatgggaaatgatcattagacttctcagtaggggcatgtggcagagacaatgctatacattcacaaatccatttccttttgctcttggacagctagattacattccacagtctactctggatcatgtgattgcattctggccaatgaaatatagatagaaatgatgtatgacatttctagggctggctcctaaagtctcctctgaaattcttttttttttttttctctttctctttttaagagacaggattgtgctatgtcactcccagactggtatcaaactcttgggctcaagtgatctcccaccctggcttcccaagagctgggggactacaggcacatagtactatgcccagcttgaagttctttacattttctttcttcccatgtctattactgtagttatagaggatctctagtggagtattctgagaccctaggacatggcatagctactagatggatggcacctggatccctaaatactgcttggaacagagctccctgttacccccagaattgactgtagtgctaagccattgagttttgggagtgtttgttacagcaattaagattacttaccctgacaaatatagggcaaaagatgtgttacaatataccatgcagctaagagtagagaccagaaagatggcctctgtttttaagaaacttggcaggccgggcacggtggctcacgcctgtaatcccaatactttgggaggcagaggcaggcggatcacctgaggtcaggaatttgagaccagcctggccaacgtggtgaaaccctgtctctactacaaatacaaaaattagctgggtgtggtggtgcatgcctgtaatcccagctacaggggaggctgaggcaggagaatcacttgaatcaggaggcggatgttgcagtgagcctagattgcaccactgtactccagcctgggcgacagagcgagactccatctaaaaaaaaaaaaaaaaaaaaaaaaaaagaaacttggcagagaaattaaggataaagaaaggattatctagaggagaatacaggattgagggaacatgtttttgtattggttctggcttctgtggcattcccgactcgacaattcactaagaaccctgggcagcagggattagcccccaaatttggtctctgctccccattccaggaacagctttctgggatcatctgggcctacacctcccctatctggtctttcagaaagcttttccaggcctttccaggtgtggtgacttatgtctgtaatcccagcactttgggaaggccgagatggacagattacctgaggtcaggcgttcaagaccagcctggccaacatggtgaaactctgtctctaaaaaatacaaaaattagctagtcatgatggtgggtgcctgtaattccagctactcgggaggctgaggcaggagaatcacttgaacctgggaggcagaggttgcggtgagccgagatcaagccactgcactccagcctgggcaacagagtgaaactccgtcttaaaaaaaaaaaaattatatatatatatatataaataaatatatataaatggataaccagcagccctcaggggtgctctgtctatggagtggccatttttttattccttcactttcctgataaacttgctttcacttcacactatggactcaccttgaattctttcttgtgtgagatccaagaatcctctcttggggtctggattgggatctctttactgtaacaacacctctgggatctggcagggagggagctggttaggcccatcttagtcattctcctcttcctccaaaaaatgaccttggggagtcatagaggagaattatggagatgttcctgaagagatgttcctgatgggggtcaggatttaattagcatgattcagggggcggcactgaagcactggtgttcttgggaaaatggagctgtctacaagctctagtcactcaaacaaatataaatgagagaatggaaaagcagatctcctgttcctgtctcacctctttgggtaatatgaacagccagtgggacaggtaaaacccctgtttctcagtcctcagctccctgccccctacctctgaaggtagcctcttcctattccagtctgaggaccctagggcagagatcaagtaaatgacccatgacctagtttttgcagctcaattgcaaaacacctggcttggcttggtcttgattgggggaagggatgtccctgctatggctcaacttctaactcactgggtctctgtcctgcattccactgaagcctcagaggcatctcacagcactgggaaaagccttggaaacttgcattcaaatctcagcttggccactaattctctgggtgaccttgagtcctctgggctccaatgtgaaatggggaagaggtttagacaatatttagatggctctttaaaagtactgggggccagctgtttgggaggctgaggcaggaggatcacttgaagtcaggagttcaagaccagcctggccaacatgtgaaaccccgtctctactaaaaatacataaattagcccagtgtggtggcacacagctctaattccagctacttggaggctgaggcaggagaatcgcttgaacctgggaggtggaggttgcagtgagccaagatcacgccactgcactccagcctgggtggcagagtgagactctctctcaaacaaacaaacaaaagtaccaggggaggaattaatttgaattttatcctagtgttagccaattggtcccatccaaggaaaatttagaaaagggaaggggatgtgtaaaggaaacactaggccccacctagatggtggctggagcttctgatagtcctgtactctccacatttttagactttcttgtacttttttttttttttttgtgacggagtctgctctgtcgccaggctagagtgcatgggcacaatctcggctcactgcaacctctgcctcctgggttcaagtgattctcctgcctcagcctcccaagtaggtgggactacaggtgcacgccaccaagaccagctaattttttttttttttttttttactagagacggggtttcaccatgttggccaggatggtctcaatttcttgaccttgtgatccgcctgccttggtctcccaaagtgttgggattacaggcgtgagccaccgagcccggccatttttagatttttttttatagcccttttacccctcccacttcttgtgctgtcttggtgtgtgtatgaaaaagagagagagagagagaggaaggagagcaagagtgagagaaaaagagaatatggttacttagccctttttcccaaatctgtttttgcttttggggataggatatggttatggtgaagtactccacacagaccccaccaagtttgcctctcctgcgctacagccactgagcaggtgactgaggcgctgttgatccagggtcatatccttactcgccctagaatgtaagctcaggcagggcagaggccatgcctgacatgtgcatcccaatgctttacacagcctaggtgcctagcacatgctagatgcttggtaaatatttgctgaatgaaagatcaaatgaatgattgcagcaagcaagtcctgtaggcatcctggagcccaaggattctgcagtaggcagctttcacagaggttcttccagtgtagtggctctagctctgggtgaagtaggatcatcaatgtcggcccccagggttcacagctgttctgagccccgcccccaggtggcagggcagcccagtcagtcagtcacgtgctggcggctggccaatcatcgggggcggcgcggggaggggtggtgtggacggagaaagtgaaaggtgaggcacggccctgcagattttccagcggatcccccggtggcctcatgtcgcgcagtggaaccgatcctcascaacgccagcaggcgtcagaggcggacgccgcagcagcarccttccgggcaaacdgtaactgcaccgcggcagggactcgctggggcgcggagccgagccctccccttccttaggaagctttcgtcccctccgaaggttggaacgctcatcccgagccagaccgacaaggcgtacagtctgcaggcctstacgagcagcaggccaattggcgctgggaaagtccaatcctgggcctctagctcctgagcgggacagggccgagagggcgctcccgagcttgggcctgctggtgggtgagacccaggagagagggagctagagagctctgaggactgatcttgactgtctgcccccagaccatcagcatawccgctacaacccgctgcaggatgagtgggtgctgdtgtyagctcaccgcatgaagckgcccwggyagkgtcaagtggagccccagcttmtgaagacagtgcycyrccmtgaccctctcaaccctctgtgtcctggggccatcygarccaacggagaggtaagcctgtagagccctgcatctgcaggctgggccacggggagtagttccctcttagaactgtcctccacccacagggatagtgaacctccttctgggtcatatcccaccaagctttttggtcccctagggtgggccttccctactcccttgtagcctgtccagtctttgaagcccaccaggtaactggtggtatggggcagtgagtgcttctagcctatccttgtcggtaggtgratccccagtacgatagcaccttcctgtttgacaacgacttcccagctctgcagcctgatgcccccagtccaggtaacctggctccaactgctgctggggaggagggtggctagacctcttgagggacttctgctgcagagagtgatactcctttacctcaggacccagtratcatccccttttccaagcaaagtctgctcgaggagyctggtaactatggatttcccctcttacaactttcaaaccagagttggagactcagcaytggggttcggccctgcccgtagcacagccaagccctacctctcgsttatcttttctcccgtcaccacccagtraggtcaygtrcttcyacccctggtcggatgtaacgctgccactcrwgtyggtccctgagatcbrggctsttgytgatgcakgrgcctcagtcacagaggagctgggtgccyagtaccctygggtgmaggtttgtgaggtcgccccttcccctggatgggcagggagggggtgatgaagctttggttctgnggagtaacatttctgtttccacagggtgtggtcaggagggagttgacttggtgtcttttggctaacaragctccrtatccctatctgatagatmtytgaaaacaaaggtgccatgatgggctgttctaaccccsamcccyactgccrggtaagggtgtcaggggctccagtgggtttcttggctgagtctgagccagcactgtggacatgggaacaggattaatggatgggacagaggaaatatgccaatgatgtggaggcttggaggtaaaggacctgcctgttcttctctgcttttgccccttgacaggtatgggccarcagtytccygccagatattgcccagcrtgagragysatctcagyaggcctvtaagastyagcatggagagcccctgytaatggagtacagccgccaggagcyactcaggaaggtgggagagagccaagccctgtgtccccaaggagtccctaactttcttatcccatgagagaggtgtgtaaaggagaaagctagaggtgaactagtagagagagacttgctaggaggccttagcaataatccagtaatctaaaggaaagatgatggtgacttagactcgggtggttagtggtagaggtggtgagaagacatcagatcctgggcacattcttttcttctgcttcccttgcctatttgctgaccacactccggctcctatgtcaccttgatgacttcctatccattctgtcttcctaggaayrtctggtcctaaccagtgagcactggttagtactgktccccttctgggcaacaygrccctvccagacactgctgctgcccygtyggcatgtgcggcggctacctgagctgacccctgctgagsgtgatggtcagtctcccaagtaggatcctggggctaggcactggatggaggttgctcccagtagggtcagcatctggaccccaggctgagagtcaggctctgattccagatstagcctccatcatgaagaagctcttgaccaagtatgacaacctctttgagacrtcctttccctactccatgggctgkcatggtgaggcttttcaagtacctatatttagccccaacaccatttctgggctcctggggctcakcctagtgaactgcaacctcaaaggagcaagccttgaaacagttgctgggggaagtggccagagtagagatgctgggactgagggtggagcagcaaacttggtgaaactacatctccaatgtgctttctaatctcctgccagctcttctcaagcaggggatcctgggagatgtagttttcagatacctggttgggtttgggagtaggtgctaacctggataactgtaaaagggctctctctccccactgtctctcttctttctgtcaggggctcccacaggawcaraggctggggccaactggraccaytrgcrkctgcasvctyattacbacyctcygytcctgcrctytgycactgtcbrgarattcwtggttggctacdaaatgcttgctcaggctcagagggacctcrcccctgagyaggtcaggactcagaacagtctggcgtctccagactctcacatgcagtatgtgcaggcacctgatacttctgttgcccttgtgctccagtcattgcacaaggcagaaaacagctctggcaggaagggactgccaaagttaggagccctagggcctggaaggagagtatggtcctcagatcccccttctctcctgcttcctccagggaacccaacagtcatgaccctgatagtttcccataacaacctgggcattccttgggactcaggagctgctaaactctttcatcccctggtggcttcagcagtccttatcaccagcctcacaatcccacaggcccacccccagtgggcctgtggcattcatatttcatattcatatttcaaaccacaatatccagcaaaatgtctcctgagcacccagaactccataccatcggccgggtgtggtggctcatgccttaatcccagcactttgggaggtcaagatgggaggattgcttgagcccagaagttcgagactagcctgggaaacataggaagscctcgtctctacaaaaaaaatttaaaaagttagccaggtatggtggcatatacttgtggtcccagatacttgggaggctgagataggatcacttgggcccaggagtttgaggctgcagtgagccatcatcatggcatcattgcattccagcctgggcaacagagcaagacctcgtctcaaaaaaaaaaaaaaaatgaagtccatgccaccattcttggcagcccagcccttatcctccttaattgctccctgtcccttttccaggctgcagagagactaagggcacttcctgaggttcattaccacctggggyagaaggacagggagacagcaaccatcgccygaccacgccgaccacagggccttgaatccttttttgttttcaacagtcttgctgaattaagcagaaagggccttgaatcctggcctggaatttgggcagatatagcattaataaaactgtgcatctcaaacttttatcacatactctaatatcagaggagtgtgaaccttcagagatctagggttaaaagctaaaggcatagctccagctacaacttttctttgtctacagatgtgtaaaatcttgatgcaaaaatctaccccaaatttctgaacaaaattaatattcagtattatatctagcctatagattctcttactcttggtgtaatgacagcattcccagtttaggaaactgttttaaaatcttgtgtcttggttgtggctgaggctttgggaaggccagagccccctttgccaccacccctagggtgtcagctccaagcctgggcctgagggtttgatggggagcgggtgagctggatcctgatcccagtggtcagtggccagatcctgggctgctggccagaaccctggctttgtgagtggctgcagcttggctctgctccagcccacaggggctaaaggggcgggtagggagtgtgtagggagygtgtacgtggctttgtgtccttggctcctccagactctcacatgtgcgggcaccatatacttctgctgcccttgtgccccaatcattgcacaaacagaaacagctctgacagagaagggactgctagagttaggaaccctagggcctggaaggaaggtatggctctcagagtgacctggggtctattcagtcccctctggacctgtttccctggcaacgctgtgggaacaacagtctatgcaacacaggagacctgatgccactggtgtcctccaaattttaaggcgaaggcaggcattgtgaatgatgcagggatggccagaatggtttttgccttcgttctttccccaggggaaccaagcctgtgggtggggaaatcacactaaggctggacagtgactgaatctggcccaggagaaacttggctgcctgccttccagaccagggtttttcttccctgagatcctggaggggaagtacctggaacttgggagtgttgccctggtctggaagatctgatagacatagtatgcacacatttccctcgagcttcccatgactggggagtagatgagaaccctgagtgggtggctggtttcttgaggcatacatatacccgacacaccttacacctctgatttggctgcattttggaatcatctgggaagttttaaacaatactggtgcctaggtccaacctccagagactctgatttaattggtatggggtggggttttgcagttttcaaaccacaatatccagcaaagtttgagaaccactgccctacacagccctccttcttctttatcttatctggagtcaggggcaccttcagcttctccaatcacctggccagtggctcttgtttccagtcctgctgttccagggtggataggccttcaggcggagacccaggaatccagctccagactctgtcccaagcagcctcttcagtccgggacgggacaggaagtgtccggcggaggtgggggtggaggtgattggcagttggagtctccaatgggccaggagcccccctatttcactcctctccttccattggcgcctgggcggagccacccccgctgcgggggcccagggcgggagggagtagaggccggggcagagggcgagggcgagggcagagggcgctggcggcagcggccgcggaaggtgaggcctggtgtagacgccaaagtcttgtcaggagtgggcggggcagggtgatgtatgatctgaaaggccgggagtgactaacgactgtcagtgtgtrtgtgcctgtgaggctgtgtctgtgtgacagtatcattgtgtgcgattctgagtgtcacttggtgcagctgtcagctaatgtgactgcgtgtgtcagtgtgcatggagctggaggtgcatgtggctgtgcaagtgtgggattatgtgtgtatctgtcaatgcacatttttggtgggaytgggttgtgtgtttgtgtgagagggactgtgaccacatgagggaatgtgttttgggaaggtctctgtggggtttgagaccatgtctgccakcgtgagagtgggtggctggctttgtgtgtgccaatgtgtgacttcagcagtagcagagcaaaagtgaggtttgtgactatgtgtgtgtcctgggtcctaacttaaaccgtgtgggagtacagctgtattcatgtattgggggacctacctcaagagcccatgggactgacctttctcttaagtgtccagcattgacagacacacccacaacacacgtggcttcccctccttcctctgctcaagaatccccagcatcaggtctactgctccttattttctgtttccctgcttggctcagtttcccttacgtgccgttttctgtccctattgctgtcttactagagatacctctgtgtgtttcttcacagctttgttcccctggtctctctgtgtgggtgcatttccagttttgcctttcctkyctctctgtctctctctgtgcccctatgcctgccttccctgctgatcttgatctctggctagttgggggcctgtaacagtgatgagatgygggtctgccccggctaagagctccctgagagagggggcttagaccatgatgaagagttgcttttaggcggtgctgtgagccctggtaggggctgtgtgcgtgtgtgactgcgtgagtgtatgaatatgtgtaagtgtgtctgagtctgaggyggtgtggctgtgcccgtgtgactgtgagtgacygcatgtgagagtgtatgagtctgagggtaactgtgggtcttgtgtatctggcaccaagggaccaaaggcatttcctggtgctggggcccaaagaatggagggggaggtgagaaatggctggaacttccaggggagggggaactggactctttggcctctccttatatcccccaacctggggcctcccttcccctggaagcacagccagctgtaccctaaggaaacatttggtgaggagtgraaagagggggagtttgtatctgatttttcatttgattgtgtccacgtgtgttcaaaggcatgcccttttgttaactgtgcctcttgagtctgtgtgtgaatgtgactgtgtctggctgtgtgaaaacacagggcatctctcactgacagggacataagtattagccaccctcctttccctcttgctggccttggctgtgtctgtggcttcctttccagacttgggggaggcctcttcccttcccagggccttgggtgggagggaaggagggaggaggcaggagcagggagggggcctggctaggggcggcagagctccagggcttagagggggyggggcagggaaggggaaggaggggatggctctggggtcccagaactgagtggagtaggagacgggggctgtagctggtgagaggaagtcctagaggctatggacactctgctgctgggatcaccgaggtagggtggggctaagcagggtaagtgtggctgggtggccaggggtgagccaactggacacactcagacagacacacagacaggtggaggccctgctctgctctactcctactcctgaagggtccgtgctcttcctcttctggtcktgttcccagagccctttccccgcctgccccttcgttctccatccacttcaccactgccttcctccttctgctcccccttgtccagaatctctctctcctagcatcccccacctgccatatagacacactgttagctttttgagtttccgctgaccccaatccagtctttccaacacttcccacactgccccatcacctcctagtcctgatctctgagtatctcttggtgctgtggcccccatgcctgtccctgcaggctcccagttcctctcagcctctcatccccttccctcccctcccctcccygccaccctgtctccatttccatctgctggctcctsgcccacccccagcctctggcagcagccagggcatctggatctgcttaactacacagccccagcctgcaccctagccccatccagcttcacaaactggagaccaacsaagtgtcaagagccaggcccagctgagtggcccaagtagccagaccaaggagccaggttcaggcgagaagcctggcagccagggcaggggtgggcctcagggtgggagtgcaggatgggctcagatccatgatgacacccttcccccagggtgataaggtctgcctaggttaatcagaggcagtgataagccctggaccaggtgggggtaaataccagaattcccaacagctggactggaggggttaatgggagtggctgagctggtgccagtgcttggtsccaggggtgggcsccaagggcagtggagggggagttgctggcacagtctgttgcctccggcttttgttctgggccctaagcccaggactgagatggagggtgtgagggggtgtgtgtgtccgtgtgtgtgtgtgtgtgtgtgtgcgcgcgcacgcacatgcaaagcactgggtatacagtgggaaaggggacctcaggtcagttcccgcagtgatttctaacagccttaccccacttggtgcatcaatttttctcctaggaagcctcagttttggagaggaagagccaggctttagcctcccatctcaggggtsggggatttttgactctacctctccccacagatgagcagcagctgctcagggctgagcagggtcctggtggccgtggctacagccctggtgtctgcctcctcyccctgcccccaggcctggggccccccaggtgagaagaaccctgctctacaacctcccaactctgacttgtgacttgccaccctcactgtggccccttcccatgcctaacttgtgacaccacccctgctcctgtcatccaacctgggtccyctctctaccctgttctctgacctctgtctccagattataacatgatgctttgatccagtgagscccccaccacccaggttttaacagtctgcttcttatctgtcattctcacaaagkggggaggggggtaaaggaagagccttacctcagaagtgccctccacaggggtccagtatgggcagccaggsaggtccgtgaagctgtgttgtcctggagtgactgccgggtaagtgccccacctgcctgttggtctgacactcatgaccctttcttgactctgcctagtcctcatgtccckcccctcccatcyttgcccgctctgtccgtaatcctcacctctctatctgtcctaaccgtctaactatccttattcaacagaaaattcaactggtatgttttgagcatctgccaagtgccaggtctattctaggctctgggatacagcagtgctaatgccaggcaaggtgcctgccttcaaagagcttacatcttagtggggaagacaataagcaaaggagaatcttgccagatagtaatacctgcagggcagaaaaaccaaagtgagggatgtcgaagaggacaactgagtggttactttttttttttttttttccgagagtctcactctgttgcccaggctggagtgcagtggtgcaatctgggctcactgcaacctctgcctcctgggttcaagcaattctcctgcctcagcctcccaagtagctgggattacaggtatgcgccaccaggcccggctaatttttttttgtatttttagtagagacggggttttaccatgttggtcaggctttgaactcctgacttcaagtaatccacccacctcagcctcccaaagtgctagattacaggcgtgagccaccgtgcctggcccgtggttaccttttaattggtagttaggaaaggtctctctgaggagatggtgttgaagctgatttctgaaggtcaggaaggaggcagccatgcacacattaaggtataagcgctcgtgacagagggagcagctagtgcaaaatgtcctgaggtgggaatgagctcaatacccccgaggaatagaaagaagaccaatgtagctggagttttcagtgggtgagggggagagagataggagctgaagaaggaaaggaaggcaaggsctggctcacaaggggctttgaaagccagtaaaaggaatttgggttctattgcaaatgcasttagaagccaatggagagctgtggcatggtctgacttatgcttgacatcttgtctttgtccattgtcacctcatctcmcttccagggacccagtgtcctggtttcgggatggggagmcaaagctgctccagggacctgactctgggctagggcatgaactggtcctggcccaggcagacagcactgatgagggcacctacatctgccagaccctggatggtgcacttgggggcacagtgaccctgcagctgggctgtgagttggggagggtggcactgatgacacatagggatcctgagggagtatgggacctaagtaagccctctgggaccaggaggacctgaggactgctcagtctccaggtgtaccctctgcctctagaccctccagcccgccctgttgtctcctgccaagcagccgactatgagaacttctcttgcacttggagtcccagccagatcagcggtttacccacccgctacctcacctcctacaggtgtgtgtgtgattgggtgtggatgcctacacatttgggtatgctggtgcaatgtgggtgtgggaggcagggaggtaggttctgaggaaagcctcagagagggcagaaggccctcttttccttcctgacttcagatggccccctccccaccaggaagaagacagtcctaggagctgatagccagaggtaggacgtgagggagcatgtgggggctccagctgggtcccacagtaggcattttcaragccraagaccacatcctcccttctaggaggagtccatccacagggccctggccatgcccacaggatcccctaggggctgcccgctgtgttgtccacggggctgagttctggagccagtaccggattaatgtgactgaggtgaacccactgggtgccagcacacgcctgctggatgtgagcttgcagagcatctgtgagtacccaccccagacctcccccagacccccatcacagagaccccaaatggactcagatctctccactcccagagytcccagtttcctcccaacctagactccatttcacacagagaaggccctgtggagcctgagaaggcaaagggatcagagcccaggaggcatggttatttcagcacacactctagaggctgctgctgctacccacactgcctgattggctgcctagcctcagagcaggccctgtaccgaatgcagccatatgtcatgtcctcccttgctggcccctccttccttgacctgtgcatgggagtgggacactaaaactctagctggaatttgggccaattcatcttccttggatgaaaataggaattgctcttttattcactcaagaagcacttsaaaagtccacccgcagatctcaggtggtttctttttttctttctcttcctttttttgttgagatagggtctcactttgtgsccaggctggatgaagttcagtggtgtgatcttggctcactgaagcctgcaactcctgggctcaagctatcccctcacctcagcctcccaagtagctgggattacaggcatgtgccaccatgtctggttaatttttaaaattttttgtagagacagggttttgctacgttgcccacgctggtctcaaactcgtggcatcaagtgatcctcccgcctcagtcttccagagtgctgagattacaggcatgagccaccacacgcggcctcagcccatttcataatacagatgaccggtctgagtctaatggatgatcaagtttaagatttcccctcccctctcaggagtgwctggctaaggctcctttaaacacacactttgggaagtggtggggaagtgatgragacccatagcctaccctgactttgtgtcttgatgcccttagtgcgccctgacccaccccagggcctgcgggtagagtcagtaccaggttacccccgacgcctgcgagccagctggacataccctgcctcctggccgtgccagccccacttcctgctcaagttccgtttgcagtaccgtccggcgcagcatccagcctggtccacggtgaggcctggagtgcgtcccaacccacggctgtgggtcctgtctctgatttcacgatcctgggtgttctgtatagctttccagtgctggcaggtcactgaagacccaacacttccctgtgggccaggctttgtactgggtgctgggttgcagtggtgactgagagactgaatgtctgtcctgtggggctataactatgaggtaaagcacatctgtgggaagatagcaatggcttttaaaaaaataactttttttttttgagagggagtctcgctctgtcacctaggctggagtgcagtggtgcaatctcggctaactgcaacctccacctcctgggttcaagcaattcttctgtctcagcctcccgagtagctgggactacaggtgcccgcygccatgcctggctaatttttgtatttttagtagagatggggtttcaccatattgcccaggctggtctcgaactcatgacctcacgatctgcccacctcggcctcccaaagtgctgggattacaggtgtgagccacggcgcccggcctaaaaataactcttaggaaaaggagtgcctttcacctagaggcacattctcctacaaacactcatatacccagctgaggatagcagtgaatttgtgtctcaggagatgttaaagattggctggtatcaggactagggagcagcagcatcagataataactaatatttacttagtgctgcctgcctgtggggtacctggctacactttttgcatacattgttttgtttaggtagattcacctctattttacaaatgaagaaactgagtcacagagaggcccaaagggtcattcaatatgtggttcaccaaagatttgaacccaggctgcctgatgccacagcctctctaagtaatcactactgccgtcttacaaacactaggtgtagactcagctccaccagacacccaacatgagacctagacagctccactaggctttaggatgagactgggagcaaggggtgctctttgtagatggtggctgggaaggccctgcacttacaagctgggtaacagtgagtcatgtttacccccaggtggagccagctggactggaggaggtgatcacagatgctgtggctgggctgccccatgctgtacgagtcagtgcccgggactttctagatgctggcacctggagcacctggagcccggaggcctggggaactccgagcactggtgagagacaaagccaaagaaaagggcagaggccccatcccaaagcatctatcagctgaaccagttccaaaagacaggcaggtggsacatgccctgcccacacaggcacggcaattgctgtcccagacttcagacttgtttgcctacagccctgtcttagcttaagtcctgccccttggcctccacccctgcagttacaggctccacttctacaagcttggagcttgccatgctccctaggagctggccatgccctatcaggctcctcctcctaggtaccttgacttccaacctaggccttggccttgagcacaggacgtgacccccrtccccaccagcgtatggacacttattgggtcttgccttcctttagggaccataccaaaggagataccagcatggggccagctacacacgcagccagaggtggagcctcaggtggacagccctgctcctccaaggccctccctccaaccacaccctcggctacttggtgagcttgggcagatgggcaagacttgtaaaggactgaaaaccccagagaaaaggggacaccgagcttggtcaggcttgctctcagtgacatgtggccctccccctcagatcacagggactctgtggagcaggtagctgtgctggygtctttgggaatcctttctttcctgggactggtggctggggccctggcactggggctctggtaagtgactgccattggtccctcagcctctgatcctcacacatgctctgatgcccatagaccacattcatctcyacccttcatgactgcccgctgaacctgtctgattctggaactacctccccatacctccatcccccatgccccacttgattttaactgattcctctcctgaccctttactaataaaccctttggcggagactgagataacccacattgttggagagacagctgcctttctatgccccaggctgaggctgagayggggtgggaaggatggatccccaaagcctgggttcttggcctcagtgattccagtggacaggcgtccaggtgagtaggacatccagaagatttggacttggagatgtttgcccctattttgagtgtccagattaagagctggctgccctagtcattttaaaacatgctgggaatccaagttgggtctcctcattttaatgatgtctaggctgagggctgggcctttcattcttgagtccctgggctcagarktgggtctctttccctcctctcagggtactgaggaaggaccccaggtggacttcccttcagggtattagtattagtactaatactcttccagggtattagactcagagctggatattcatccttttttttcaaggtgtcttggatcagtgctaggtcccctccttcattcttaatgtgcctgggcccagagctaggtccactcccgtatcttcagtgtgttgaagaggctccctyagagctgggctcctctactcatcttcagagtgttaagcttagaactgagtcacctccctcattctcagggtgtctgggccaagatccggtcttactgtctctcctgatttgcctcctgcttcttctaggagctccaaacctgtagaggacccaggagggcttcggcagattccacctataattctgtcttgctggtgtggatagaaaccaggcaggacagtagatccctatggttggatctcagctggaagttctgtttggagcccatttctgtgagaccctgtatttcaaatttgcagctgaaaggtgcttgtacctctgatttcaycccagagttggagttctgctcaaggaacgtgtgtaatgtgtacatctgtgtccatgtgtgaccatgtgtctgtgaggcagggaacatgtattctctgcatgcatgtatgtaggtgcctggggagtgtgtgtgggtccttggctcttggcctttccccttgcaggggttgtgcaggtgtgaataaagagaataaggaagttcttggagattatactcagaaattattatccaatgctgctttattatttggctattgggggcttcagcccattttccttagcatcccaaaattcagcttgggyagagtcccatggarctttctctcttggtgctcaaaccactgtgacaggctggggttctgggggtggaygcagatgctgcgttgagccaggtgaagcctgggtagagaaaggtccaaagctatgaccatagcttggggatgagattagggtcatccccaatgaccctaattaggggttaggagcaaggaccagatgaaaacctgagttggcaacagaattagcagttagggctggggttgggatcagcattaggggttgggactgaggtcagagtcaggggtatcaggggtgggagctcacacgaaagcctggaggtgacagtccccgtcagcctcctgcagttccacctggatgaccttcctcagtagcttgtctgagagtggctttcggtagagctgagtacagcaggcagtgctgggtggcagtaggaatgctaggggcaacagggccatgtgttcagagggatcctgaccaagaacctctctgccagacagctggaggttaggttggatttcctgggtcttttcaacttcatcccattcacccagacccccagctttctatacccccaagtactcacctgctgtagggtctgggctcaggagcaatgacagcagcaggaggctgcagaaggttgggggccccttcatgttgctcagcctagactcttccttctctctctctcctcctcccctaccttttatctgggtgccttttacctggggcactaggtgagtcagaggcagttggagatgtactgtgtaacctgtgacactcctgggccctaattctcggcctgttgccacagactccttcctcatctaggatagccatttcccatgtgctcctaagctctgggcagtgaagctgggggaaggattagtgtgtgatgtagggactgatggaacagtgagtaagggcagtcaagcatccacagcagcatctaatgatagacattcacactcaaatacgcatagccacacattcaaagtcactcctcaatcacttggtcaacctcacaaagtcatactcatgatcagacaaccgtagacaaaattatatagccccggttatactcaaagtccctctcccacccaattgtgttttcacagtcatccaatcacaagcaaattcacactagcacacacagattctgacaggggagttgtgggtggggtgggagcagagggcaggcaagcaccaacttgccttcaccttctcctccccacttcctggcttggcctgcctgtcttatcagaagaaatggatgggaatgggtccctagagcaggcccttctggctgaggagggttcttggctgaggccagccccattcagagaagctgggggaaggccctttatggtaatattaagggtgttttggagatgctgaggtggggcagctttccccaggatgatgagacagggaggaaaggtggggtagataaggagggaagataaaagctctttggtgctaggttactgttgtcaaaacaggtaaaaggcccagtgaatcttaccttcctgtttttgtctagtcctgttccaggaatgccaacctcttgccagcaggggcctagggtctccagatccagtccctgacttgttgaagacattggactcaagcactcaattacatctttgttttactcaaattccagcctccttcctgggcctggaggaacatcccctctccctacccgggttcagtcacaccctcatgtccaactgctataccccctgcatcccaccctccagctatagccgcttctctcctaatcccatacccagctgtcactccgttctttaccccctcccygcaatgcaaagctcctattcatctttatccagtcctttccaggaagctgggagctgcctagggtgggggtatgctgccaagttcagtgcccctggctcctttaagaatttcccactcctggtccagggatctcaatctgcaagtcctgctctatatttgaaacataaaccaagtcataacacagtaatccagcccttatcttgttgcagtcgtctgctgtagggtcagccactctctatggagtaggctttctcttgggatagggcttaggcctttctcttgtgtcccaaggcttgttgggtgtagccactgaggaaatcccaaggaaatctcccaggttcctcgggcttgtcatagaccttcttcatcacttggctgtgcgctacatactttctggtcttccctgggcttgtcggtccagaagtcttcggaaggcagaaaacaaatgcttttgggtgtgcacccatctctcccctttaagaccaagtcttctccccagccacaatctgctgtagctttggccccagccagaaactgggccatctctttctttaacttaatcttgtggtgccctttctggtgctgggtccagtccctaactgaaggcaggcccacatagcagtccctgattctcaccacttgaggagttagtgggtcccaggctgattgggtgacagaagggggcggcagagagcagtggcccttggactctcctagggagggagcaagaacttctaggtaggctgatgccaaggatctctaaacttgggatcagactggaggagccaaaagttggggtatgaactgtaggaaaggtcgccaacccaagtcgctcctctgtggcaggcagcttctaggaatctccccctcttatcatttacagcctgcatcctacacctctgcttaaaatgttttagatatactcccagcagagaagattcttcagacagctggcaaagtcctcgctccgaggaagggagtaacaggcaggattatttagttctcttcatataggcgactcacagtatgggtttttgggggttgggattgggggagacagccattgatagtaacaggaggcctgacactgatgaggggctttgacgtggaagggcacccttccagggagggacgccctgtcagtacggaacagagcccgtgtggggaggggcgctcggctcgaatggcgacagcggcggcagagtcaggaggtcagtacggtgggcttcggtttaaatctttaatgcactggctggctgggcagcggcggtggggctgcggcgggggaagccacgacccgagcgctggggagtaggacccaggccgctggacagacagctcatcaggcctcgcagaggctccagcttctgctccccggggtgcgccgagctgtggggcgacccgacactggcatgaggcggggcgggagctaccggattccccccgatgggtcctcagagactgagtcccgtccatgcccggggcgggtccgcggtatcgcagcctcctcacctccgctccctccgccacatgcgaagccaggggaaaaagtagaaacagccccagtagatcctgcagagagagggcagagccgggcggggcggggcggggcggggaggagctgaccctacagactccgccccgcggtgcctcgccgtcgaggaaggctccgccccgcctctaaaagcggctcccttcgcgcccacgcccctgggaggctcgccctgcccacccctcgcccccgcagaactccaccctcccccaccccggagccgcctggttcctcctccgcagaacccgcctccactcactcctcctccgcctccagcgccacctcgtatctcctcattcccgacatgtcctgggctccgaacgtctcctggggagcggcatgattgaatcagggattccctagccccaggtccccttctccgtcattctcaggacgaggckgcccagttctcaggtaatctgaggctgatgcccccgagaagcctcagttgccaccacgggacagggtgggcttggagatttgggaggcactggaagttaaggggtgaggaggccggtcatctccggggcctggggcatttagggggccagggcgagaggtttggcggtcatggggctgggagatttggggccctgggtgaggattttcaggggctggggtcacctggagggggggctgagaggggtcagcgcagcctaaactcccgccctccctggctccaccccggaaacggaccgttactattacgtcacagggatgccgttgcgcactaggtttgcctgtcccccggaaggggtggggtgttcatgtctcccagaggaggcggagtcgaaacgtcatcttacggggtgaggccaggggcggrgtcggttgattaagatgcgggcaaaggaccctcttttataggtgtcaggtcaggttttggagctacaccttggggggccgaggcttccgcagcaggcagcaagaaaagagagttgggactaagtccagtactgttttcttaatccccacgtctcctctacccctccctgggcttctgccctgccgagtgcctctcttgcctgccttcctccccttgtatgaccctgggccgaggaggaataggtcctcagatagagtccagtctagaaaaggccaggctacggaaatacctagttgagtggcctcggctaagtcactgaatggccggagggtcattgcccttcctctctggtctgagacctatcttcttgtgattttttttttttttttttgctacattcattcaatcaacaaatatttgctgaatgaccacctgtgtgtcaggcactgtgctgggcatggggatgtagtagtaaagaagacaggtggccgggcacggtggctcacgcctttaatcccagcactttgggaggccgaggtgggtggatcacgagttcaggagttcaagaccagcctggccaagatggtgaaaccccgtctctactaaaaatacaaaagttagccgggcgtggtggcaggcgcctgtaatcccagctactcgggaggctgaggcagagaattgcttgaaactgggaggcggaggttgctgtgagctgagatcgcaccactgcactccagcctgggtgacagagtgagactccgtctcaaacaaaacaaaacaaaacaaccaacaaacaagacaggcaccttgtctgccctctgagaggtaggggtagagctgggaggatcaaaagagaatagtgagattcttactataaatggagcaggctggctggaagaagtagaaggtgtcaagaaagggcaatcaacccagtgtgggaggttggaaatagctgccccagagctctgacatcccagtcaaggcccagtactgagctgtagtcggtttgagtaaggggaaagacagttttggggctgggctgactgtataggagggagtgaccagaaataagtggggtgaaagtttcctctggttgaaatgtgaggaatggatacccctcttctctccctcatcccaccctctttctccctctcattcttgtcttcccttgtctgagccacatagagagagcagacagagagatccatgggtgctaggtggttttattggaagcactgcagtctgggagttcagaagctatgctttcaccacgttcaccctttcactcacattcacactcatgttgacactccaggcctggctgggtcaggtctggtgccgaggaactagaggcctggtcttcccttctggtccttggttccccaggccagggctgtctctggcactgtcatgggctaactgctgtggctcttgctctgggaaaggaaggagaggaagggccatgggctgtaatcttagacagggctcagagggggcagacaggactggggagggccaggctttccttggcagaggtcttccgcagtctccagtttgtgcaatccatccagggctggtctagaggctgcctttcagtgtggtgaatctggagtcagagagaatggagccatagaactcatcttcctgaaaggccctggtgtgaggggcagatgctggggaccagatctgggaacctgttttaggggcttccttgtggga

SEQ ID NO: 94849 - DNA, 271760 bp, Homo sapiens
  misc_feature (1)...(271760): n = A,T,C or G
tctaatttttaggaacggtattgggaaaatataaagttataaacaagcaagtctttagaatacattaattatattcaatcttgcccatgggtctggatgtgggcagcctgagttatggactaccccttttcattaaagggtttctctactctactaaagtggcatgcccactaacctggtgattaaaataataaattattatagccatctcacagagtgatggagacccttaggctttatattctgatgaacatgaagcgctgttttcttaaatcacaaatttagcttcagaatctttattgtgcttcatacaatgtcgtgttcaatacatgttttttaaacattactttatatgcaaagacttttctctactgaaggtataaaagcaatcattatcttattttaatagcttaattcactgctgtatcccaataagtcctgtttgaataattgagtacgtgagctaggttgttcctaatgactttggagcacctctaaaaataccgaatggcatacactcagatattaggtaaatatttctttattaaatggttaattccataaataaaatcttttcactgaatataaaattaaaatcatttacaaattattccagtattacatttcccctccctccccaaaagctacattttgataaataaaacattcagtcttaaaacacctgatttctgtttgcagtttagagtgcagatagctrcctctcacagacactcatggagtgtcccccttcaggaagggatggaatgccctcccatttacttttgtcaaaggacgaataaaagctttaaactgtccaactaatcttawtatctcttttacgactgtagaaccccaaaaggaaaaaagcctagagaaaatatgcttagcaaataatttacaaacagaaaacagaaagtcatcaactccacaagctccaaaatgaagcagtaacatgtgctccaatactatgaagcaaagtattctccaatcgtggctgcattagtgtccatccgcaccagcacccttggcagtttcgaaataccttaatgctcctcaagaatgagcaaggcttcctttctacaatgagtcccatcacccacaccacccccgcccattttctccatgattctgattctgacactcttctcccttgtttgtctaggtgtgccctggaaacccaggtagcatttagtccctaaatttgtgaatgtcattgaacagcctgtagaagggaaacgctgcttcattggcatgcgggcagttgtagttgcatttgcaggactggatcatcatgacgttcttggaaaatgtctccccatcttcgcagcggaaccgcatcttcacagtcctggtcagctggggcgtgcagcatcggccgtccacgcaggaaccgcagtacttgggccggtatttcttcacactcaaacatccagcgtaagtaaacctgactggttcgggggatttcttggtcttgctgcatttcttgcccttctgtaagagaaaggagagaaggaaagttaggggtgatatttctctttcttcaaaaagatgttcacatcccacccacctgccaggcaacagtctacacgtccctgaaggaacttactttcaggctgctgtacactggctgtccacaaggccgcacctcacaaatccgggtttctttcacaaggcggcactcagggttgtcattggtaactcgtgtggagataccagttccacaggtctttgagcactgggaccatgaagttgtttgaacaatacatttctggccttgtaaagggttgtataggatgcgaggctccattccaaaaactagagacatataagagggaagacttctcagaggcataccgacacaaacaggctcaagcactcatttctacaaagatttagaccagaaatgcatctcagtacagtgtctgaagtgctcagtctccacttaccagggagccgcttcagtgagctgccttttccaactgcaatcaattcattgtttctcgtcaactccacctcggaggcatcgaatcccagctccttrccaaggaggccgtcctggtcctccatggggtccttgatactatcctcgtcacagacccactcctcgcagcactgcccggtaactttgaccagccgagggttgggacagcccaagttggggagagatagttcttggggacacagaggaatgcagcccacggcgccatcaatacatgtgcactgatgtttacagttgggctggaaactttccccgttttggtwgattctggagttatattcacagggtctgccctctgactgagctgcaaagatcaccaaaasagaaaggtagaaggggataaagttaagattccaaaccaccgcctgaaactcatacatattttctgctgttaaattcaatttatggtaaagttccctacaattccccggagactccagaccagaacaataagttagtcaggaatcacttttccgtatgcgctttcgttgggcccagacacactgaattgcattccagactgctgaaatcatgtgcctttctgccaagctaccaacaacaaagcatcaccatacatggtctcagaattactaaacttctggactatggggactagtattttttttaaaggggccaaaccacaagcatcttacctctgcagatccccttcagagcggtggagctggcgccgaagttgcattccagccccttggtgtggtcgcagggctgcgttttgctgcagtcctcgttgagctgcttggcgcagaccttacagcagccgcagccgtcccggaccagcccgactcccggcgcgcacttgggcgcctccagggggcagtggcaggcagcggggcaggtggagagcgcctggaagggggagaagatacgcgtgagactcggcgcggtgcgcaggaggggcgccgcggctgccgcagtgagggacgggggtctccgaccctatcgacggggagcctctgatctcgtccagcccggccacctcggaaggctgctcccaccaagaggtcccgacacgtcttcggggggagggggagagtgcttaaagaaacggctacccgcaaacgatcgcgaactttttaacttttcctgccgtgggcaatctgggaccaggggaaggggctggagagcggacggggaataggtggcaaaaggagagtccaactcaccagcctggtcaagtggagaagggtgacgactaaggcgagcgccctggcgatgcgggagctcattgtggcgcgcaggagtagcccggggcgagcgcggcgacgaagacgccaacaagctggtgtgcagcggacaggccgtgcgcagcggggtcggggtggcggcgcggtgkgcccggtgggcagggaggcgagggctgggcggcgggcgggcgtctttcgctcgaggtcccggcggagaaggcgcggagggcgcgggcgctgctcgggggcgctctcgctcgcggtctgcccaggcgccccggagcccgccttttatacgggccggcggaggcgccgcgtgttgcagtgacgtcggctctgtctgcgcgttccagaattctcaaacatctcaggaatgctggttggcgcgggctgctgccaagcgcctcccctggctccattgcacctttgtgtgtgtgtgtgtgtgtgtgtgtgtgtgtgtgtgtgtgtgtgtgtgtgtgtgtctgtgtgtgtgtctgtctcccagacccgtcaagaaaacagttcggggggtgtgtgtgtgtgtgtgtgtgtgtgtgtgtgtgtcccagacccgtcaagaaaacagttcgttttttccaccttaaattacgacttatgttgggaagggttctttggggcgtgatggtggtgatggtagttggagggtcgtgaggggcgaggggggccagttcagaactttgcctggactgggtgggtgggaggacctgagagggaggaacaaaagtcgttttgtttggtgatgcgagttgaccgggcagccactgaagccctcacccgggaaggcagtgagctgtttgcttktttacagcgaaggtgagaggcaagttatctgttgaaagagtagaacggggaagaggagtgtgtctctgagtcaggaatatttgtggacttcaaagaggcgtgttcggaacaagtcccaaagctttggcatgatgtttattagcaaagttcagtgaattgcaaattaatacccacagtggcatttatgaatgaaaaggcggggggggggtggggcggggggaaacttgcccatcgtctggcaaattcccaggcagaggtctcccccactcctccagcccttccctcttttgggtatgttgtacttgtttgtttttggaggttcccactttagttccagcccactgcctgggttggaagtccgagaggaaacgaacgcggggagttctccggraggctgacttatacttcctcacggatgcaggagacggggtaagcccttcccgcctccctccgcgggcaggaggctatgctaaccaagcagccagccagaagtgcaggagaccaccgtggagtggcctgaaatcatcacctgcaaagaccgcaaggccaaaccagattccaggaccattgtgccctatgaatctctgggaaaagcagactccttcaagctggacattttgtggggtttttaactcctttcctagggaccactggaagcctcccattttaaatgaattgcaatgcccttctctccaagtacagaaaagagatttaggatgtaatattttgcagtaaaaatgtcagcagattttaagatcccgttctacttgcaacacactcagtagaagaccccaccacaagacaatttacttgaacatcaccaataccattagtgtgattgataaactttccctgcaagtttcaaaaactttttgcataattttaataaaaattatcatgtaagactcatatgctctaggataactacttatcctttttaatgtttaaggctattcagacttcataatttagcagtcttgcttgaaaaggcccttagtgctaatgctgactttcctgataagcacaatgagaatctgtcaggatgaaaacacactccagtgaagagaattcttgcaggaaggagttcagtttcattcattccaaagtgccctttcataaatggaagcagcatttgctagagggagtgggatctctaaagctctgttagagggttaggggtgggagacttttcaagacaatggattgtcaggtgttatgcaaatacagtgaggaaagcgtgggcccaacacgtacacaggttaatacatcaattattatttacaaaacactgtttttcctgccttatcatttcattattgtttccttcttaatgaagtgacggggggcgggaggggggaggaggggtgcagggacagtactggttgaactagagagagaatggagaggagggttcctggcttctgttgtggcgtcttttctatttgacttcatggttgtaagtatttccagatggtgaatcagacaccagacgtaacaatatttccatatttgggtatagcagtagcctgcgtttttaacatttttctgcctctgttatccaaccacaaagcattcttgacagcttcaaatgttgttaaatatagatttaacttctcttcccagagcaggaaattctttggaattccttgtttttcacgcaatctgtccatcatgatttaaaataaaagcacagtggatcatccaactggccgtatataccttaattggaggttggggatgggggacggcagagatccagtctgccgcactgcgttcaaacacacgccattccagagattcctttaaaatcacattaaagtttttttaacaagggtgtgtgggtttgtttctggacttcaactggggaatcttgaggatgagtttgccccagaagagaaatttagagaaccttaccgtcagctgcccatttaaagcagggggtgtgttgtgggatgggggtgggaagctggagcaacagggccaggaggtgtgggagcgggagacactagagtaacctatgtgcacagcctctccatataccatgtgctgttgcgcctgctagtaatcgacgacattaggcaagagaaacagcggctcctcaagtcctgcccaaagacmgtccagaaaccccagcctcccgtcgccttctcgccgcctccgctgggagccgcagatcagtccaagttgacgkacaggaggcgaaatgtgcaaatgtttatgggtaagtgttgcttcgggtgctaattctgtatggctcttttgctagtttctccttcaccctccccatacgggtgccccaggaggaaataacggactgccttgtttccttgggctgccttggattgcaatccacggagaaggggctacttgtcttctgcagctcctggcttcgggctgagagatggggacgtctctcaaccgctgctgccagggaattttaggttacctaatgaagggctcactgtctggcggcaaccgagaataataacggtaaatctggcgactccagtttcctagccctaggaaggctctcagactagcgtgcatccgagwcgcctggagggctagttaatgaatggttctctgggttcccaccccagagtttctgattagttacatttctaacaagtccccaggtgatgttgatgctgctggtccggagatcacaccctgagcaccactgccctggacgaccggagtgcctgtagtaggggtgtgtgtgtgtgtcttcatagatcctcggctgcacacccaacctcacaactccactcttcaaagccaccttaatgaacagaacttaatggtgtctgcaaaagaccggctttaaggtggcgcccccgtaccatcccatttctctcctctaccatttccccgcccccatccccttggcttgacagccaggagagccccaggaagccaggatcctggtggctgcggcaggaactgggtggccgacgcgcggagagggcggtcggctccgggacccctgcggagggagcggagagggtccgcaccgcgagagggtgcgggacgcgaggcatccggacgcgcctgcccggctgctaccgccgccccctgccggccaccccgcccgcgcgcccacagtcaccgcggttgccaagaatcgaggtttccggcggcgcgcggcgcaggacgtttccagccccggcccatatttggtgaaagtctttcaagactccgtcatctagcttcggggggcggtggcggtggcggtggcggcggcggcggctgtcctgcgacccggcctggcaggcttgcggccgccgcgttcctgaaaagtgcgccgcggcggcccgcgcccaggcctccctccgcgcgggaccccggagcgttgcgggcggcggggtagacccgggcagtttggccccagtcctcacccctctgagggccgaagtccgccctgcgctgcgtgggaggctggcgcggagggcgccgcggcccagttgtgtcacttttcccgtccgcccccctgttgactagtcctcccagcggggcagcgagttgccgtgctgtgccagacgtagagggtgcgtccggcgcaagggtgtggggctgtgtgtgtatgtgtgtgtgtgggcggggggatgttcggaggatggcgtttgcgtggacaccaagcgcacccgagagcgggacgtgtagccagctctggggaaaagccccgaagggcctggattccattatccccagaagggacacatggtaaagctggctctcggtttctcctggcctcccacgaccccttcccctcttcctcctcgagaagttccgcgtgtggggagccctggataggaagtcctggctctgccatcagtaggctgtggccttggggacgctgctcatcctctcgggaccttgcctgcttctcagtaaattgggaaaggaggcagcaagtagtaaagccagagcagctcctttcagggccaaatctcatgtcatcccctctaataaattagtcagaaattaacacattatatagggttcacataggttgggcatcattttaaatgccttctatatattgatttgtttaattctcagatgccccattgaagcaggtcatcttggtaacaccattttcttttttttttctttttttttaaattttatttatttatttttattatactttaagttttagggtacatgtgcacaacgtgcaggtttgttacatatgtatacatgtgccatgttagtgtgctgcacccattaactcatcatttaacattaggtatatctcctaatgctatccctcccctctcccctgaccccacaacaggccccagtgtgtgatgttccctttcctgagtaacaccattttctatctaaatgaagaaatggaggcatggaaggtaagtgactagccaaggtcactcacctagccagcagcgaaactggatttgggcccagatcataaggtctcacacttaactactgtgctatactgcctactctctatctcttacctcagacattcaggcccatcctcttctcctggaaatttacctttatttaactctatcacagcttacccaaatagtctaggtgaaatgcatcagatataaaaaatagttgataaattacctgaagctgtgctaacccctgagaattgcgtaatgtactggctcttaggaaggagggagaaaaggagtgttgtattttaacagaaaaggtcttaatgcagatacatatatagagtggtctttaagcaccttggcaggctggtggggaagatgtttaggacctctggggttcttttgacacctcataagccacattgttcaggcaatccctacttctggaataaggcttggcctggtaggagttgaatttgtcattgagataaaggtttcagcatcacttacttgatggttcatcagtctgggtgttcactgtggacccagtctgtttttgttgttggttttgttttgttttgttttgttttgtttttttgtaacatggtctggttctgtcacccaggctagagtgcagtggcatgatctaggctcaccatagccttgacctcctgggctcaagccatccacccgccttagcctcctgagtagctgggactacaggctcatgccaccacacccagctaatttttgtagagatggggtctccccatgttgctcaggctggttttaaactcctgggctcaagcgatctgcccatctcggcctccccaagtgctgagattgcaggtgtgagccactgcaccaggctccccgtctgtttttaacccgttttctccccaactatgttataattaattacatatatatatatatagagagagagagagagatgggttttcaccatgttggccaggctggtctcgaatttctggcctcaagtgatccacccgcctcggcctcccaaagtgctgggattacaggcatgagccatagcgcctggactaattacccatatatttgaggacaatgtatttacccttccctgaatcccagatttattcagagcttgtgatgtgtcatggcatagtgctaggtactggtgacatgagaaagaggattttaatattgaacgtcccccgcaggactgtaaggcatattgcagaagtgggtacataaatgctgtgtggatacttcactgcctgagaggagttagggggaacgactaatctggggctgaaaggatgaacaggagtttgatagcagggcaggacatttgagaggaagggaacaaggccttgactgggcataacaatcagtctgatgcactggaccataggattccttctgaaaactggcaagagatgtcagttgggaccatctgcgaatggccttgctgtcatggcattggaactttgcagagtgagccatgtgagctttttgcctaggtttccttgtctataagataacaggattctcctagctcagaggacacacactcaagtgcctgcaggattcagccaggtaacaccatgccatgactcaggattagtgctggctgatatttggccttggccttgggaaccatggggacactggaaccatctatgagaggctgaatggttactaggtgaaaatgtaggttcactgtttgcatattttctcattttaaaaagagatactagagatctgaatttttatgtgaagtcttcaaaattttaaaatgttggcaattaattacaatgttaaaatgccatctagactaatccttggaaaacccaagaagacaatgtctgtgggtgccatttgtgatctctggactgaatatctctaagaatctgtcttgctccagcattctataactcccagccacctgtgaaattgtagggaacagcaccctgggctccatttaattgtcaagttgactagactttattttgtttaagagtcagggctgctacttacctcttggttgtaggaatttataacctattaagaaaattggaattggctttttacaaattttctacttcatccactctccagccactactctgtctccctccttcctgtccccctgaattgatgatgtaagcagctggcattgccttggcaatatgataggaaacacttttttagggcatccatatcccgtgggaactcttatctgtttattttctccacttggcatctatccacaggaagccagcattcctaactcccttaccttacagaacttcttgttttgtgataacacagaaacattttattggaaaggactggaaggcacctctcccaccacaccctgcaatccatcttctagagatgattgagcaatatgaaatataataattgtaagtcattatcaaatggcttggctccagattgagagaatcagcaattaacctctgcctttcgtgttttatttctggagatacctktctcttaaccaaccactaacatcacacgtagcacatccagaatttagaaaggatttgctctgggcacagtagatgagcacacagattctacagagagattgaagtgatttatttgtgacaaatttttgcaagtcttggggattgagtgtaagggagtattcaagcagttggacttactatgtgaaagaagacataagacatatttactgctcagcctgatgcctggcacatagtaagtgcttaattacaattattcctactgccaagcaccaycattatctttactttcactgcaattaacatagaatgagctagtcttattctctagagaatactttctattctttagaactctagttataaaatcaataaaattctttggtatatggtatatagatgatatgattaaaaggatccatccagccaggtattctggctgcactgagacaccagtgactatctaaaaaaccactcaaatgggcttacctctcatggcactgggactttgcctacaggcagtggtgagccatgtgatgttttgctttggtttcctcatctatgagatgataggattgcaccagctcaggagtggtacactcaagtgccccaggaatcagagaggtaaaaaatgccatgcctgagcgttagtgccggctgacacttggccttagcacttgggagacataggaatagttggaagcatctatggggcctgggctttgcctcccattggctaaatggttagtatacacaatctcatcagatctttataaacarctctgtaggatgaatattttatttccattaaaaagatgagaaaattgaagctttgctagatgtcagtaattggtgcaagggggcagggttgttaaggtagagcagaatacctgtttcaaagaccattcctttcggggagagcatggtatttgtccttcatgaaatctgccttaaagttcaggaagttgcctgcaacttcttgacttccccttaacaactgactgtgaatctgtcacttaaatattgttctaaatgtgtctttagcttgtgttttcagtaactgtggcccacagtttcttaatragagtctgataataaacaagttaaacaatgaaaaagggttctctccttagggcccttgcctgagcttgtttctatttcctctgggaggaaaaaagaaagagatgtgtcagaacagaggtggaacttctcagagattgagagatccgtctactgtaacttagtcatcaccatcaattttgttacctgaggcaggcagagctgctacctcccacagcctgtggttatcctcacaacagagttactaagcacggagccctccaggcccctgccaagcgcaccctgcatgtgccttacgcaaggtgtccctgagcattgaatgttgggtggggtgggggttgcccaaggttatagcaataaagaaaaaacatagtgccaggtgcttctctgaaatcatttaccccttcttttgtagttaggttttggctttcaaaagmcaaaaaaaaaaaaaaaaaaaaaaaaagcttataaacagttcattctaaaaggacaaaggcaatatgtattgtatgcttaaaatttccaaggctctggaaaatgtctttgggagaattagaaagtgtagactatatgctaaagcattgcagacccagaagatagatgattcagttcattctaataaacataacatgtatggcatgctgcatgctaggcagcaatgcaaagaggaataatatatggactttgcttcatggctctagctgcctaggggagatgcagatgcttaaacagataatacaatactgtggattaaagctctagaagccgtgcagctttgggagtacagacaagggatgtccaactctgagtctcaccctttaaagatgtgaggtcttgttagtgtgtacatttttatggatgagagggattgggcacagttattccctaacatacacattccctttgaagctgggaactgcaaggaatgtgcacattcctgagagattagaaaacatctaaaagtgagaactttcaggtgagcctcttaaaatgcattgattacagatgggaccgaccctttgggtgctattgaaaattcttatcattatggatccttctttcagaaggggaaagagaagggaagtgacatttacagggcaccgccatgggccaaacgccttacaggttcatgttcaggagagccctctgagatgagctttttgacatctttctaagcttagggaatgaaggctcagagaagttaagcaacttgtccaggatcagacagttagaatgtgaccaaacaaggattctaatccaggcctgtctgactccaagttccgtcctctttctacatttctgctacacagtcctaattccttgagttttcactccctgtatgagtgtttgccatttttctmtctttttttttttgttaccaccacttcgcctttatagagccagccctttacacattccttagcactttcaggtgcactgatttgaagtctttgagccactgatgactctagcttttaaaaggaggtacagattaaagtgaatgggatcattgccatcacgtgaacattcctgtcaccatcggtttgatcagagaacaggcatggtgatagcctgcacttatctttgcttctttgctaggcactgggcagaatgatttagacatatggaatctctgttttccagggacagatgacagattccagaggaaatggtgcagtataattaaaaataactaaggaagtatgattttcttattttgtgtttaaaaaatggttgggagttgccacgggcagtctgaggctgcactagagtactatgctgtaacctggaagactgctttgagaaggaagttagatgactatatgaagaaggtgttagataagtgcactgagatgtgtgtgtgtgtgtgtgtgtgtgtgtgtgtgacagtgtgtgtgctggagaagggaggttaaggatcaaaggtatggaataagcaagggagagaaggctcagaaacaaaaatagaaaatatcaggcatcaggagaagaaaggctgaactctttgtagaggctttgaggccacgtggtagcaagaaagaatgcaggggtcagagggtacacttgctatggtgcggctcaggttaaccacctaatctcacggggtctcagtctcgtcagtggtaaaacagaaataataatatctcaagaattattgggaggattgaatgaagtcttgtttcagctctccagaaactgagatgtgccctccaaatgtttgtgatcagcgtcagcttggtttaaatctgaagctcctggagagcctttgggaggggagggtcacattctgtggtgaatagagaaagtcagcagtcactgtgagcatggggtatagcgagtgataaggaagaactgacttagcaagactaggttgtggaaacaagagaagctgaagagcaaccgtgaattaggacattctcgtggattcatttcttgttatcaccactgatccagactccctccacctttctttcctctgggcttcctgcactttcattgctctgctattttgaatagaggagaagtccttsagtcccagttcaggagaagcaactagaaagggccagcgtgcatagctgggccatcctgcaaatgctttttccaagagctgcagccctgaaagctggggccagagaaggaggtggaggacgaagatggggttggaaacaaactcagggaaaacttctaaagtgacagaaagtgagaattgagacaatttctgcctgaaatcacctgtccagctattagtcattaacccacctggaaccaaatgcagttaatttagcaccatgttggaaagcttagaacatgaaccacatcctagggccaggttttgatcctttgtaaaggcttctcttttggaacacaatttggtgtcagtacataggaactaacaagtgtgctgagttgtgagtcatcagcagtctgctttcctccagaacatcatgggaaaagaatgggcagactgcttcagataaaacctggacccactcaaacttttactgtagactggaaacaaaacaaatcgactttaaaaagaatgttttaaaaatctaattgaactcagaaaggagacataagcctctgttctttggtttcaatgtggatctgaagtcttgttttgtttactgttcagtcttcaggcaatcgcatcaggtgttatttacaactcagtagattcttggggagttcacacaggccttttaaagcacatttgtgaaatgatcgtaccatactagggtttggggatacaaagatgacagatgtggtccctgactttgaggatgacacagtctagaggagagcttgcataaatagtgtgtatataatgagtgacttcataaaggtgcagtatacatgagctgctttaggagccctgcctgaacactgccccacactggggtgaagtcttcttgtcacactggatggtgctgctcttgagacttccagagcttcctccataaagcttggaagggcaagctgtgtttttctctgcttggatataatttattatgctttggacatagtatcagcaaagacttgaggatcctttaataaggatcctttaattatgaactctcattcataaggaattgcatatttttattttaaatgtctttgcacttccctttggtaagcaatctagggttcctaatgtgcatagccttttgggtaaacgtgtgtttctggtgttctaatgatagctagtgaatgtgtgaattatattcttggccttacttgaaatgatgcgaggtttctgttgtatagtgttaaaggtgagcctgattatttgaagcccttccctaggcagtgggcacagtggataagaagggagagcatattgggtaaaatgacagtgctccaggattccattacatttagtggcattttgggatattgttttatttgattccactgtcgttcatgatatgccatctgtctttatttcctttcctttgtttgctttgggtttaattttctcttatttgtctagtttcttaatatggaagctgaggtcactggttgaaaacattttctctctattataagcacttaatgctataaatttccctctactcctgcttcagctgcatcccacatattttgacatgtttttatttttaatctgtttaaaagactttctaatttcctttttgattttttttgactcaggttatttagaagtgtgttatttaggatatttggatattttccaggtatgattctgttatttatttctagcttcattttattgtggtcagaaaataaactgtgtttaacttsaattcttttatacttcttgagactggttttatgacccagaatatagtccatcttgaaaagaatgtctagtctgctattgtgggtggagtgatccatacatgtcagttaggcaaaattgtttgatagtgttgatttttttgtctacctattctttggataattgagagaggaatattgaaatctccaactacaattatgaatatgtctatttttctttttacttctgttaggttttgctcgatgtattttgaacttctgttgttagatggataaacatttagaattgctatatcctctggataaattgactcatctgtgattctgaaatgactctttcatttcataattagtctgttttcacgctgctgataaagacatacctgagactgggcaatttaaaaaagaaagaagtttattggacttacagtcccacatggctaaagaggcctcacaatcacagtggaaggcaaaaaggagcaagtcacatcttacatggatggcaccaagcaaaaagagagcttgtgcagagaaactccccatttttaaaaccattggatcttgtgagacctatcactatcatgagaatagcacgggaaatacccgcccccatgattcaatcatctctcaccaggtccctcccacaacacctgggaattatggaagctacaagatgagatttgggtggggacacagagccaaaccatatcattgatggttaattttatgtgttaaatttgacagggctacagggtcccagatgtttggttgaacattctgagtgtgtctgtgtgggtgtttttggatgaggttaacatttgaatcagtagactgagtaaagcagatggtgctctctgatgtgagtgggcctcatccaatcagctgaaggcctgaatagaacaataagactgactcttctgtatgaggtaattcttcctgcctgattacctttgagctgagatgggaggtttcttctgccttcagtctcaatctgacacattgattcttcataggtttcaagcctgctggccttcaggctggaactacaccatcagctcccctaggtctccagcatgccaactacagatcctggggcttgtcagcctccatactcacataagccaattccttataataaatctctctctacttctacacatacacacacgtacacacatgtacacacacacacacatatatacatacatacatttttctggttctgtttcttttggagaaccataactaatctaatacaatttctttatccctagtaatattctttgttctgaaatctaatccctattctagttttcttttgattagtatttatatgctatttgaaaaatccttttgcttttaacctacttgtgtctttatatttaaattaggtttcttatagtttgggttttgctttcttattcaatgtgacattctctactactttatttttctttcttttctttttttttttttttgagatggggtctcgctctgtcacccaggctggagtgcagtggtgcgatcttggctcactgcaactgtcacctcccaggctcgagccatcctcccacatcagtctcctgagtagctgggactacaggtgtgcaccaccacacccagataattttttgtagaaatgagctctcactatattgcccaggctgaactcctgggctggagcaatccacccatcttgacctcccaaagtgttaggattacaggcatgtgccacctcacatggcccattctctactttttaatactgtctaccttttcttccttttggggattgaattgttttattctgttgtatttccttttttattggctgatgaactataactctttgttgttggttttttgttttttggttgttttttttttttgagacagagttttgctcttgttgcccaggctggagtgcaatggtgtgatctcgactcactgcaacctccgcctactgggttcaagtgattctcctgtctcagcctcccgagtagctgggataacaggcgcgtgccaccacacccagctawtttttgtatttttagtagtcacagggttttgccatgttggccagcctggtctcgaactcttgacctcaggtgatccacccaccktggcctcccaaagtgctgggattacaggcrtgagccacctcacccagccaatattttggccttaaacatccaattatctttagaaagatatacaaaatgagacaaaagtcttttatatttaccatttctggtgctccttattcctttgtttaggtattatttttgcttctgcctgaagcacttcttttaatgtttcttgagcaggtgtgctggcaatggattcttttagcttttgaatatctgaaaaacttttttttattttctttttttcaactttttattttgaaataatataggctcataggaagtcgcaaaaatagttcatagagtcaatctaatgagcccttcacccagcttcctccaagagtggcatcttatcactagtacaatatcaaaccaggaaattgacatgagagcaatactaataactagactacagactttaataaggttttaacccgttgttttatgcactcatttgtatattcaccttaatttttggaagatatttttactggatattggacttctaggttggcagtattttctttcattgcattatagccctgctgcttctggcttatgttgtttctgatgagaaatcagctgacattcaaaaatttgttcttctttatgcattttttttttaacggagtctcgttccattgcctaggctggagtacagtggcacaatctcggctcactgcaaactctgcctcctgggtacaagtgattctcctgtctcagcctcctgagtagctgggactataagtgtgtgccaccacactcaactaatcttttttttttgtattttcagtagaaatggggtttcaccatgttggccaggctggtctcaaactactgacctcgtgatccgcctgccttggcctcccaaagtgctggaatyacaggcgtgagccactgcgcctggccacgatgtatcttttctttggctgcttttaagaatttctcctttttttttttttgacatagtcttgctctgttgcccagggtggagtgcagtggcacaatctcggctcactgcaacctctgcctcctgggtgattctcatgcctcagcctcctgagtagctgggattacaggcacccgccaccatgcctggctcatttgtttgtatttttagtagacatggggtttcaccatgttgaccaggctggtttcgaactcctaacctcaagtgatctgccttctttggcctcccaaagtgctaggattacaggcatgaaccactgcacctggctttattaccatttttaagcaatttgtgatgtgccttgggtgtagttttcttcatgtttcttgcacttggtgttcttggatctgtgagtttaaatttttcacgaaatttaaacaaaaatttcagctattattttttcaaatgtgttttggcctcaccactacccctctctgcacttcaaagactccaattacatatgtattaggtcattcaaagttttcaccaactcactggaactctctttgttttttacttttagtctttttccctgttttcactatggaaagtttctaatgctatatctcaagttcattaatcttttatgggaggtatataatctgctgttaatcacatttattatatatatttttttatctcagacattgtagttttgttttgttttgttttgttttgtttttgagatggagtcttgctctgttgccaggctggagctcaatggtgcaatctcagcttactgcaacttccgcctccagggttcaagcggttcccctgcctcagcctcccgagtagctgggactacaggtgcataccaccatgcccagctaatttttggtattttagtagagacggggtttcaccatgttgaccaggatggtttcgatctcctgaccttttgatctgcccaacttggcctcccaaagtgctgggattacaggcgtgagccatcacgcccagctctagacattgtagttttaactctagaagcttgacttgggtcttttaaaatatcttccatgttgctacttagcatgcttaatctttccttgacctttttcaatatatggaatatagttaaaataataactcttaatctctttatctactaattctatcatgtgtgtcatttctgagtctgtttacattgattaatttttctcctaattttatagatcatgtttttctgcttatttgcatgctagtaagttttgagtggatgtcatacattgtgaattctaccttgtcgggtgctagatattatattccttaaaatattcttgaattttgttttggaacacagttacttggaaactgtttaatgctttcaagtcttacttttaagttttgtagagaccaaagtggcatttaatttagggctgatttgtccccaggactgaggcaaaacctttctgaatatcccacttgctgccccataatttgtgaagttttccactctggctgctgagaacacaaaatattcccagctctttgtatgtcgcaagaactgtttcttctgctccttttaggcagttctttccccagcctgggataatttcttcatctgaatgtactgaacagaacttagttgaagacataaggggtgcccttttcagatctctggagctctctttgtgtagctctttcctgtccagcactctgcccattatctctagacatacttgcttcaccaaaaaactagctctcatcaacccagggagactgctagactgcctgggttccccctgcctgtgctacagcttagatcttcttttcaagcagtaagctgggataattgtaggtcttgtcttatttccccactctaagcaatcactatactgtgcagtttgatgtcctatgtctgaaaaatgttgttttatataatttgtccagttttattatttgtttcaggcaggaaaatcattgttcctccattttggcttgaaagtagaagtcctgccattggaattttgctggagtatctgtattaattcctgagggctgccrtaccaaagtactgtaaactgggtggcttaaaacaacagaaatttattctttcacagttctggaggctgagagtctgaaatcaaggtgttagcagggccatgctaccttcaatggttatagaaaataattatttcttctagcttctggtggcttccagcagttctcagtgttccttggtttgtgtatgcgtcgctccaatatctgcttccatctttccatggcttctcttccatgtgcctgtgtctctgtgatcaaatttcctctttctatggaagggtaccagtcattggattaggtccatcccaattcagtatgacctcatcttaactttgttacatctgtaaacagcctatttccaaacaaggccacattctcaggtactaggccttaggatttcaacctatctttttgggggacacaactcaacccataacagaaacttttattcttctttttgattaaatcatattttaaagggaacaaacatgactggtctttgtggtaaactattaaaaatgccctgcattattagtttatctttaaatatcctcaagtatttatgatagtcataataatttctaaatcaacttcatatctatcttttcttaaatatgatttgttaatacagtgagattgttgcattaaaatttctcatattttctgtttttttttaataaagccattgtatattttttggccttttgttctaccttggattattagggattagaaggggttcaaacttaaaattgtagtaattagctgctatgatgctatcttaaaagtagcttcttacctaagaataaaaatgtgtagtcaattctggcttcattatttggagggattagaagcaactctgtcaaacagggtgacccttgatgccatttgcaaattcttcttagaaagaaactgcaaaaggaatcattcacctactaatccaacatccaataaagtttagttccgtgagctagtatcatcaatggcagaagcacggtcaaaattagaacagtagccatagaagtatacgttctaagttgaccttcctttgggtgacaagagtttagtaatgcccatggattcattggctttctgtagtggcaggcagttctctggtctccatcattacacctaacatgttataccattttaattgtgtctttaattttaattttaaacgtgactttaattttaaatgtgactttctccccagtaagaaccgtgagagactatcttggtacttaacacaatataatacactagattcttaatattatgtaagagatcacagtaggatatgagggagaagagaacacatgagtaaatgaggcccagagacatttagcatcatgtctgtggccacacagctagttagtgatagggtagaactaaagtagctcttctattaggttggtgcaattacttttgcaccaacctaatagttctcaagtagttttttctttttacaacatctgtattttttatctctttggatctcagtcctctagccatagtatagtaatttttataaattatagttaacactcttatagtacttgctattttcctggtatgtttttaaatgctttcaatatattaattcatttgatcctcctaataactctttgaggtaggcactattttccctacattacaggaaactacaatacaaaggtatgaagtaacatgctcacagtcatgtatctggtaaatagtcaagctaaggttggaacccagatagtcagatactaaagtctatatgtaaaccactaggatacactccctgaaatggaatgacattatctttttgttaaagtcgtatgaggaaaagtaaacaaatatttaatgatgtagaataacataatatagattttattacacaaagaacatacatttttaaaaatttcagttaattttgtgttaaagatgctcattaatttgtttactttccatcaaaaaatgtagaatcaataggaaaaaaaaccttaatgtttatacattaatattaattagagacacattaaagattctcattagataacatacactttttcaaaataggttgccagtttcttataagcaataatcagttcagtcagaattgatacttagtttctccaaaggatttaagccttattcttttttattattttctatatacttccaatgttaaaatcattctaatgctacttatttttttaattgattgctctggggtttgcaatatgcattgttaaacttactagtctctcttcaaatagtattagactacttcatatataatgtaagaaccttacaataatatattttcattttcccccaagagtctttgtgctattgcatcatatatcgtacttctatatatgttacaaacgccatacttcattgtaaatatttttgcttcaattatcttttaaagaaagtatttcatatttactcacatgtttatcatttctgacattcattattcctttgtatagatccaaatttctctcatatgatttttcttttactagaggaacttctttgaacatttcttatagttcaggtctgccaacagtaagttctgtttgcttttatttttctaaaacagtttttattttgccttcatttaggcagaatattttttctgggttcggaattgtagattgacaggctttcccttcccctgcctcttttagcatgttaaagatgttgttccattgtatttttgcttacatatttctgacaaaaagtctgctgtttatttcatcttgattacttgtaggtaattagtctttttctctctggctgcttttggtattttctccttatcactggttttcaatgatttgtcttggtgtcattcattttttatcctgcatgggatttaattagattcttggatctgygggtttattctttttatcaaattgggaaattttctcaccataatttatactcgttctgtcctcctacttctctccatgtggacaagtttgcatgtgttagactgcttgctattattccacaagacaaaaagctctgttcattttttttttttcagtctttttctgtgtgcttcattttgggtatattctaatttgctatgccctcatgttcactggtcttttcttctgcagagtcatatctgcttctacactcatccagtgaaatctttattttagatgttatactcttcatccctagaagttctatttgattctttaaaaaaagattttcacttctcatcacattatgttttactttaaatactagtacatagctataatagttgttttaatggtattaccttctaatttcattatctccatcatttctaagtttgcttctattgatcgatttttttcctcttttggatcacattttcttgcttcttggtatgtccagtaatttttaactgaaagctgagtattatggctattatgttgttgagttggggatttgttgtcattctttaaatagtattgagctttgtcttggggagtaaattacatgtagatcagtttgacccattcgaggcctattttaatatatttctagggcaggtctagaataactttcactcaagagatagttcagtcctactactaagatgtgactctgctggtgtctctactgaatgacctaggatgacactgagggctctctactagtcaaagtgaaaagtcaggtgtgcaatttcaaaagcaatggtcagagatgacttcactgtgaaaatggtggcttgcacattaatacctttcttatacctttcattactgagtcaggggtatgaattcttttaataatgatatataatgtcaaactgctttccagtttatacttccactaccagtttagaaaagtgcctgcttcataataaccttgttagtattgaatttaataaattatagtatatcctttgggaggaattatgcagccattaagaagcatgatttttgaagactatttaatgacttgagaaaaggctctcaaaccaatgttaattaaacaaaagcagagcaaaaaattctatgtacatcaagatcccattttgacataaagataatatgtattctttggtaatagcatttatctccagatgatgagattatgaatgattttcatattcttattttattttattttagtataacttatatactacttttagcattattacttttaaaacttttattttaaaaacatgaggcacctgataaatgagtatatagaaaagaaagaggctttactcagaacatgaaaatacctgagggcaataaaatcaaaaaacatagagacccatcacaaactagaactggagtcacttttttgtttctgtattcattttgtgataatggagttgtctgggccatcaaaaagaatgtcctgataggcatcccacctaatggaacttgcaaaagttgtataactggtcaatttatatccatggaacagaaacagctatatgtcttaaattgactttggtttttgtttgtttgttttgtgacagagtcctgctccttcgcccaggctggagtgcagtcgtgcgatcttggctcactgcaacctctgcctcctgggttcacccagttctcctgtctcagcctcccaagtagctgggactacaggtgcccgccatcaggcccagctaatttttgtattttaagtagagacgaggtttcatcatgttggccagtcttgaactcttgaactcaagtgacccacctgccttggcctcctaaagtgctgggattacaggcatgagccactgcacccaaccagattgatgttttttttttttactggtttggaccaagtgcattttctttgtctcctgttttacatcttaacactgaatgtattcatttgctagggccgccataacagagtctcacagattgggtggcttaaacaacataaactagttttctcatgattctggaggctagaagtctgagatcaaggtatcagcagagttggtttcttctgaggcctctcttcttggcttgcaggtgaccaccttctgtttgtgtcttcagatactctttccactattcatgtctgtgtccaaatttcctcttcctgtaagaatgccagtcatattggaatagggccccctgaatgatctcacttaacctaattacctctttaaagaccctatctccaaatacaatcacattctgagatactgggggttaggactctaatatatgaatttggggtcggggagacacaatttagcccataayactaagttcggttcttctctttaaatttttcatgcatgttacagtgaaaaaaagctaatttctttactttccaagcataggttttgaatccaaaagtgtctgttgttgaattttggctctctcacttaagagctgtccaactttgaacaagatatctggcctttctacacttcagtattctcatctctcaaatgaggatggcacaagcacatatcttataacattgttgtaagcattcaattatttaattgatgcagaactcacagaatagtgcatgtcacatagccatacactaagtgctcaataaagattagctgttactgttatatcaaattatctcatctgtgtagctatttaacactgtacttaacacaggagatatagtggtaaatgcaaaagacagttcctgtcttcactgaagagagattttcccctgaatctagatgttggtcttatttctggtgaggaagcttttattcttttcttttctatttcttttgagacagagtctcgctctgtcacccaggctggagtacaatggtatgatctcggctcactgcagcctctgcctcctgggttcaagtgattctcctgtctcagcctcctgattagctggtattacaggtgcccaccactacgcctggctaatttttgtgttttcagtagagacaggatttcaccatgttggccaggctgttctagaactcctgacctcaggtaatcagcccgcctcggcctcccaaagtgcttggattacaggcgtgagccactatgcccagccacttttattctactttaaaaaattctgtatagaaatacttttctaagggatactgaacagtcaaagcatgtttgatctctctgactttccctcattgaaagcattgattcttgttatacgtggttggtagatttagggagatgtaaactctgaaagraacttgaaagtaataaatcctatatctcctttatgattatgtctcctttttttctaccccttaaacaacacacacacacacacctttagctgtgctggacacattatctaattccacgtgcgcaaattctgcatctagataatgttgtcttgtgacagtgtggtatctacctcattaagcagtccttctagaatgctttgatgactaaaaatacagatgacgtgtccttcgtacagccgctttctcacccgcatgtaggaacatgtgctttgggtacattttcaagcaaggacttgtggtgatctacctcatacattaatcctagctgtagtaatactttgggaaaggaatatgatcccaaaataaccaccaggagaagagaagcatgtcatgaaaggtcatggcaatggggcagaggatgttggacaggagtgttctaaaaatagagagtaagagatcaaagaaccagcagtaatgaggaacattttttggctttggttcccaggggaaggaggagaaggaggagaaggaggaaggggaaaggagaaggagggtgaggaggaggaggagaaggaggaggagaaggaggaggaggaggcggcggcggtggtggtggcggtggccgcactccccagcctgttcgtgccttctgttctacccgccactcatatctgtgttgcagaaatgtagggtagggaggatggttagcacattttcctgtcctgggtgctgactgcctttaaattattttgatagaaagtgtatttatataatgcttaaaaacatgtcaaaataagaagcatggagaattttaccttactgccatattgctactattgcaaggaagacctaaacattttggatcaagaatcctcaatttcagcttttttctggaccagacctttaggttttaccagttcaaattgactttttgtcatcttcctaaactatacctgatgattaattgtgagtgtttgcagagccaagcactgagtttttgtgcattcatgagaagttgggtcgatcagccactctgaatattctgtaggcatgggtgtgggcatatctggctgcgagtgaagaaatttatatcttagatatgctgttcaatccctcccctgcaaatatagctttgacaataatgaggcgagtagatgaggacatgttaaaatcacaggcctcttgaaggaayttttggcagatgattgtgtgtatgtgtttgtgttcatgtatgcacacaatatagtaattccatacagtagggaattaaaaaatctgggatgaatcccgtaaccttcctaaggacaatttactcaatagtgaactaaacttattgacacttggctgacagacgataaatgtatggaagtgcttgccaactatacaatgctgtacaaatgttccttaaatcctgtggttgtcagagaaccagtctatatgttcaagtcgaatccactatctcctattcaaggaggtttctttckttttgttcattccaaaactatttactgtgccactccagtgtgcaaggcactatgccaggcaccaagaagcatttaaagatgaatcatacccagatcctgccctcaaagaacttaggatataaggaggcagataaactactgaaaaatgctctgcttggtttctctaatttagcttcaaatgatgtcataactgagcataatatgacatttaaaaagggacttagcactccctcttaaatatttaaataacaatgtacatgttaattagtatgcatttgcctgttaatagacttattaacatgtatgctagtagtcaagagtactgagaaatgcctgtgcaggcaaaggtgtcttgattcaggacaggcaatgtgaggtactgtagtgattagcaatgactgacagtgcactaatcacagcccttgttgagcaatcagtcttcattaggctccccaaaccaaaactgacccaaaaacaattgattctttctggctttaaagccaatttctccatttgttttgatttgaggctttttaacgctgaatctgtgtgtgaaaggcccttctgtttaatattttagttgcagtgcagttaataaatccttgactttattctaaaagtagagacaaagttaagacttctccaggagactaaggaatcttaatatttacatgagggaaatatacacagttataatcctgaaaattatgcaatttccagtcatttaaaaatcaccacaaaatcttattcttataaaaatctagcttaaagcacattctcagtcagaattctggctttaaaaatattcattgaataagaatactagaggtctttggaaagtataggacatgatactgatctcttctcccagtaaaagaaagctgctttagagattaaaaaaaaaaaaaaaaaaaaaactcttacaatttcctttttaggaaaactacgagggcctgtacattggtcttgagctggcctctctttcaggcatgaatagatctaaatcactgtgagagatcttaaagatggtccttaggaaaaagaagctattgtgaactcagaaaagaggaatgttccatttagtgctcaaaagaatggttgaaaactagtggaggacatgttggtgctaacatttaacaaatgagttccatggaatgctgctaagtgagatgtaacattgtgtgagcagcaagtataatcttcaagccaagatgtccagggcaggcacagaggcctgggcttccttatgaaccaagacagacaactcccagccagaatccccagaaagtccctccatggagagtctggcagactagctccaactctgcagcctttgagctctctcactacaatgtttcagaaggaaggagagtccagatcacatatccagttatgtagcacctgtgaccccttagtggcccattgcctcacagtaaacactaccaccaatattgctgacagtccccagatgcagtggattcatacaacaaatatcagacctctagactgtactgtctatcagaaatgaagaatctgttcatgcctctgacctccaatttgtgcttctgccaagtgcagtgagcatctgcaggcctgtgtctgtctgcctgctgtctatggttaggtcagcaatagtgccctttgctggtaacaaacctctgggcctccagtttcttctggcctcatcttcatagttaggacccaggtcactccctgtttctcaccaagcaactacatgatttctagagatcccaaaagttttaatcttgaacagtgattttgactctttcagaagactggttagctttaggaataaaaagcagagtaaaaaattcactctctggcttttccagtatttactgctgtgtaataaactacccccaaacttagtaacttaaaacatggattttgtgggccagcagtttggcaagcctcctctgagtgattctactgttcctcctggagatgactaaggtcacttattggtacccagctgctagcttggctggctgagcggttctaaggtgactttactcacacatctggtaccttggtaggggtggctggaagtgtgagctcacctgggactatctattggaatacataatgtggtctctccagcaccttagtctcagggtggttggatatcttacatggcagctgcctcccctcagagcaagaatttcaagagaacaaggaggaagccctcttttttttctcatctagcctcaaaagtcctgctacattctgttggtttcaagcagtcataaggccatcccagatgcaagaggagrgaagttaggctccatttcttgatgcgaggctacctatagragagcttaggaaattttgttgaggtcatctttggaaaatataatctactttggccttcaaccttgttttacttacttactgttcaactgactctgaatacctgattcttgtccaagagtcagttattttgtctactcaaaagcaagcttcttcctcccttctggtctcccttctttcctttccacctaattaagaggcctgcttctaagaagcttcccacagatcatctaaaagacaaggcagagttcatgggtcttagctggaaccagcaagatgatatgggtcagaggaagatataatgatgatgagaagaattaagggagcttccttgaggaagtggccattatgctagacttcgttggacaagtagaatatgatacattgagaataggggagaaaggcatgtcattcctacatgagcaaaggcacagcaatgtagaaatgaaaggtatattgtacgaggaaaagctaagagtactaaagaattggggattcagattctatagccgttgagaaaccaggtttttaagttgtgttttaagatgaaactctgatagcagtgtggaagatgcactggagaagtgagattgtagagaaaaaaagatgaccagagtatgtagagggctagtgtatccaggtgaatggaaaggagagggctttctttctcttctggtctataaaagaaacagtagccatgactttttccagagataatagctgaaaccagtactattcatcactagatttgggccttctttcagcaaagatttgtccagttgtatttggattggatattgggtaggacaagttatccccttgggatttcatcccacctctcgcacccctttcccagtgaatctatgcctcagcctccttggaaaccttcaatttcccaagtccacttcaaactcttgccctagctaagagggcccagaccctcagctgtttcttccccaatcctctaaactctcttttttgccaacccatagccattccctgagcatgccatgctctatctcactgccacatgtttgcatatgatcatctctctaccttcytagccatcagttaacacccaactgaaatgtcacctctgtgaagcacgatgcataggctactgccttctgatctcccaagatgttctctcttctgtcataacatctgtcccattttagcatcatgtgtatttcatgtttatttttgtggattagactgagccccttgaaggagcagaamgctccttatcatctttgtatcactaatgkctctcataggccctagcacggagtaggtgatcagtaaatgttacaagaaggagtgaaagttgaaacttcacttaactcatattggtctgtgtttctgatctagaaatcctaacactctgaatgagcaaggggttggttccattctgtgcaaacagtggtggttaagtgtgctcagaagaagctgggtttctgttgacatacagttaccgaagtaatctgggaaattagccagtgaaaaccagcagatcccagagtagtagagctctgttcacaaaccttgtttatttctaacaatccgtttcccagaggtatcatgagcagcccaattgccatgtctctcacaccccagcaactattaaaaccagcaattccctgcctggtttcagagtgcagagcagccccatgtagtcccctggattgtcagtaacattttcttttctgaaagcctgacattcatgagtagtttaggtcattgtcaacttctgtggtcaccttttaaaagctaaggtcatacattcataaaatccttcctgacattgtgtggataatagcaggtaactcagcttatacatagactaagccctgaagaatgctccgtgggcagagctcagcttacttgagagaactttgtttgcacaaggtttcagagcttgggtagagaagatgttttcctttttaccaagaactctgccatgaacagctttatgtaatccagtcagtgctagcaagttgttgctgctttcaaatggctagagcagatagatgacacgtctgccttcttaagcctcaagttaatacatacgtgctcagggagagcctctaaatggtgtgtgtgtgtgtgtgtgttttttattattacttacttgggttattcactgggcttattaaacaatggtctgtaaagatgtaacattttgcatcttcctgactaaaatgtttgacttaattttaccccctaacacccatgctgcctctctcacttaatttcagtttcagatgttttcacctctaaggagacacatttatgaaaatgacaatttttaaaacataccgattatgggcaattcatcacaacaccaaataattctcccctttaaggggagctcttaattatcctttaaggacggagctccctattttaagaatcaccaagaacttggagcagagtagttcaggaggtggggtgaagggagaggggcctttggagtgggcacacttggcagcctcatgctaccgctgctccattgaccagaacctctgggcctcagcttttctttggatgaaaccctcatcacagatttggtatagattgaataatgtaacccttagaagagtctcagcaaagattaatttctgtccttgtttcctagacaggtcattaggtcttgggaggggtgaaaggagcagaaaatttaaactaaagagttaggaaacagtggtagttgggcatatctaaaatatagaatatgtaaatatgtaaatagaatccaattgacggtaatttgacttgcaatttcccaggaacacatctactataccagacatgctgaggattttatgacactgtagctacatttagtcaccattttaaagagccccttggcagtatagattctctagcatcatagaatattctattatagaaattaaaggtctggaagagctctgggttccagtgaatggatccccagtcgaagtgttaatgatataaaacttgtccacttatatttacaaatgattacttaatcactcttccaaggtgggaagaataaactcattctactgaaatttaatttatatgattgaatgagaaataagagattaactcatataaattaatgctgaatatttttggaatatcttcttctcttaaagctcaaagacactcttatttctcttaactcctttcttcatcactgatggaagttttaaaaacgtttgtaatttaaaaatgcaaagcacaaagaacataaatatttggcaggatatccaagattcaggcttaacagaaagcaggagaaaagataacagcccttgatgatggaagcagagatgaaccaggtgccttccgtgtccacttcatggtctacatctaacacaagaagtctacatctaacacaagagtggtatggtccctgagcagcagcattagcattccctgggaactgtgaataatgtaaaatcccaggcctctttccagatctattgaatgagaaactgtggcagaggggttcagcaactcttgtttaaacaagcactccaggtggttctgaggatggtaaaatttgagaacctttagtctagaaggaattttgaagaatagaaggacataacatttagagtggtgtagtgtaataaaaagtttattccatgctgaaagagagacaaaaatacttagcagtctgtacagtgcttagataatatggcttttgactaaaaacctttatgaaaacccatgctttcatacagagtgacagttttaggaaaaatctcaaaagttcacttttcatagcttgccacataatacaaaaatgtttcaactgcccaatttgagttctagcctaagtcttttctgtggaaccagttccatgaaatatttaaaatatttatgtagaacaggagttcgatgcccagatattttcagggtaccccaggctctgcaaaatgaaaaaggttttcttgctaagtcttataataaggagacctgtttcattttgtgtgatccagtgctctggaggacttctcagagcttacactatgtgaatgtaattatgaatctccaaaagaggatattcacttttgtgtatggtggctcttttagtttatggtgttcctcaaacttctgtgaagcatctcttaagaccagaattctgcagaatccattttgggaaatgcaaatctaaattatagaatgatagaatttctggcttggagctattcctagggatcaaccagttgaatcccttacttctgagcacctggcttgctgaaagtcaaagtgaattattctgaagctactctttatctatagtttgtgttgttattaacccttgcagatatgagattcttctttaaacataaaattttatggataaacatccaccccttacacatgtgtacatggatgaaaataggtaaaatgttttacactggttaattaaaaagtgacctaatgctgggtaattatagtacaagctttggagtcagatgccagctccattatttataccagtaaaactaaagggtgagttagttaaactcttcaaatatcagtttcttatctctgaaatgtggatgacaattatacctacctcctgggtgctaatgagagttaaacaaaatgatctctgtaaatgttcaataatgttagccactgtttttattgcttgattaaaatatacataatgaacaaaagttacaacaaaattcataatgcttttaaagaatttgtattttattaagtcaaattaaatatattttgccacatggatttgaaaaaaggtattgcatataagtgtaagacattattcattctacagtgtttggtatgcaaatcaatttgcagatccttagcaataacagctatatttggggtttacagactataggttaagaacgaatggcctgtgtcaacttattttatctacaaatagactgtctatttttaaaacattcacttcaggagagaaccctcagctttctttgttctgttattcctgtgtttaaactcctttgcagttaattttttatagatctcttgggacatgttcaaaatccatttcctctggtcttgtcttctgcagacctggatggccagtcagcatcttcctcacaggaatattttattcagagtaaaagctcttcttaaagaaacctctctatcaatcaattgctgtcaatcactcttgtgcccagtatttgagtagacatctttagatagacagaagtgttaaaccacttttgtcacttcgaggaacttataatgtagttgatggaatgcagtcatagagagtattcaaatgctatcctgacagtactggttgaaaatgtgcttgatgttcggcaaaggacaaaatcaatgtgggagagtatttgtgaagccctgtgaaggcaaaagcatgtttagtgcaaaaacactgaataaggaatcaggactaaggttctaatttacatttccagactttgaaacaaactcactgtgtgaccctgggatagwctcaacttctctagatcttagttttcatatctgtaaaatggatgattgaattaggttctgcctggtgccaacctctggtagaaaacctttatctacaatgtgcattctcatgttgaatgcttacacagccctctgacgtaggtactattagtagccccatttttgaaatgaggacattgaggctcagtgaagttgctaacctgctaacacatagccagtgagtggtggttccagtactcctaccagggtgttctccactccggcctctttcactcttaaccacaaggccaaatttctcctctgagaggatgggaaaaaggtttgagctggactttttgagatggatgagggcagagattgagttacactgtgggtctaactcaatccccagagtacagggtaatttatagtgcagctccctccctgaatcccagaaagcctataatatgaagttatttctatccccaaacaccagtatcattatagagatcagctgaacatgaggttagtttattgcttattcattaacattttcttctttgtttatttatttcttctttttttaatccttcagtagtttttttagttgcttttttctaagttctccttaatttctcaaataaagctctgcctattgtcatgtatacagaaagaccattttctccccacctcttacaaatcataagcctataagtaattaccagtttaatatcatatttagatttttaataaaagagtgactgtatttacttccatttgcttctgttctagtaaggatttagagctcttctgtatgtgacttttatctctagttagtgttgtttgccttctgttcttgcatgatctgccttgaatctgacagtttagagatggaggagccaacaataatgtcttagttcattttgtgctgctgtaacamcaccacaagctggggaatttataatgaacagaaatttactagctcacagttctgaaggctgagaatttcaatatcaataccgaagtcacatctggccagtgactttttgctgtatcatcccatggtagaaggtgagagggctagagagacaaaaggaggccatgcttgtccttttataaggaacccactcccaagataactcctgagaaaacggcattaatccattcatgagggcagagttgccatggcctaatcacctcttaaaggtcccacttcttaatacttctgcaatggcaattaagtttccaacgcatgtttttttwtttttggagacacattcaaatcatagcaaatagtagtcataaacttgtactcagcatttactttgttttagatattattcaaggtgtgttatgttcaatcttcacaaccaccgcagaagtttgggactattgttgctcccattttacgagcaggaacattgatacaaataagaaagttgacatgccagtgctttatccaaagtcacatagtcatttggcagaatccaagtcaaactcagggagtttggcaccaaaacctacacacttgaggttagacttttgcctcctcagaaggaaagaagtaggcaatacatgggaagatcagtttcttcttctcccccctcctccctctgcatctcctcctcctcccaccttctccaccatttctgcctcttcttctcctttagaacgaactaatttaaatggaatttatttggctaacacaagaagattaattatttgggctaggagaaaattaggaggaggggaaggaaattaagaaagggaacattttggatatatatttgcctytcwtatacacctctttccaaatgcagagctgtttcctgaacagttttcctagtgaaagaggtcattcacagctagagaaagcaggccccactgctgccaggatgggcctgccactgcaattgcaaaattaatagcttattgccatttctatcatgttttaatagttgaaagaataagaattgatccttatctttaaaaaagcgagaagggcttcaggaaattactcccttcrtcttatcacctctgctgtgccttattgtcatgatacaatcatgtgtctgatattttcttttcctctgctaatagcagggctttaaattattaaaggagaagaatgttgaccctctgctttgctgcttctccctctgtgctttgagagttggttgactctttcagcttctttccctctgccttagaaaggctcattttctgttgggagtcacgtcctggctctgcttcatgcctgtgagtatggagggcagagtttgggttgctgaatgaagctgaggaatgtctgagaggcagggcaagggggttgttgactttgctcaaaatatttcttgaaaatatctcatataatgttagattttgcagctcccctagctcttctccaaccccccacttttaaataaacatgttgagttataactgtgtacagaaggagttagaaaatgaaccccactgttgctatcttcacaggcatctgtgcgggtgtgacagggtgaataggccctttgggaattttaaggggactcctctagagccaaattcctcaaccagggcaaacttccatcagctgtgtaaatagtgtggcaatgtgtggaggccacgagcagtttcctgatagtcagctactgtgcccaggtagttaaaaggagtcgtgttccatcctgaggcttgcaggatgtgagttgggtcttatagtctctgatgagtgggtgggtagaaatttcctctccactttatttagtactggggaagtcagtctgattaagataggtagggctggctggatgaaaccacacctaagagaagccttctgggtgtctgagtgaagagaaaaactgtgactgtaaactgaggacagagttaggcattcactggcaggcattcttcccagctcaagaaattcctggggatgggaatagacattgtgctctgggagtttttatttagctgttctttaaaatrtagagttaaatgcaattcaattcatgtatctagtgcctttaactattccccaaaacatctgaaagaatttggaaaccctggaaaggcttcctgtctgtcaagcaatgccacgtgcatgtgcctagttttttgcagctgcattaacctcagctcttccctgtacagagatctggatgcttgccccagctcctgaatctaaagttgttttgtttttcatttgcttattctacagtgttcatcattctgacatccaatttgtttgtttagcttaaatgaataaggatagagacaaaacaactaggtacaggcagttttctatgtacatcagtgcataatgcattcttgaaaatatgaacaaacctgcaagaaccaaataattgtaaatggagttctagtaccaatgaaccaaaaatactataaaatccctaaatacatcatgtttttagaggtagtctttaatcatgtatttccagcattgtctttgttctttaatgctttcctttcaccactagacccatgaaatactggctgacatccaaccatcatccaattgaagcaaaagtttatctgcttttggcttgcccgctgttttccatgttcatcttaattgtgttaagtttatgaaactaacccttctcatcaacagtatcagaatttattttcagccccacttttatagatgtatatggataaaacccatcaaattattctaataattacttaaacaagtattctagtacaaagatggtgccatgctgcccagacagaatagctatgcctgccattgtccagttttatcatgaccaatttaagtgcttgtgtttctcctttctttaagtgttctcctttctttaacctgtctaaaccattgcggaaattrccagatatcaaaattgcatgctgctgtggaaatgtttccttgaagtgatcaacttttgtcattggtccagagccacaggaattgatggaaaacagggttggaggcagttgcttgtttcctgtgttcactgtgagcaagtctgcctcttaccagtctaggtgaagcctaccacccggctggatcccagcattctccgtgcatgttgtacagcagttgttgttctcttcaaaacaacaaaaygtttgaaattttaaaaatttcaatgtgttgaacatgtatatagatagttgtgactgagaatttaactaacagtaattcttgagatgagagaggaaatagaaaccaatggaagggttgaatcatttttgtcttttgttatacctcctggctccttgtgaacataacctggggatacataatattggacttcatctgcatgttaatatcatataaaaaaagatctgagaagcagtatagtagaatcattaaaagcattgactttgaaggaaaacagactttggattccactttctggctatgtgatcttgggcgagttacttcaccttactgaacctcagtctcctccttcatgaaactgagataatgatgtccatctctgcacgtcattataaaaaggaaacataatattgtacaaatttttgtgaaatcgcccagtgttagccaaccaacataggtttgtttcaaagatttccttgatgtggtttaaaaacctgtgtttctttgacattatgggccaataacaatactaaccatagtggaaagagaatggaaaatgacaggaggtcatatgtgtgaaagtgtatttgggttggacaaggtggatctgaatattggtgccatcactttctccctgtttgtgggtagctttttataaaccaatacataggttaagggtctgaatagacagaaggctcttyccttaaaaagactggaaaaccttccaagtagctcttgaaccctcacattttatcaccatttatggtgttgggaaatttttagaaattgagatatgaggtgatacaaacctcgttttcttgtgacagaaattccyagccagatatctggaaataggagaagttggagaagaggtttgaggggctagagaatactgatttccttagaatctgatcagtaacaggctgaggaaacattttaaaatcacatagattctatgcatgtctgagctgccgcctttcaggaatattcactcttggtgtcttttcaaagatcatgacacaacagcagtttgtcagactcttctatgaatggccccatacttgaaaacaccagcttcttataggcattcccatgttgtattatagacagtgttcaggccctgaagtaagaaaatctggattaaaatccaacctctgccatttattagctatatgaccttaggtgaaaggatttttcaataattctcagcctcagtttattcatttgcaaagtttacatattaatatccacatcaagaagttgttttgaggactaaatgagaaaacatatgttttagtccattcaggctgctataacaaaaatatcatagactgagtgctatcaacaacatacatttatttctcacagtcctgaaagctgggaagtccaagatcaagatgccagaagattcaatatgtggtgataccctgcttcctggttcatagatggccatcttctcactttgtccttgcgtggctgaagaagcaaaggagctctctgaggtctcttttaccaggaccctaatctgatttatgagggctccaacttcatgatctaatcatctcccaaaggtcccacctccatataccatcacattgggaattaggtttctacaaatgaattctacggggacacaatattcagtctgtagcaaagtgtttaaaaatttctgtgaactctaccacccaaatgaagggttttagtgatagatcaccacaggattttgctataacctataaaacataaacaaacacatgaacaagcaaaaacccaacacagcatcatttactaatgtctgaagttgcaatacctgagaagtacttttttaaaaaaataacagtttcctatgaaatactagggccagggccaagacatatttagggttccagcaactccttctcttccaggcagtagcaagaacaaaatgacaaaacaatttccattttagcacacaggacatttcytccatttgttgtttcgaaggattttatattttttaaagcaaggtgtgcttagcctaagtgcttacagagaaccttcaaataagttttggttctaaagaaatataaaggctatcacttagaaaagtgctactatgcaggcccatcagttgtgactggatcatggcaggagaatgaacgtctcttgaaacacgacatctcaattcttggctgaatagtggtgacatgcttggtgacgtgacaataactggtattcatttggtcataatgaataatagagaaaaaccattcaatgtgttctgattagtcatccaaatgatagatatagatacagatatagatatagatatacatttttttttttttttttttttttagatactgagtctcgctctttcacccaggctggagtgcagtagcacgatcttggctcactgcaacctctgcctcccaggcttaagcaattctcctgcctcagcctcccaagtagctgggattacaggcatgcaccaccacgcccagctaatttctgtatttttttagtagagacagggcttcaccatgttggccaggctggtcttgaactcctgacctcaagtgatccacccacctcagcctcccaaagtgctgggattacaggcgtgagtcactgcacctggccaaatgataaatatttttaaagagccggttacatgcaagaagttgctgggctttatggtggggayaggaggaaagcattggaggtagttgtacaaagatgtgtgaattatagtctaggtcttgaagaagcatactctaatggagagaaagcgtatacgtaaccctagcacaagatacaaagagtagtttcatacaagagtgcaaaatgtatggtagttcagaggaataagaggtcattttaatttggggaatcaggaaagagttaacaaaggagtgggtgttgtgctgggctttgaaacctggttgtctttgggcatgtagagtaaggaggaattcatagtccaggcacagcagaaatcaacgccaaggcccagggctgggtaaatgtaaggaacataaagaggaagatagggaaataagactaaaaggtgtaaccccaggtcaaaggaaaagggaatatagtatattggaaagattgttgacttagtttaaaatggggatgatactctatttactagtttctaagattcacattatttttttctcattttagtgttttttaaatcaagaaaaatcttagcatgtatatttaatgtaataattttttattaaaaagagattattgaatcaatggaatattcataattgatagaaatattttaatatttcatagttataaaattgatttcattttcaaggatatggtataatacctactttataagctttttggagaaataagtaaaattatatatgtaaagcactggtcacatagtgggctcaataaagttattatttttatagaaagagagttgaattaagtttgacaggcaatggagaactattgaaggatttcaaaaagaagaaaggcaaatcaaactgggtcattaaaatcacctgccagtaatrtaaagaattgatcgagggatggaacctatctgggacactactacaatagtctggaaaagagttaatgaggggtaattgagggggagaacttatgaaagtgaatggcccagctttcccttaggggtgctgttgacagggcctgccagctgatacggtacagaaaagggagaagtggatatgattgagagaactgtgctattaaccgaagtcaaaggtacgggaaaagaaacaattgtggaaggaaatggatatgtttgatctgggaaacactgaatccaactccagatggagattatccaggaggcatttagaaatctgtaactttggcaaggcgcggtggctcccrcctgtaatccactttgggaggccgagaaaggcggatcacctgagctcaggagtttgaggccagcctggccaacatggtgagaccccatctctactaaaaatacagaaattagctgagtatggtggcgggagcctgtcatcccagctacatgggaggctgaggcaggagaatcgtttgaaccctggaggtggaggttgcagtgagccaagactgtgccgttgcactccagcctgggtgacaagagcaaaactctgtttcaaaaaaaaaaagaaaagaaaagaaagaaamagaaatctgtaacttcattctragaaagagatggaactaaacatgtaatattagagtcattttcatttagatggtaattgaagccttggctgcagataagatttttaaaggaagggaatagtkggggaaaagacaagaggttgaagaatggaaactctagaggaaaacaacatgctgtagataactcattgaaaagaagtagggggaccagaaaaagaaggatttgaacgtttggaacgtttctccaaagagaaaagaaaagctggccaacagtgyagagtataattgatcccgcaggcacacatttgtgagcataaacacaaattggtaggaacagaaacctctttctttacacacctgagttgcccttgaatctctcttggcatttgactgccatctttttgctgctttcacttctttcctttctcagcaatttcagagccttttcattttgacctgcatttctgcggttgctttagtagctttgagttgttcttttttttttccctctcttgcctgtgaacttktgggaaaatgcacagcacaggcgatctgaggaagccccttagggtaatccagcactgatgcttgagaatgtcagagaaagaaatgaaactgagcccacctgggcaaatcattgaggtaggcmccygggtgttccccttttagggcaatccaacactaataataatgataccatatggtttaggatcygartacagacttagcctgattcaccttgaagtttcttggaaaaggtgctgccacctctcacatagaactttcccacttctcagcttttggtactatcctgatgtttctcttttcatgttrttttatgcagtaattatttctttccataccataccattcagggtccttgaatgagctcatgtccactaaaaccagcttaaattttgagaaagttcctgcataacttatgttgaatgcattatatacttgcagacagtggnagtcttgtatttgtcgtaatcacattttcatgtgataatgtattatacatcaatagcctgttggcagtgcatttagttctagtgtgggaaacttgtaggaacagatcaggtatggtttttattttcctgctgatgaggattgtgatgtctacattcagtacaccctgaatgcctgactgttaatgtgtsggttttaagtgtaaaagcagaattggctttaccaaggacaaagagaacacttatctgcttagtgggtttttttgttttttggttttttgtttctgtttttataatgattttaataacttttaaagtgcacttattaactaaatagaattaatacttgtaaatgagaacaattaaaatatgccagrgtcctaaagattataatttactgagtctgggtcaaaacttgggcatcttatttttaagaagcttccctaattctctaatgtactttaaagtttaatgattactgtttgtttgaaattagttagaaaacttagtataagtagggaacttattgctattactagtaactattgcacagttattcctaccctgcaatagaacaccagaacttattcttcctgtctaattgtaattttgtgactgttgaccaatctcccctccccagtgtctgataamcactgttctactctctgcttctgtgatagcaaycttttttttttttcagattccacatgtgagtgagatcacacagtatttgtttttctgtgtctggcttatttcacttaatatgatgtscttcaggttcattcatgttgttgcatrttacaggatttttttttattattattattatttttgagacaggtcctcactctgtcacctaggctggagtgcagtggtgcaatctcagctcactgcaacctccacctcacaggctcaagtgatcctccgacctcaacctcctgagtaactgggactacacgtgcatgtcaccatgcccagctaattttttgtatttttttgtagagatgaggttttgccaggttggtcacgaactcctgagctcaagcaatatgcccacctcagcctcccaaagtgttgagattacaggcatgagccactgcactcggctattcttgcttgtgactgaatagtattccactgtgtatatatatatacatacacactgtgtgtatgtatatacrtatatatatatatatatatatatatatatatatatatgccacattttctttatctattcatctgttgtttgacataggttgatttcataacttgactattgtaaatagtgttgccataaacacgggagtacagatatctcttcatcataactgatttcatttcctttgaataatacccagtagtgggatttctggatcgtatggtaattttctttttaattttcagaggaacttccatattgttttcctataatgactgtactagtttaggatcccaccaagtgtgtaaatgttcccttttctccacatccttaccaacactgttttcttttgtctttctggtaatagccattttaactggaatgagtagtatctcattgtgtgtgtgtttttttgttcatttgtttgtttgttttgctttgtttgtttgttttgagaaggaatcttgctctgttgccaggctggagtgcattggcgtgatctcggctcactgcaaccttcgcctcccgggttcaagcgattctcctgcctcagccttccaagtagctgggattacaggcatgtgcccccacacccagctaatttttgtatatttagtagagacggggtttcaccatgttggccaggatggtctcgatctcctgacctcgtgatccacccacctccacctcccaaagtgctgggattacaggtgtgagccaccgcacccagcaggctttttaatttttattatttttttatttttatttgagacagagwttcactttgtcacccagtctgaagtacagtgatgcaatctccgttcactgcaacctctgcctcctgggttcaagcaattctcatccctcagccttccaagtagctgggattacaggcacgtgccaccatgcctagctaaggtttcgccatgttgcccaggctggtctcaaactcctgagctcaggtgatccgcccaacttagcctcccaaagtgatgggattacaagcacaagccaccrcacccggcctcgtggttttgatttggacttccctgatgattactgatgctgagcatttcttcattcacctgttgtccgtttgtatgtcttctttygagaaatgtttattaatgccttttgcccatcttaaaaattgggttatttggacttttttgctgttgagctaagttcttacgtatctgaatattaacatcttgccagatgtggagtttgcaaacgttttcttcccttctataggtagtgtctttactttgttaataatttcctttgctgtgctttgctttttagtttgatgtaatcccattttctacttttgcttttgttgcctggagaaatgctttaaaagatgggcagatttctctgaaaatttgcagaagaatggagaactttcagaaaactgaaaaagagccaatatcatatctatatatttttgaaggaatagaagagatccaggcaactgtgggctatgtgtttaatttccattgctgaaacatatatacaacactggggatagtctcataacgttggtttggtaagtgagcaactgttctccaatcatacttaggcagagcaaagggaaatgggctgaaactagaacgtgcgggatttaggttagaatgtaagagttttatgactgggaggaatattggaacaacttcctaagaagcattgtgcaacttctttctctagagatctttaaaaatacgatagattttcatgtctggtttaaatctggtgctgcccaaaggtgaaagaaagccaaagtgttttattttatgccccacrtatattttgaagaattttaacatcrattttctcatttcaaatgttgtaaaccaaggatttgaaktaygtaatggtatcactaatttttaaaatatcctttcaccttaagtgaattttgctttacaaagcagtgtatattygtttgccttaagactttcatctcatttccacgggaaaaaaaaaaagaattgctaagcacatccactcccacgccacctccttttcttctttttctttggtacactgtgtttttggtcacrtgtatacacaacaaagttcaaataagtagtcacaggaayctttactgggaggctttggcaaatcaaatatatgctatataatatataataattatacrtggagaaaagaggcagagggcccagaagctcttggcagctgtgctgtctggttagaaaaggaagcaagttacagagtttggacattcagttctgagatgttattcctgagtcaacaggattttaattatgtatgtggcctagaagagacatttatgcaagaggaacatattgttrttgaacrtgtttgtgattttactcatgattcagaattggaaagaagctgaaagtaatttctgaaggtacatarctgaatkgaaggaacatagaataatgatacctctcctagtggcagaaaaataactaatatcttggcttctcatttcarcttcctcactcaacacactctcttttcttttatagttatatttttcaaaaaagtatgtgtgtgtatatatatatatacattttttttcacacaacactcagacatttcaaatcacactatttaggcagaaataagggatgtgttaaatattacttcatctttaaacatctttttctcctatcctcatgktgaggtcacttcaagttagagttcttgtttataagttcatggtgtctttgtgtatattttagggtagtttttgcaagaagttacaaatttactgcactgacgtgagaygctacatgagacatggaaaggctattctgaattgtggcagataacttcygtcttatggatagattaggggagattacggagcctgtaraatgcaaagaattgagcttttctaagagtaagtttttcttcctgtgactcctttcattgattcattcactgattgattgattgactgattcattcactcattcaatatttactaagcacctacaakgtgtcagttctagtattaatgcctcagcagacctatcattgcccacgttttgttttaacttacctttgtttaatttaccttctccaccgccatccaratatgcagccataatgacattttctgcttttaatagctaacagttattgaacacttaccagacattgtcctaagggctttttgcacattgtcttatttaattttcacagcaagcaaccttatgaggtaggtcttattagcaagctcatttaaataggaaggagccaagtagggcagaataggtatcttgcactaggtcacatatctaattagtgagcccatgctrtgggactctaaggctttgttcttgtacagcctcccaggattatttattctgttttttttaagcttgtctttaggtgcaaattctcaagttcacctctttgcctcattaaattatcatttttaccttctgttttcatctcttttacctccttgaaaatccatctgtacttgtatttctaagaaaacagtaaactaattgaagctccagttactttagattttayaatactttcttggctggstgtggtggctcatgcttgtaatcacactttaggaggccagggtgggaggatagtttgaggccaccctggacaatatagtgagaccccatctcaattgaaaaaagaaaagaagagaaaaaaaatactttcttaaygcaattttgattttctcttaaagccttttaatataaccaaatcaatgtagcaatttgtaaaggttaatgtaaaataaattattttagtatataaagagattttccctctaatgtctacacgstgaaaattaatacttggtgtcttgagtaacttaaaaatatttaagaccctatgaggttctttggtgaagggacaaaaagtgcagaatgtacctaagtgagttttctccagtttagtaaaagattwtaaaaccaagtcttcagcaaacctagaaatgacaactatgattttataagtatgagaacaagaatcatgtttctttaatgctagttataccttccaaaaaaacttccttttaagttgagccagatctgccaaaccagcgtatcatcttggagcaattaaaggtttyagggtttcccctctagaatcttatttccagttgacagattttgaagcttccccaaggatgcccatttggtagatgtcatayactttctaatgaagggttgcaaaaagcaartgatcactttgttaaaacctgggggctcattttggctttgctctgtgaaccccagagttagcatctaaagtggcagaagacacttaaaagagggattctccccttcatatgctgctccaccatttgctagatagctgtgtggtcttgggcaagttacttaaaatcctagtgccttctataagatgggagtaacaacagcatccaactcataagttgttgtgaaataagataatctaggtaaagcacatggcagagtgcctggtccataataaacatgcaataaatgttagattttattcatcgcaaacgtggtgaaactgaaggtgacttgtsttgaactcaattcttttagaaaaccttcatagaatttgatactcacattgtaattcatagctttgtaatactagagacttctaggttttttagttactgaaagcacaaaagattgtttttctttatagggatgttagaggaaaaattcactttatattctgaaataatttacattarcctttacaaatgtgttatattgatttggtcacattataaggcacttagagagaatcaagagtgcagatggacaggtcttgacacrtagcctctgcaaccaggagacaggcagaaaacagactatggggtctctaagacagcaggtagaataaaaaggcatgaactctggattgggagctggaggtgcctggatcaacgggaggaagttggtttggtgattcccaaattgcattctccaaaattgttagctgtggtaataggcatgccctacaaataatgattacctagtcaaataggcttggaaagtcytggtttaaayatggttaactgccttaatttattgtagaaccactcactattcagtagtagtctaaattccagccctgcctttttctagctgtgtgtgactttaagcagattggttaacttcttcagcctctgtttccccagttgaaaatgggaatactaatagtacctacattgttttattatgagccaaatgagttagaatttggtgcctggttcacagtaagcattatacacgtatcggcctttattaatgtggtggaagaagcataggaactggtatcatttaatccctctatggactttgggtcacaaacttgacatcttaggggcactaataattgtctgtacaatagggaaaaaaatacccacttccctggctcattgtgaggaatgtaatacacatgagagatattcgaaatgttaagacacagtgcagtgtgaaaagcacatggtaaatgtataataaayggtaggtcttgttattccccaaattatcccrctattattcactaaaatacatgaacactgggctgatagcagtgtgaratatgcacaaactgaatactgtatctatagaatgcaacctgtgtattgattgacacgtggagtagcctgagattctaccctttttacattatgaggaaacagcaagaaagagtagaaatggacctctgtcaagggcctctatgtctcagatggggttaaatgtgtagtatgtttaggcctaagaagtcaggattgaraggggtagaggcacttggatcatggggcagamgtaggtcctggtagtcccaaactgttaactgtgagagtaggcattatsttcaaataaggtttcactagtcaaataaatttagaatgccctggattaaatatcattaaatgactttctttattgtatatacactcagattctttgatacgctaatrtatacttcaatttcaattcactttttttttttttttttttttttttttgagacagagtctcactctatcacccaggctggactgcaaaggcacgatctcggctcactgcaacctccrcctcccaggttcaagtgattctcctggctcagcctcccaagtagctgggattacagacatgtgccaccatgcccagctaattttttgtttctttttttagtagagacagggtttcaccatgctggccaggctggctttgaactcctgacctcaggtgatccgaccgcctcagcctcccaatgtgctgggattacaggtgtgagccaccatgcccagcctttaattcacattttgaaactctaggaaaaagatgtggtttgcagcatttcccaaatgagtccttttcttttttcctcataaaatggcttagaatgcactttacraagaactgaccaagggcaattgtgtatccttcatgtttgctttggtcctttgttctcccaaaaggctgctaatgtcctgctttacgatttggactttttattatcagcaggattcagccttgacttgtttctagtgatgaggcagcacatttcaacctgtaacattttgaactgtatgaaattgctgatatttgaacatttttgacctactaaatgacaatttcatgtggttcaaactaatacttargacrgtgacggcaartgccatttgcatccacctggttcaggtactycttccaaatacytgaaggaggatgattagtatrtggggactggattctcccagtttgtacctccactgagcaaatatttatggaacgyttactatatactttggaccatgctgtccatagcaatttacctgtaaaatattacctccctccctcacattttatcagtgaaatacttgttgcaaaaggtttggagraagataagccaaaaamtgacatctgaatatttttttcagaccctgggtaccaccagctctgctatttctgggttttccaaatgcgtgggtcagcagtttccaacccctccragatgcccagggtccttcccacagagctgtagctgtcatcagacactggtgggagggcccgggaagtaagctccctgaagagtacttggcacctgcttcacactgggcaaggtgtaaggagaaagctgactctgggatgggtctactagttaaagtggtgattaatttaacattcatttacttatctattccttccctcaacacattgttatggagtgaccagaaaatgtgcccagtaactgtgytagggtagggacgcaacatcgaacaggatagcaccctgcctggcctctgccacccacaatctaccacaggaggcagaagtcagcaggcacttacaactgagtatggtgggcaattcaggygaggcaatatgaagaaagccaggtgggaatgggggtggaacggcatattgagaatcgtgtactcagaattccctgctcttggttggggagaagtttgtgcagtgcttctaccccacctgccactgaggaaggggccagtccaaaaaggagattctcaaagggtcattcttattagaacagtctgttttgctgtccagggaatctayaytgtcatgtgtggagttttgaaatatatatttctcagtctcaatttgtaaactctgcaggcagcatcaagaaaaggtatggataggcccctattttaatccagctcaatatgcaaaaatttwtacttataaaccatacgtgttaagttggaatacatgggatctactgggttctgaccagtccatcagttttaattartgagtgaaggacctctgaattagagtcaggattcacattacagaatgattcttcattttcacagatgtaatcaccacaaagtttctttaaataattaccctttttttggtaattaatatccgaccctatcttaaatgttaaatttacacatccmwtttaaggaaccatcaagtgtccagagcctgaatctgcattcatcctcctgctgcatatggccttcttagaatagtctcaagtgagcttgttctaaaaccagacttttaattctgtgctctgttgcccaggctggagtccagtggtgcaatctcggctcactgcaacctccctctccggggttcaagcgattctcctgcctcggcctcttgagtagctggaattacaggcgtgtgccaccatgcccagctaatttttgtatttttagtagagacggggtttcaccgtattggtcaggctagtctcaaactcctgaccttgtgatccgcccrtctcagcctycaaaagtgctgagattacaggcatgagcctcattatcttttctttaaaaaaaattggatggggtataggaagcttaaaggaaggaagtagcytaatttttaagtttgaaaagttgcaaaaaatgttctttaaaaagcaaagaagggattgcatgtctgtcttcctctttaaaaagttaatattcttcagaatatgataatataacaacagttatcataactaatgtaagtaaaatatagagtccttttattagcamccttttatttccttgaatcatttaaaatcatacccatattattgccctataatattttatttactttmatacaattatgaaattttgcaaaggrcttggtaaagcagtattttccaaactccrggtcatgacscattggtgagtctggaaattaatataaattttatacaaatgaggtaatagaatggaatagaaataccagaatgcatcacacttggtaagggtagattttgttttgtgaaattttkttttatatacatttacacacatatacatgcatatacacatatatattcacacatatttatatgtgtatacaaataacatataaacatatacatgtgagtgtactaactcactgtggaatgcagacaaaaaatttaagaaatcctaaaatgaagagttcaaaataaaggtaaaatgtaaataaccatattacacaataaatatgattttaaacactaaataacatttgttaaaacaatgccttcagctttaacaaatttacaaayttgtttaataaasaaaagaggcatggaggcaaaatgtactcccatatgtgtataygtacatgcatacagacatctacccataaatagaatttttaaaamcttcaaatatatttaaaacctttaaaatgtaattcaaaatagaacttcygattccatgaatagcatttgttaataatataaagtaaaagatgcaattatgctgatattttcacagtgttcattcattcatctactctaagctaaagaccaatatgaaaaaaaaattgcagggagttgctyttttattttaaagtttataacctacttatatagtacctaccctctcattagcctgggatgagagtagacagtctgtgtgatgcacagaatccagaaggaaattctgaaactgcatctaatagttgcaaagagacaatcctatccttcattttaatgatttcttcctccatctctctctggtctsaaccagtcttgcctaacattatartactgcttttcccattcttcatcatgaaccataaaggcttcttgcaaactctcaaggctaaacacattccagacattcctttacacaacgttcctgaaaaggttrgtttcttaggatcctgcagcaacactgcctgcatggttcacagagaccagacygctgcacaagcctttcrctggcagacagccaatggtgctgcctctcctctcctctgaaagacttgctttactcacccagagtccatcaaactcgcttttcaaggggtagatgaggacagcaggatcctcagtaaagaagaatcacctagtgaggcagagtttccagcagcayagtgaagctacacataggtygtatatcttggtatgatgtgtatttgctttggaaagagrcatttaaacaaagttmtccttagcaaagtcttgcctccacygccaccaatccaggagtctcaaaattacttttaatgaattcaagaaatagaarttctaccctggaacacttattagctgcctttcttatataagtaattacaggacacaccattttcttcctttttcctattaacatwtccgattctgcctctcttttctccctccctccttctcttctcactttgtgtcacatacacttcatttgaaattctctaattctctttttagaccagggaaaatcgatatcaaacattccagggccagaggttttcaagaaagacaagacaaaaaccacagaacttctttcacatatgactgaatcccttcacactctttctggcctatgggatactcgttgctgagaggtttaatttgcctagaattctctttacccccttcttcccaactcagccccttctcttggtatccacattccttgataaatacagccaaacccagcatctttctcagaatcacaaaaccctagtgcaaggtctcacaattctcactccatgaaatatgagttcctggtcaagwgttaaaggctgtgatcacacacctagatccgggygctctgaccagtggagtttgtcataaggccctattctttctcagtgatccatgagacactgaacaaattagaggtgctctatattcagcatgtgactgactgccaawgaaatgaaactcagaacccaggggtacatcacagaatgaggagatgattcagaagctgagggatcattgtcactgcaaacrtatagtattagagagagaaggaaagctattagcttyaggaataagcctttttctctcctcgtctctctttccatgagctggggctcactgaaagtgttgctgaaatgagggaaagatgggcagcactttttcctgtagcacatacaggacacttayatttccatgtcctttgtcaccatatctgttagtaatttttctggatccatttaaccagacagccttctgacttcaaaatctgtggcagaattttcacatggccattctgaaacagaggagctcacctaaacaaatcctgtaagacacagtyacctaaaaataaccctagcaaattattgggagtaggaaatgaagcagagatagcaagttccyactgactttttaaagaatcactatgaagtgtttacaaggataccgcagaggactaaaattagtttattctgcacagcattatccactgctgactcaagatggtgatacaagcagtgttaasctgtgagctcaccyggaagctcattctctaaaattactctcttgcagggatagacccctagttcacattggtgaatggaagatggggtataaatagcaacttgttacgccatcactcagaagctatgtgtcctgctagtctccagttttgtttcttscagatgtaagagcctcctgatcagtctattgtctctcagtgttcaagggtatggagtgtgtgtgtgtgtgtgtgtgaatatcattctttcarttgtacaatacaataattagaaaacttagaagttaagtgatgtggtaaaratcatacagcaattccctgacacttaaaactgagtttttgttccyataatcttcaaagacttaaatgtactgaacctttgctgtttctcctatgagccagakgacatgtcctatcaactgagttaagtgtcaacagtcarctwgctagaaacatgttcagatatgtgtagggagagaagaatatgtagatayatatgctgtacgagtggattcttatgaaagaaaggttttctttatatttaagggcaagtttattagaattaagctgcatccacactctactccaagttattattttggttgcttcactcaaatagtcaattcrataaagaaaaaaaagtcagcatctccagcatttctacrtcagyccatagcctgtgatgttctctcttggtggccgattttgcatttgttttcatacctactatattttctatatttcatacctactatattttctatagcattcatttcaagacacaaacagatattctttaatgtgtgccagtcagtcattttgrttctaaataattctgtttctccrtaggtgcccattctttgccgctgacaacttycccccatctgcttaatccattttctggcttattaagtactgggatgatttcttcagtgacagaagaaactatgcatcactgatttcctatttttgaagccctggcatttttcttsttgggacactgcrtgcttcatttctaattaggcttttcttcttactcatatttggctttgctttatcaatacattacgcaaccagtaactggaaacaggatcccagagagtgccrcaagcaagcttcccagtgacctaggggaaagaaggagtattaargggtgagatggaattggagttgcaggcaagatgattatcargcttgatgatgtaatgggaagttgttaattttaaagcaacagctggattctttctcaggttgatagtagttctgttttgtagccagatgagtcttcagtrgaaacaatcccattttatcagatacagtatttcctttaagataggcttataccaaacatctttagagaaagccattgggcctattctgttgtacaaccagggttaagcaaaatgctccagaagtagtgttttttttaaggtcctattcaaacgcctccacttccatgaagtttttccagatcascccagctgagagcatctctccatcctctcaactcccacagcaccctgggataatccaagtaaggcacttagcatggagcctgtgtaaagaagtgttcattattattgtccctacctctttgtagtatgtatcatcttcctccttgtgtctccattgtgtacacaccacttatctcccccattaacctgtaagctactgaagggtctgatgcatcgtttttttttcccagcagtgacttgctggggaaaaaaaaagtacttggtaaatgtgtgtcgaatgaataatagatggttggccttctcaggtatctttgcatcctcatgcctgacatcagtagatactcaataagtgtgaggataatgaatgttcaatgaatggatataggcaaaaaattcgattgctaactcttttgaaaggctgccaragttcagcctttgtgttcatagagttaactttcctaatatccttaatgttaatgccaaagacaaccaacaatagcagctttactcctgaacccagttccyataaatgacatgcttgttatttaaataactagrcaactagtttcaccsacacttcccacatgaggagtaaaattattatrgctgatactttttgggcatttgctttatgccaggctctgttctgtgctctttcacacactcactcacttaattcttgctgcaatctattttaaagatgaggctctgaagtacaagaaggttaaatcccttgctccaggccaggctcttgctgaataccacattgtagccagagctgggctggagttgcagacaagttatggtttgatggcaccatttctccatgtttcatacaaaatgctaaaataagcaaataccagaattrgtccagccaagatgctaatgcatagagactttaatgtctgtctcaaatatacttgagctctcaactgttctctgtattgtaggtgccccaggtagagaaggggaggagggctgcaggagctgttacttggttgtgagcacagaaaacagtcacctagagactcagacttacttctrtttgtaaatatctgctctgctgcatcagtaggcgycmccttscctcatctacttccactttccgtttcatactctgatctcttccaggtattccctcagctttgmattttmcactttcctaccctccttcaactgcgtgagccctacaggccattcaagaagcaacttaaatggcctctgaccatctcagacaggtgttggtatccctgcaactcctcgtgcatcccacccccaacagctgttagtgttttattttgtaattgttggtttaattgtctctactgctagattacagtctcatcaaggatagggaccctctcttattcatgggtatcctgagagcccagcacaattctgggcacatagaaagtgtctcataatgtttgctgaatgaataaatgacrgtgttgtttgcatgtccataccactctgaaagtattacataaaccaacttcagggactgtgcacctccacatttagatgcccaagatttggcakgaaggacacagccaagaataactgattagagatgtygtttctctgtccctatataacagagagaaaatatcccactgttatccaatataagaccataaaaatgaatagtctttgatgaggaaaaaaaaagtaagcctgaaaaatgtgtggctggaaaaaaaatgttkcaaacagcattttatttttcctctgtggacttgtataaattatgtgtaaggcaaatatgtgatagagagatgcagtggtaattacttgttctcaaatgtttggttaactatgcctcttaatcccacatacagtagcttagcacaraattaaattctgccccttaggcagaattagcatttggaatttcttatttctgtagtttaaatgtttttatcccaatatttgtacttttccatttagaataaataaatgtactgagtgtgtgtggagaaatataaatagcatggaatttttatgattcaactcattgttcttattggtttgtggtcaatttttatgggtaccaattttttaaaaattactcacccataattagttacaggaacatagaaagaatcgctagaccactctttcttccaatgaatgtagtatcatcttattgccaataattaaagtctttaattttatgagggaaaaaataacttccttcaggctttgctctcaaaatgcagatatttcatgatacagtgttatatgaaataattaggaagaaaggtttttctttgctgccacttatagtaggaatgggaaaaaattgttgctctgattaactggggagtctactccacgtgagcggtagtactaatttactaattcatccattaacatctgctgtgtgcctaaaatgtgccacaaactgctatttactggagatgtaaraagagctaagacttggcctctgtccttaaggagcttacaaagaaatgggagacgtttgtataaacaattgcaatgaaacaagacaattcttaaatggaagtctatacaaagcacagcaagcctgtaggagaaggacgtgagccggatggggtaggagtgggcactgmggattatggattcacagagagagcatctgagccgagacctgckggaggagaaggaatttgccaggcagcacagctggtgactcagcgacgggggaaggcatctagatacaggagtgagtctatggagtctttggggttttattattagtagcaaatggcctgtgacccacctcacaastcacagaaacacatcagtgaggcaatccgtggtaaggctctcttaygaaggttttcagcatagcagggatctttcagattggccattaaagacagcatgagttcacwctggcggctgtatggtggagacagcatctagaagctgccacagtgttgsggcaaaatgggatgagcccagatctgaaacaacactggtaagaatcagggtgtggagggcaataatgaggccaaagcagtgggacccggtgatgaaccaggcaggtcacaggtgccttgggctgtaagccacgagatctggacggactcaagtttccaatcagtggttgtggctgtctgcatcacccaaaatagaacatagrttgagtcttgcactcaaactaacttgaaggcagaatgatgaatagccggacattaaagtactgtgatgacatgaagtgggayattttcaaaatagakgatcctttctgggggaggatatttgtctstgtcgatctattaaataactgtayctggccctggagaggtaacttaacactttcagcagggaaggagctgaggctgactcwcagctctccatcrgcatttcccatttttctttcaaagcagttcataaataccttctttatgctttacatttttactgtggagccagcgaatgtataaggaagaagttgattagtgtggttaatctacctcttctatttaattgcatattgacatattcctgtgtttatgcccataaaattcctgtatctgcttttacagctcttcagaatttcagaaggaaatctgttccaatcacactgaactcctattgtcccctgcgttcagtaatgaggtcccttctttgtgcctcggcacagtccattttcctatctgaattgttccgtcttagaaatccatgaacttcttcatattctggctcaaaattaaacttctctgagacatttagtcactattccaattgctgctttgttttttgacatwtctgaactgtattaactttgcatataagtgtctacttaagtcttcttaaacatttcatgtacatattttgggcattttcaaacagtatcatccttaacctagtgcaactgttcaatagatgacaaccttaaccaatggacaagtagtagaaatacatttccctgtctgccctagttccatgtctayctttaaaagtttagaactttttctagaacccaaaatatacgtgccattaggtcagcatctctatttctgacttctaagtacagttctttgaacaaatattcaaaatattttatatgcacagaaaagtacaggatgtaacacagcagaattwaaaaaggtaaatatcttgtaccatgtttcagatattttayttttatgaaaaagattaggagctaagctatgaggatgcaaaggcataagaatgatacagtggactttggggattcagggggaagtgtgggaggggagtgaaggatataagactacacattgggtactgcttgggtgatgggtgcacsaaaacttccaaaatcaccactaaagaacttataataaataagtccaataaataaataaataaataaataaaggggraaaaaaagaatgaaacattacaaatatagttgatatcctttttgtagtcttcccccatgccgtttacctccttttattcctagaggcaaccacaagcctgaaattgatgcatttatttcctttctctgttcctataattttactaaatatrtatctttctgtgatcaatatattaattaatgtttgtgttttaaaattttacccaagtaatatctttacacatatggattttgttattttctccaacttcagaatctctgtattttgataagcagatgtgatcttttatrtttattgtgattattgataagtttaagattgtttttagcatttttcttagaattttttatttattgaaatttttcatgcttttcttcttcttttttgtccgtgtaagtaatcattttaaaattcctttttgtttccacactggtttggaaaataaacattctatttgtctttttagtggggctgccactttaaatatgaaaataaaayttacgcatyatttttaaaactccaagtctgtatttatcttctcagtcttaatctgttgatattcatccgttttttccctaagccaatgcaatgatccttggccaggcacggtggctcacgccacggcgggcggatcacgaggtcaggatatcgagaccatcctggctaacacggtgaaaccccgtatctactaaaaatacaaaaaaaaattacgccggcctggtggcgggcgcctgtagtcgcagctactggggaggctgaggcaggagaatggcatgaacccgggaggtggagcttgcagtgagccaagatcatgccactgcactccagcctgggcgacagagcaagactccgtctcaaaaaaaaaaaaaaaaaaaaaaagatccgtctttcctcgtttcttcttgttttatagaaaaatggttatactatatgcactcttccatagcttactttgcagttataacttttgaatatccttctatgtcagtaacacagttctatctcattctttctaatggctacatagcaatgatgatgatagctaacattttctgagtaattgctatgtgctaagaactttgtctcatctaaaagtcacaacaattatatgtcaaaagaagccccattttagagatgaggagcctgaggcttagagaggagtggcagatagaataatggtcccccaagatgtctatgtccaaatccctggaacctgtgagtttatcttacatggcaaaagggactttgcagatgtgattaatagtaagaacctaaaaatggagagatcatgctggactatctaggtgsacccaatctaatcacttgagtccttaaaggtrgagccttttccagctgggttagggagagatgtgatggtagaagcagggtgagagagayagcagcctgagaaggattcaccaccctgtcgctgtttttgagaggtcgacatttatgtgcagggacaagcaagaggcctctaggagctaagggcagccctcagctaatagtcagcaaggaaagagagatctcggtcttacaaccacatggaactgaattctgccaacacctgaacgagcagggaaagggattttctcttagactgtacaggaaggagtgcaaccctgcccacccactgattttagttcataccagacttctgacctgctgaactgtaaaataatgtctgtgttgtttaatgcccataaaattgtggtgatttgttaaggcagcaatggaaatgaatacaagcagccacaactaataagttgtagtgaaatgggagctcaggtagtctgattccarggtgcatrtatatagctaaatcagagtttatttagccagtccattactggtgggcattaggtggctttcaaaattaatagtttttaagtatcacttgtgccacacatctgttctaaaaatgctatatttcttcaacggaggctagagcttctcatgtgcacaattagatactttatgaataacatctcattaattttgaacgataggctgtccaacagggccctggaacccagctgttgaaagaaatcactgattttaaaaaattaatgtagcagccagctcaaacatgagggcccagtgagtagccagcattttatgggagtcactgatgaagggtctcatcaggatgtaatggcacaagctcgtttctccgagggcgctattctgtctttgtttctcctgggggcttgggctgcctttgggagccttagtgtcttgggactcyagaaggtgggtgatgtgtagatatttatttgtgatgctgtgatgcctttcagcactgtctacttggccttcaaaacctttgctttagcttctgctttggaaggggaaaggacttcctttgctttagggactatcttgaggaaaaagctagaaagtggctttttctactcctggcttgcaccaatattttggtgagcttgcagatctggtagcatcctttcttttttcccatgctctttcctttgtttcagaacttccttttattctactgccttggaaatttttgttttctccttcagctgtgatgttaaataattagaggtgtgaaaccctttgactcaattattaggcttgttttttgtccttgcgctcaactgcttgatcctagcacgttgcagtaaacatcctcttggttgtgaattggaaagatgtcaagttaaagaggtttgtctgttgttactttatttttgcttcattttacctaagaaacaagaatggaaatttgaattctgataaattttagagtgttatgatgaataataacacctcctatttattgaacacttactatgtacctaacactattaatttttcagaatgctttcamttatttaagtcctcagggctgttctgtggtaggtgctctgttatcccgatttcactgttgaggaatatgaagttttaagaaattagacaacctgctcaaggctatatagtagtagaatgataaagctgagatgcaaacacaggcttgtttggccagtctgcactcttaaccactgtactataaygttccttggcatttcaagttatttgtaagcaatgcttccaggaacattttttaaccagaaaaaactaaacacagaactacttagttgtgtagaagcagaaagaacactgggataagagtcaggagatggagccctagctgtgtgcctaactagccaagcaagtccctgaaccaatcacttcactagccccagccctgtgcttttctcatctgtaaaagtgccaaacttctagcatcctgaacaaaacttgatttcctcttctttagtttttcctgtactaaggtagatgaaacccaccattcccatatcatttatgacaactaaggctggtatcagatgaggccrttggcatagggctacttgtccagaaaaaagagggaaaatgcaatgattaaatgccacccaccctgggcagaaagcaaactaagcgtaatgactcaaatccaaagcctagaaaatcttggtggaaacagggtggatatattcttctatcttcaattttctctgtgtgtatttattgttgaccatagaaatgtggataaacatgtggctcaccattaaccatcatctccaacttgctaaagctattgtggagtaataataccaccaaactttgtccagctagaaatgagacccagccatagagaagacttcctgagtttctcaagtatgtatctgttctatcacatagcttttttctatcccatgtgttatgggctgaactgtagtctccctagcaaattcatatgttgaaattctaacccccagtacctcagaatgtgactgtttgggtatagggcatttaaggaggtcgttaaggtagaatgaggccatacaggtggtccctaattcactatgactgttgcgcttagaaaaaaagtggattaggacacaaacaacacagaaacaaaagggtgaccatatgaggacacagcactaaggtagacatccacaagtcaagaagaaagatctcagaagaaaaccatcctgtcgacatcaacttgatcttagccgtctgttctctagaactgtgagaaaacacatttctgttgtttaaactacccagcctgtggtattttgtaatggcagccctagcaaactcatccactatgttttaaatccaggttttttttttaagtttctctttttttttcagaagtttctaaccttaattttaaatttgtttttctttcctcctttgcttgagctagatttctacaccctaagaagtcatactcaggtttctaaattcatccacatactggagtacaaagattccacaaattttaacagtattcgaagagtgctcagtctttgagatgagtcttgactggtactttggatataacttacattttatacctctgtaaattccttttcttattgctcacctgtgtcagttctcaaatagattatttaattttataacaaaccaacaaataaaacaaagcactgaactatgtaaaactgacttctcatcccctacccctgccctatgaatttttctctttttcttactccttaccttgggtaaaatggcagcagcaacaccatgaacccaagttcaggttctcaaactgggaacttagggactcattcttcattctttctttgtccttgcctcttacatttaactcattattcaaagtctgttcatgcttcttttaaaatgtctaataaaaacactcgtaattttttttttttaagagacaaggtttcaccatgttggccaggctggkcttgaagtcctgacctcaagttatctgcccgccttggccccccaaagtgctgggattacaggtgtgagccaccrtgcccagccaacacttgtaattttaaactatattaaatttgaattggcaatatcaatatggactcatgaattaaaaacatatatgtgtgtgtgtgtgtgtattctagctctgtacactgaaagaacatagaagcaatgatattcctctagcaatgagcaatacctagaacccagatcttggtttctactcatctttgtttattgaaacacagtaaacaatgttcctgtttacaggagaaatagctgattctaggtgttgagcatggaaaytacaaggtaagtttaggacattttgatataccaaggaagtgctcagcgatttatggrggcatgatacaaggacacaggggctagtgtgaaagggctcccactagccaaagtttggacagtttgaatatggctatattgattgcaaaacattgaatacataaaaattcattagtccatagyaatacccaaaaaagtgaaagaaaaggaaaaaaaaactaatttgccatcattggaagtgatcattcaataaatccttactctgacattgatagtaaaagggaaagaactaaacatttaccttgyctttttttttttttttaatgctttaagttctagggtacatgtgcacaatgtgcaggtttgatacataggtatacatgtgccatgttggtttgctgcacccatcaattcatcatttacattaggtatttctcctaatgctatcccccagctcccaagcccctgacaggccccggtgtgtgatgttccccaccctgtgtccaagtgatctcattgttcaattcccacctatgagtgagaacatgcagtgtctggttttctgtccttgtgatagtttgctcagaatgatggtttccagtctcatccgtgtccctgcaaaggacatgaacccatccttttttatggctgcatagtattccatggtgtatgtgtgccacattttcttaatccatggtgtrtatgtgccacatattcttaatccagtctattactgatggacatttgagttggttccaagtctttgctattgtgaatagtgccacgataaacatacgtgtgcatgtgtctttatagtagcatgctttataatcctttgggtatatacccagcaatgggattgctgggtcaaatggtaattctaattctagatccttgaggaatcgccacactgtcttccacaatggttggactactttacactcccaccaacactgtaaaagcattcctatttctccacatcctctccagcatctgttgtttcctgactttttaatgattgccattctaactggcatgagatggtatcttattgtggttttgatttgcatttttctgatgaccagtgatgatgagcattttttcatgtgtctgttggctgcataaatstcttcttttgagaagtgtctgttcatatcctttgcccactttttgatagggttgtttgttttttttcttgtaaatttgtttgagttcatcacagattctggatattagccctttgtcagatgactagattgcaaactttttctcccactctgtaggttgcctgttcactctgacggtagtttcttttgtcgtgcagaagctctttagtttaattagatcccatttgtcaattttggcttttgttgccattgcttttggtgttttagtcatgaagtctttgcccatgcctgtgtcctgaawggtattgcctaggttttcttctagggtttttatggttttaggtctaacatttaagtctttaatccatcttgagttaatttttgtataaggtataaggaagggatccagtttcagttttctacatatggctagccagtttccccagcaccatttattaaatagggaatcctttccccatttcttctttttgtcaggttygtcaaatatcagatggttgtagacgtgtggtgttatttctgaggcctctgttctgttccattggtctatatatctgttttggtaccagtatcatgctgttttggttactgtagccttgtagtatagtttgaagtcaggtagcgtgatgcctccagctttgttctttctgcttaggattgtcttggcagtgcaggctctttgttggttccatatgaactttaaattagatttttccaattctgtgaagaaagtcattggtagctcgatggggatggcattgaatctgtaaattaccttaggctgtatggccattttcacaatattgattcttcctatccatgatcatggaatactcttccatttgttggtgtcctcttttatttcattgagcagtggtttgtagttctccttgaagaggtccttcacatcccttgtaagttggattcctaggtattttattctctttgtagcagttgtgaatgggagttcactcatgatttggctctctgtttgtctgctaatggtgtataggaatgcttgtgatttttgcacattgattttgtatcctgagactttgctgaagttgcttatcagcttaaggagatttggggctgagacgatggggttttctaaatatacaatcatgtcctctgcaaacaggaacaatttgacttcctcttttcctaattgaataccctttatttctttctcttgactgattgccctggccagaacttccaacactatgttgaataggagtggtgagagagggcatccctgtcttgtgccagttttcaaagggaatgcttccagtttttgcccattcagtatgatattggttatgggtttgtcatagatagctcttattattttgagatacattccatcaatgcctagtttattgagagtttttagyatgaagggctgttgaattttgtcaaaggccttttctgcatctattgagataatcatgtggtttttgtctttggttctgtttatgtgatggattatgtttattgatttgcgtatgttgaaccagccttgcatcccagggatgaagctgacttgatcgtgatggataagctttttgatgtactgctggattcggtttgccagtattttattgaggatttycgcatcgatgttcatcagagatattggtctaawattctctttttttgttgtgtctctgccaggctttggtatcaggatgatgctggcctcgtaaaatgagttagggaggattccctctttttctattgattggaatagtttcagaaggaatggtgctagctcctctttgtacctctggtagaattcggctgtgaatccatctggtcctggactttttttggttggtaggctattgattattgcctcaatttcagaacctgttattggtctattcagagattcaacttcttcctggtttagtcttgggagagtgtatgtgtccaggaatttatccatttcttctasattttctagtttatttgcatagaggtgtttatagtattttctgatggtagtttgtatttctgtgggatcagtggtgatatcccctttatcattttttattgcatctattgattcttctctcktttcttctttattagtcttgctagtggtctatcaattttgttgatcttttcaaaaaaccagctcctggattcattgattttttgaagggttttttgtgtctctatccctttcagttctactctgatcttagttatttcttgcctttgctagcttttgaatgtgtttgctcttgcttctctagttcttttaattgtgatgttatgatgtcgattttrgatctttcttgctttctctagtggacgtttagtgctataaatttccctctacacactgctttaaatgtgtcccagagactctsgtacattgtgtctttgttctcattggtttcaaagaacatctttatttctgccttcatttcattatttacccagtagtcattcagaagcaagttgttcagtttccaggtagttgtgcagttttgagtgagtttcttaatcctgaggtctaatttgattgcagtgtggtccgagagacagtttgttgtgatttctggtctttcatatttgctgaggagcactttacttccaactatgtgctcaattttggagtaaatgcgatatggtgctgagaagaatgtatattctgttgatttggggtggagagttctgtagatgtctattggatctgcttgttgcagagctgagttcaggtcctggatatccttgttaaccttctgtctctttgatctgtctaatattgacagtggggtgttaaggtctcccattattgttgtgtgggaatctaaatctctttttaggtctctaaggacttgctttatgaatctgggtcctcctgcattgagtgcatatatatttaggatagttagctcttcttgtggaattgatccctttaccattatgtaatggccttctttgtctcttttgatctttgttggtttaaagtctgttttatcagtgactaggattgcaacccctgcttttttttgctttccatttgcttggtagatcttcctccatccctttatttcgagtctatgtgcatctttgcaggtgagatgggtctcctgaatacagcaccctgatgggtcttgactctttatccagtttgccagtctgtgtcttttaattggggcatttagtccatttacatttaaggttaatatggttatgtgtgaatttgatcctgtcattatgatgtttgctggttattttgcccattaattgatgcaatttcttcatagcatcaatggtctttacaaattggcatgtttttgcagcagctggttccggttctttctttccatgtttagtgcttccttcaggagctcttgtaaggcaagcctggttgygacaaattctctcagcatttgcttgtctgtaaaggattttatttctccttcacttatgaagcttagtttgactggatgtgaaattctgggttgaaaattcttttctttaagaatgttgaatattggcccccactttcttctggcttgtggggtttctgctgagtgatctgctgttagtctgatgggcttccctttgtgggtaacttgacctttctcttcggctgcccttaacactttttccttcatttcaaccttggtaaatctgacaattatgtgtcttggrgttgtcgagaaagatacttctcgaggagtatctttgtggtgttttctctatttcctgaatttgaatgttggcctgccttgctaggttggggaagttctcctggttaatatcctgaagagtgttttccaacttggttccattctccccatcacttgcaggtacaccaatcaaatgtagatttggtcttttcacatagtcacatatttcttggaggctctatttgtttctttttactcttttttctctaaccttgtcgtctcaattgatttcattaatttgatttgcaaccactgataccctttcttccacttgattgaattggctgttgaaggttgtgcatatgtcacaaagttctcgtgccatggttttcagctccatcaggtcatttaaggtcttctctacattgtttattctagttagccatttgtctaatcttttttcaaggtttttagcttccttgtgatgggtttgaacatcctcctttagctcagagaagtttgttattactggccttctgaagcctacttctgtcaactcatcaaagtcattctctgtccagctttgttccactgctggcaaggagctgcagtcctttggaggagaataggtactctgatttttagaattttctgttctrgtttttccccatctttgtggttttatctacctttggtgtttgatgttggtgacctacagatggggttttcatgtagatgacctttttgttgatgttgatgctattcctttctgtttgttagtttcccttctaagagtcaggtccctcagctgcaggtctgttggagtttgctggagttccactccagaccctctttgcctgggtatcaccagcataggctgcagaacagcaaatattgcagaacagcaaatattgttgcctgatccttcctctgaaagcttcatcccagaggggcacctgcctatatgaggtatctgtcagcccctactaggagatgtctcccagttaggctacacgggggtcagggacccacttgaggagtcagtctgtctgttctcagagctcaaacgcctggctgggagcaccactgctctcttcagagctgtcagacagggatgtttaagtctgcagaagttgtctgctgccttttgttcagctatgccstgccggcagaggtggagtctagaggcagtaggccttgttgagctgcagtgggctccacccagttcgagcttcttggccgctttgtttacctactcaagcctcagcaatggtggacacccctccatcagccaggctgccgcctcacarattgatctcagactgctgccctagcagtgagcaaggatccatgggtgtgggacctgcggagccaggcacaggagagaatcacgttgtctgccggttgctaagaccttgggaaaagcccagtatttgggcagaagtgtcctgtttttccaggtacagtctatcagggcttcccttggctaggaaatggaaatctcccagccccttgcacttctcaggtgaggcaacaccccgccctgcttcagcttgccctccatgggctgtacccactgtccaacccagtcccaatgagatgaaccaggtactgcagttggaaatgcggaaatcacccgtcttcagcgtcaatcacactggaagctgcagaccagagctgttcctatttggccatcttggcctakcttaccttgcctttttaaaaggaattttatatcatctacttgatgagggaaaatttatctttagagaagaatgccaatgaaggagtgataatatttgaaatttactaatttgcaactcccaatgaaataatcgattcaggcaaggatctttaatagtaaaagattattgcagaaccggttattcacacggttacaaagcatcacagaacatgtcacttcctaaatgtaaaaagtacaaaggagaagatctggcagtcaccactttaaccaagtgattgaccttagaatcactaatacgggacaaatttgtattatgttcctcctgatggggtacagatgaaattcatgaaatcatttattaagtattcttgccaaaagggcttaatctgaatcgaagtaagcttttaggcaggcctaacctcaaataaataggagttacagggaatcaaagaaaaatcaaattacaaagaatcctgcagaagaatctgaatttgagatattctacaaaacaactattttctttttattcctccaaaagtcatttttatgtggggagaaggactgggggagctgtcccaggttaaaagagactaaaaggccataacaacccaatacgagaacttcaaaggactcttagcttgataaaaacagctaaaacttttagaaacatttagggaaaacctgaatatgagcatatattaaataacatgggtattatatgatattaaggagctaatattaattttattagaaatgataatgacattgcaattatgtataagaaaattcttatttttaggagatgctgtttgtttgtttrtttatttatttatttatttattgtgatgcagggtctcactttttcacctaggctggagtacagtggcacaaacatggctcactccagcctcaacctcctgggctcaagcagtccttctacctcagcctcccaagtagctgggattacagctgcatgtcagcacacctggctaatttttgtattttctgtagagacagggtttcaccatgttgcctagactggtctcaagctcctgggctgaagcaatctgcttatcagccttccaaggtgctgcgattacaggcatgagccactgcgtctgtcctatagaagatgtatatttaggtgttaatgtttaggtgtgaggtgtaatgatttcaacaactttcaaaatatatayacacacacacatatatatatatttgtgtgtgtatggaaagataaagcaaatatggcaaaatagtaacaattgttgcatctacattgaagagattgtagagatatttattttactgttctttccaattttctagatgtttcatgttaaacaatttagaaaagaatttatgcctctaccccctcttcttttgtgcctctggaactcctttctatccccgtggtcactctctgactactgctcttcatcgcctcttacctgaacctttgtggtggcctcctatgtttctgtcttcagtctaaatgcctccaagccatctatccgaggcaccttcctaaaaatcagttgtcaccatttctctaccttgcttcactttatcagtagtcattcccttcctcatcacccacrtggtaaagtctgaataagcttagcaagcaaggccatccacacttttgcttcaagctacactgacatcacatccttgttcaaggtgttctcctactgcctcatagcctaagctctacctaggtcacaaactcaaatgcccgcatagagggctgggaataaaagagtttaagttgtgggtctagggtggactggggatcaggagccctgtctgaagggggcagctattacttgggaccaggtgagtgttgctgtgagaggatgtgggccaagtgtgaaatctttgtttccattaagtcagaaataaagatttgtatactaatactgccctattttaaatgctaatggtcatttatttttttaaaaaaactgctgcagaatgaaaaaattgtgactgcagagtaygattctgtgataacccatgggacttaatgctcactctttcacactgacctctttgtcattcttccttctctctccatggtgggaagactttctgcatccttttcctggtgaaatctggtgaatacttcaaaacccagcaggcaagaccattcatgttgccctgtcaggcccgggcagactgaggggctctctctttagtgcacctcagccattcatttttacaaccttccttctagaacttgtcacggaattacatatctggttgtttgtcttctcccactggattctgaatcctcatgattaatagccacattttatacatctttgtctcccctgagctgctcacagtgtctggtgtaaagtcagcgttcaatgaacatctgttggttaagttgcaggctgttaaaggtaatgctatagaagaatttaggacatggcttctatggcatccagtttaaaatgtattaaaaaagtctataaatcaattaaagaaaattttctatgattataatattccaagtaagtttctcttttgagatcatttgtctattgtaggaagtcaggtaaataagtttagttttaaaaaacaaaaatttctcaaatcaggattctttctgaccctttaatctcagataatgataatagagtattatttcaaggattcccyttctagcacaatcttgctcaagatcaggccaagaatatagacaggttcagtaaaccacaagtgctctaaacctgcttgaacctatgtaagaactgagcagtggggtgtgcactgaatcaaatcaccttctctcctcgggacatcaattcctatcagtactgtatgcacctgattctcttattcgtgtctttttcatgcctttctttaatgaaatactttttccctcttagcaggccttccaaaattcagctcaaaacttacttcttcctagaagtgtctgctatcacctgccttgattgttcctctgtattatattctccatttatctgtgtttcttttttgttaggtgtggcctactctggtgtaagacatataataagamtaattatgatattaagaaaaagataatacggttatcataatatttggctttgggaggccaaggcaggtagatcacctgaggtcaggagaccagcctgaccaacatggtgcaactctgtctctactaaaaataaaaaaaatcagccgggcatggtggtgtgtgcctataatctcagctactcgggaggctgagggaggagaatcgctttaatccaggaaacggaggttgcagtgagccgagatcacgccattgcactccagcctgggcaacaagagtgaaactccgtctcaaaaaaaaaaaaaaaaaaaaaaaaagaatcattgagggccattgttaaaagaaatagcttaccagacccctccctggaaattctgattcagtgggtctggcatggggtagggaatgaggataggtatttgtatttttaacaagtgccacagatagttcttattatcaggcaaccctgggaaacattgccatcatccttataagcttgggtttgggagcagactagtcagagtttgaggatgggttctcatgctttttagcgtatgtaacagtgggcaagtcaccatgtcctaagctgtgattttttcatctagaagaggaggatgataatcactgtctcagtgttgttctggggactaaatgactcatttagagcatgagcacttagaaagttccagacattctaagtgctcagcaaatatgtgacaatcatattcatattttgcttgcagtttgcttggttatgctactgtgattcaaaatctgaatgatggttttcttggttcttctatagcactatggtgacccaggagtgtgacccaggagagtgacccaggagattttatcacagccaaagactattgttgagagcctgctcatctctgccaactttttattgactcaataagttatcaccctttgttctctttaattttacctgtcatttccattgaattacagaaaggtctttgaggccaatgaccctgccatctagttttgttatacagtagatccagtatcctgtacagtgggctatcaacagagggcatgatctaataaaacacacatttatttcgtggagttatagagccatcatctcttacttaggttatgacagctcctaatgggtcttggagtcttgaggtcttatgctcttgcttccctacaatgcagcctacgctgcagccaaagcgatctttgagcaatatcatcacagcatgccagtctgtttgaaaccttccaatcctttccctgtatttataataaaatccaaactctttactgtggacttgtaagccctacctgatctgggctagtctgtctgtctgaccgcatcccctgtgattcacctcctggatcgttacattgcagcaatactgaagttctccctccctagactgaccttttcccccatcatcacctgccacttagcccagaggtcaccttagagatcttccctcatctccctatctcatgttttcctgccactatttcctatcccatcttcctgctttattttcttctcatcacttaccactgtccaatattgtacttatcagtaggtgatgttagtttgtgtgtttattggaagctccatgatagcaggcatcttgtctatcttgtattccaagtactgggaacagaacctggtaccttcatgggcttagtagatagatagatggatggatagatagatggatagatagatagatagatagatagatagatagatagatagatagatagatgaactttaaagaacatcagccgggtgcagtggcttatgcctgtattctcagcactttgggaggcccgaggtgggtggatcacctgaggtcaggagttcgagaccagcctggctaacatggtgaaaacccgtttctactaaaaatacaaaaaattagcctggtggcgcatacctgtaatctcagcaactcaggaagctgaggcaggagcatcgcttgaacccaggaggcggaggttgcagtgagctgagaccacaccattgcactccagcttgggcaacaagagtgaaactccatttcaaacaaatgaacaaacaaaaagataaagaacatctatatagtctaatatatttcaacttttttaaagcaaggaactcttatcaaacaaaatgtttgtttttaaattattaatttggttgttgggktttttttttaacttatttcttgacaattaataggattccatacacataaaaagttcttagcaaacacttaacaatttactgagtccgtgttcaatgagatccaccaccagggggacatcaatccactgactggtagctatggatagtgagaaaatctggctgaaggagaagcagatctgactccmggagacaaaggcaggcagaggcmccgagtgttctggtagtgtgactcctccagggcttccccatggctctgcagacagaggtggtaggaggcaggagaggcagggctatctctggagaacccagaagagaagcagcaaaagaggactctttaatgcaggccaggcttcagtgagaaactgcctggcctggagcagccctgtaccagtggctgcagcactgcagaaacaatggcagtggtggtggcggyggggataggtggaagcagcagtggtggtgatgccacaagaaaaacttcttagggaggtactaagatgggaagcagcctcttaccaggctgaagccagagggatctgagaagggggcaatgatggcagtgacaagcaagggacagcaaggaggtcctcaaaagtgtcacattttcccaggagaaaggaagagattcaaagaactgaaattccagcagttgagcatgtgtgatctcagtcagagccactggctttgttgtcatttggttgtgtttacttttcagtatcattctcaagaattaagcaagataacatgtgcaaagcatctagcagagtgcgtggggtgtagtcagcaaatgtcgtttcctctcgttgttgggcaaccaccagtagcaccatatcagaattaaaggtgaatagaggaatactgtgttaagctctgaggaagaaacaatgataaattagacattgtccgtgtcttcaaagagtttacaatatggaagtgacatgatcgttcaaaaggcagaaagtgcaaagtgctgtctgaagcagtgccaataaagtgttaagtatgttcatatatacttatacctggcataaattccagcgtagcagactggataagctttatggagaaagtttggattttaaagaatgaatataatttaggcatgggaagcatggttaaaggataaagaggaggagaaggtagtgaaagaataataagaaatttaggaggaaaatcaagattagagttctaaaaaccagggagaatttcaaacaggagatgatgagcaaaagtatccagtgtgaaggacttctgcttctggctttgatgaagttactagtaccagccctcttgccataaatagctgtaaaactggacaaaatatatggagcaactgttttcagacgttgaaattcacccagtgttgaactttgatccctgggaaaagggaaacacatgagatgaaacccttggtcaccttgtcttttttcctggcggcacagcaaaatggagcccaagttgataatggttgctttactgttctgaggaggcagagatcacagttcagggyggttgaggtggttggaatttgtaggtcaggctaatgaagagaaagctgcacagagaaacaggtccagaaatctgcatatgggtactataaagtctttggacaaatgctaagcttctcactttctgggtgagactctacaaagtctggtggcaaatagctactggggggctgtaaactgggtggagattccagaaggtgcacaaaactggagatgtagatgttctgagtggagatgttctcagtgattccctggggttttcagtgaagaaccaagaaaggccaggcggtaggaggagggctactctagccctggactcaaggctatactaagttcatccaaataaagtttaaaaacagctttgtaaaaattaagcttctccactagtaaattaacgtaacaaaacttaacactctttaaatccagacctgataatgtagcgtttaatgtctagcatacaattcaaaaattactagatatgtgaagaggcatgaccacaacagatttttttaagtcaatagaaacatactcagagatagcagatatgttaaaattagcaagcaaaggctttaaaacaactcttataaatatgtttaaaattttaaagaaaatatggactccagtaaatagaaattctcactagaaaaatggaaagtataaaagaaaaccagctagaaattctagaactgaaaaatgtaacacctaaaatgaaaaaaaaatccctaaatgagcttaacagcaaaatagattccatagaagaaaaaaaaatagtgacattgaagacagggcaatataaacgatctcagctgaagcacatagagaaaaaagcactgaaaaaaatgaacagagcctctctgacttgtggaatagtatgaggtggcctaacatctgtgaaactggagttccagaaaaagatgaaagagaaattggggcagaaaatatatttgaagaagtgatagctgaaaaaattcccaatttggtgaaaaatattaacccataaactaagaatctcaataaactccatgcaggataaaaaacaaagaaaaccactcctgggtacattataaccaagtttatgaaagccaaggatcaaagaaaaaagttttaatagcagtatgaggaaaagactcattctgcgcaagacccaggggaacaataatgctgatttatcaaataagccaaaagagaattgaataacacctttaaggtgctaaaagaaataaaacctgtcaacctggaatgagaaacctagtgaaagataaagatccyttaaaaaaatgaaagtaagaaaagaagagaaaatgggaagggaagaagggagagagacaggaaaaaaggaaggaaggaaagaaggaaggaaggaaaaaagaaaggaaggaaggaagaaaggaaggaagaaaagatgaaggaaggaaggaaaaaagagaaagaaagaaagaaaagaaagaaagaaagaaagaaagaaagaaagaaargaaaagaaagaggaagkagggaaggaaggaaggaaagraaagaaaagaaaagaaaagagagagaaagaaaggggaaggggaagaagaaaaacactgccaagcaaaaaccaaatgtatcaatggtacacataaactgtaagaaatattaaaggaagttcttcaggctaaaagaaatgataccaggtagaaactcagatcaacataaaaaaatgactagtgctagaagtggtaaatatgtgggtaaatagaaattacttttttcyttgcctattattgaatgagtaaaacttaattataaagctgagtttttggtagacattgcaatagtctgggaatcaggaaatctgggatctggtccacttctgtaaccttaggtaagtggcttaatcaatacttgatattcctctctaaatggtaacaattcaagaagtttctttttttttttttgagatggagtctcactgttgctggagtgcagtggtgcgatcttggctcactgcaacctccgcctcctggcttcaagcaattctcctgcctcagcctcccaagtaggtgggattacaggcatgtgccaccacrcccagctaatttttttgtatttttagtagagatggagtttcaacatattggccaggctggtctcgaactcctgaccttgtgagccacccamcttggcctcccaaagtgctgggattacaggcgtcagccaccgcacccggcctcaagaagtttctttttatcattgctaaatacctcaaaagggctatctacttattatttcttaaatttaatgtatatatgaattacctagggatcttgttaaattcaagatacattaataaagttattgtggtatagtaaaaagacagacaagtagatcaatgaaattaaaaatatatatattcttttttatcccttttacttctaacttgtttatacttatgctttatacataaagcatctcttttataaactctatagcattagttcttgtttttttattcagtttgataatctctgcctgttaattggagtgttttgttcgatgttgaggttacagctactattttgctatttattttctcccatctatttgttttgttttgtctcctgttgttgctgttcctttgtttctccttttcttccttcttttgaatttgttgagaattttttttattatttttatttttttgagacagggtctcactttgtcgcccaggctggaaggcagtggcgtgatctctgttcactgcaacctccacctcctgggttcaagcggttctcctacctcagcttcccaagtaactgggactacaggcatacgccactacctccggctaatttttgtattttttttggtagagacagggtttcaccacgttgtccaggctagtctcaaactcctgacctcaagtgatctgcccacctcagcctctcaaagtgctgggattataggcatgagccaccacacagggctcgaaaatgttttaatatttcattttatttcctctattggctkgaaaactatatgttgttgttttattttgggctatctagggactgaaatgtgcatccttagcttagcagaatctactatgatttcacatcactacatgtgtagtataaaaaacctacaaaagcaaattttctgttttccaatatgttctttgcactattgtcatacttctacataagttaacagctccacgataagttttattatttttgctttaaataatcaattgtctttaaaagaaatgaaataaaggttgatattagagccattctggaaaacttcctaggtttactctgattactgtattttccaaatgtcgtatgtgaagtcctttacaggccctacctgctgggttggatgaagcaatccttgagggaagtcaccgctatagtcctgttggctatccctcagaatctcttcaaaattcaccctggagaaggagaagagaaggatgcttagagaggaagggaaatactggcaaggagatggggagaatgaaaccactttaagactgtattttaaaggctcgttaagcttcactattaatgaagtataatttgaagagatatatttccttctggaaggcaagttttaagacactagggggttagttcacccagagagatgctggtaattatatttgaattgtcagtaattctagttccatcaccagaaagcaaaatgcaagtagtaagggatgactctacttgaaatctcagggggaagaaagaactttgcttctctcaaggtcatctggtgtttaaagaaaatgtgtcattgatgatttaataatatataacatgagaaattgcattagtataattgtgttacattttataatcttattttttatgtagagaacagattgccttaaatctgcaagtattgtatttgagttaaaattgcattcaacataccataaatatgtacttcctaatcatttaaatgtttgcaatcatgtgtatctcagttaaaatatatgttcacattatactttaaatttctatttcctttggacattattgtattttgcaagatcagaaagattatctaaaaattttctgtaatgataatggaaaccatgttaacatctgaatcatgttcaatgtgaaaaagatagttggggccaatttaacagttagtactctttcttggcagagaatgacagaacactgctgtaaaaaggactgctgtcttttctttttaaatctgcaaagtgttgctaagtaccgtagtccctcgcctttggaaataccatggctttttgggtcaccagctgtgtgttatataccaatagagagtacaactcacagccattttttgcattcttagtgctatttgtggctgtttctttacctcatgagctgtatgacaccttttatttaaataaatccttatgtttgtgatcactgtgcatcaggttattgggcctgtggctggccttccagttgttcatcagtctgagctcacaagaagcagacacaattgtcagtcattgtgctgttctgttaggttaagtcatcctggtggtatccaaaacatttctggtataagaattatttttttctgttttgaattaatgaagcagaaacacaaactgtgaacattgtctgtaaatagcctttgttcctttatgcagaatgtcctcaatgttaaggcctgcaagaagayagtacgtgttatattagttttatagtattagtgttygtgctgaatgatggcaggaaaaccagctaggttttatttcttactggttattattggttgatgaattcctgtgaaggtttatgatattaggttaaattatatgaaattgctatttgtgtagacaatttcatatgactcaaccaaacaggaaacaaagcagcttcagttctaggatacaagatataattcaattaatttgctgtacatcattgtgagtctgctacaaatatcttaaattaatacatataacttaaaaattggaactggaaaggaaagatttgttttcctcttattcttactttgtttttactctgtgtcattgctctcttgctttcaaggaaaataccgactctatgtacagaacatctcctgacatttgccattctgtaggtcttgaggggtaarcaagtaagaacacaaatattacttactcagttgtgagttaaagtcatctttctattattctaacaataacaaacttgcagctcttccttagtgaattttcatgaattctcttctctctagagaagactatttcatcacagaaatatattagaggtattaaaatgcctttcccctctctctgcttccatatttctccatttgcagtttcatctgtatggaaaaggagctctggtaactttggccaagacttttcagtaggaaatgcttcaaaatacaaagcaagagctattttcaagaaagaccttctaaatttatattaggtaagttaaattttagatgtcctcctttacagctaaaagtaaacacatttgatttaattatattcatcaaaatgtacttgcattcaagtgttcttatatgtcaatactcctggatagatttaaattacattgacagaaaacatccatttcctcacattttcaaacaccaagcaagtagcagaacccggtctttagcgtggttgtattttaaaaaaatgtaatccagccaaggctgatcttgtttttcctttattctttaagccagaagcaattacttttcatttcaggattaagcgtctgtaacgttgccactcgtcgctgaggctcctggtttcagcatgtctccttggttcccagccagctctgggtgttcaggtagcagctgtggctgggagtgtctctccagtccacattccttggccatgaattttgcagccctgtttatctgatgaagacctcccagtagtgaattgctcatgacattgtcacacagaccttaatgaatgatatggaaagatactgaatatttttcctcccggaatgccaaccaagcttcagtgtcccagcgccttcattccagctgatcatggcaaaggcttggtactgagatccagtgagacctttgtcctacaaaaaccacattctcactggatgcctacaagtcctctctatgggactgttacccaagcctgtttacagaattttcaacaattacatctgcccatttgctgagtctcacttctctgcactaattgttgacttcaatttatatttttaatgtacaaatgctatcaccaacttcagtgcatgaagacctctctttcttctcttcaaacccatgactttgcttggaataacagggatggctttatggcatggctttctcattatttcatgtgtcttcattttgctttcccaagccagattgtaaattccttgaaagaggagaccctgaaaactagaaatacctatacagacagatagacagtaaaaaaaaaaaaaaaattggacagaaagacatctgttgctctaagtaatccagaaaatttgccttaacacgttcagaagacatatttggctataatatacaactcctctcctttcccccgcctgccctctgctggaactgctaatgagcagtaagatggcaaaagcaggacattgtatgggaaatgtgggaaaacaggggctagtctgactagaaggtgagttgagtaactgtgatttgtgagtccacaatgggaatctttgaagtccttcatgatgtgcctttgtatgactagcaatctcctcacaagactctatggttcactgtgcacaaagatatgattctrcctgcctgcctgagatagaccaagtgaccttgtgtgttctcttcctcctctgtgcttgtttcatctgcagaaccatctgatggatggcagacagctgaaccaggtactgccccttcccaaacrcaaatgccctccccattcaccattccctagagcgttcacttccttcatctatgaaaggcaattactagggtctagcaagactgccaatttggtaatgcaaagcaggagataagtgtgaaactctagactggttttctgtttcaaagggcagcaggatgtgacagctgctgaggcagccctttgcccttggagaggagaagcaggagtgtgatcactagatgacctctccctcctgytgtctcctgggtggtagggacagtctctctcccaacactactcttggtcaggtggctacatattatgaaaaagaggaggaaaaacatgtttttgcttttaaaattattattaagagagagtactctttggggaagcagaatccattagctgaattcatttcagtagctatgtttaattaagttaggcagccttaatgcaattttattatgtagcctttaagagctgttctggtaaatgcccatcctataaatactagcactactttatatgtgtgatatcctttttggaagggcaaatctgaattattatccagatattaatctgcacacaaccctatccagacaatgcaaagatgcttcctcatattctggacattgttcaatacattcagaagggggaaaaaactgctcagatatgaccttctacattttaagtcagtggataagccagcctggttgcatcccaaaacatacttttgaacatcagtttcaccttactactgaccaagtaattgatttctgcatttcattatgtaaattaaacactagactytgaattactagaaatacacagttagccaataaacctttcttataaaatgacagtattttaatttattagatgcrttggcatgtattcatgcctaagatttcatcaatcaattttccattttaaaaagctgtctctggaagcaayagtggagagatgctgagttccaaaagcaatgttgtgaaaggcagcagstctagcgttccaggcacatgcttaactaaattctagtcaataaccatgtggctccaagtataagcccacattttttaaagtatctaccttctgaactgactcttttggaatgtcagaattttaaaaagaaaatatttaaatttctctatttaagaggtgtgcaatgtttgttcaatattggagcaacctctgatattattttaaaatatttattttgccactttgacagccttctacactgcccttgggttttaattttgtttacagtactaaacttcaatagttggcttcagattaaatgaatattagtatgttgtggtgattttattaattatttgcttttgaaaaattttttaagctgaaagtcactccaaaatagaagctttaagaatcactaccaccaacttaactttaagtcatttattcatttcattcagtyaacaaaaatatatttaacacataggatttgactgacttatccctaagcaaggtaggcatagcacctggggcccacaatacttttagaggcctataaaaacagtcttttaaaatcagaagaaaacaaatttttttattttaaaatcagaagaaaaagataaaattttaggtcaaagaaagtatatataatattaatatattcattttcataccaggatgatcataaaatataattttaaatattttttaatgaaggaaggggcccatgaaggcaaaagtttccaggacccataaaatgataatgcaacccttcgtgacatatgccaagttttatctatgctagattctaggggtaagaagatatgtagggcacagtttctgtacccaaagcactcatagtctaatgaagaaaatggacatagacagttcataatgtggttggttcccttgacattgtttgagagtaattacaagctgaaaaacataagggttttactacaaaatgtcatttaacacatagacttggccttacatttctttccgttaaacttatacaaaaattaggtttatatatatcttaatgctacatagacagtgtaagtatatatgtttgttcattttaaacattactgatattgccattcagatctrtaaatcagaatgttcattattttataaatgctgtccatcaacaggatcacaaaggaaattccacgtgctgatatcaatggtccaatgaggaaaatgagaagtgagatctagttctccctagcttagcaatgcttatctatrtcctttcgagttttactgagatttcagaaatggaacagaatcttggctgcactttccctcttcataaaatttcacatttatatgagattctgcatttatttttttctattactgtttctaatgctgcaatttgggtagtcacaatgttccacttaacctaagtcttccttgttaatatttgagtccatttttgcatttttttattgttaattagagaatgatttctgaacattttctatttttagagcaattttacctgcattatcttattacacacacaaaagctttttgaataagtaggacatcataggacattcaaaagaacacagactcagacaagcctgagtatgaatctgaattctgccagtcaagctgtattattttggtcacttcatttaacytcatttgcatctcagcttcctcatccataaaatraggatcattatgcatgtctcataaagttgccataagaattaggataatgtatgttaagtgttagaccagcacctgaaatttagtagatactaaataagtagctgctattattatttgccatattttataaattaggaaactgaaacacagacatattcctcatgccagtatagggggttaggkcacctagttattacaggcaaactgcagactttgttttgaacaagccttattgagaatgatggtatagagtasaaagtacacaagcaaaagatacagaaaaaacactgacatcaaaccaaccagataaccaatatatgtttattgggcaccttgtaagtataagacattctatgtacaagttgggctactttgcaaatgacggaattccaacttgatcacacaaaaaaagagaatttgctggctgatgtcacccaaacacagaatgtggacagctggtcctatggatgtctggactcagtggcaagcacacttttagggcttatactctctatttctgatgtatgtttccagttctctttgcagatgagctttctccatgccatggggaacatgaatcctagcaactatgatctctcatctcatcctaacagcagttctaccagcaaagaaagaggattcctttgtctttgtctgcagtttgaaaacaatcctaacaatcacttgcattgaatcagtttaggtcatatactcttccctgagccaatcaccaagccaggaagatggagtaatataattggcccaattaagagcacacgacatgttaggagctcgagaccagcctggctaacttagtgaaacctcatctctacagaaatacaaaaaaagctagctgggcatgatggcacacacttgaagtcccagctacttgggaggctgaggtgggaggctcatttgagcctgggaggcagaagttgcagtgagtggagatcacaccactgcactccagcctaggcaacagagcaagactgtctcaaaaaaaaaaaaaaaaaaaagartacatgttactgttgtcattagaagagagggaagtgtattgggcaagcaaaaatcataaccttcaccttcaatgagttataatagagaaattaatattttaatggtagagttggctcaaggagccaagaggccagaatctcagaatgtctggctgagatgccatgagccctgagcagacatgtcacatggactgcccagccaggaagggaggcctatcataattttgtcccccacttgtgttatctcatagactacagacttaaatttatttcttaatatgcatactatttaaagaaggaagttataaacatttgggcattatcttagagaaagcagaactttctaaagagagtgtctagaggctggaccacagactaacatccctgttggttgaaaaattgcaggctgtcttgtcctgttggaaagcattattttaacagattgcttaatgcttttccttcctgtagcatgggcttgggggagtggtactcaaagcagacttataaattggattgtatagtgaatgaactttgcttaatggctttgctgggtttatttaagacattgaactgtttgcccttgtctccagtggttcaatgaccactcatcattacattagtgggagaactatcatactgtgttagagatacggagagcttgtgactgggtgaagagtcagtgttttgactttttatgccaacatcattattttcccactcatttcacatttctcctgtcagttcagccctcaattcaaggttaccttgattactttcaggtcttttagtcatgaatctttctaaactatttttacctcaaattgttcctatattttcatgaactcactttttcttcttttctgtctcaaaattagaggtattcctagtcttttccagcactaaattcttccctagtctacctccttagaaaactaacttcattcattccttcatyttctatttgcattttcaactatctctcttcattgcatctttctccacttatccaccacaagcctacctcttgaaacagtatcaaatgagatcatatttgggaaagtgctctgttactctgaagtagaatataaatatggaataatatcataatcctgtctttcttcttccctccgtgatcatttcaaaaaaccatcaatataaaatattttttaattttactatatcactgttcaactcattacctaatgtcttaaaatctgattctgtctcctaaaatactatgttaggggttcataactttatcttccagtatttgacacagttaactacatcctccttccttggtttttgtaacctcattaccttgatttgcctcctctccctttaaccattcctctttccttcaatgtccatcttttcccttctatctctaaatgtgggtggtctctatcattctgtccttccttctctccctctctctctgattctcataaatactccttgaaaccaccaacaaattcttttcttcaacctctgttaattgcctgctgataattttaacctagatgtcccactagcccccaaagaaaatgtatagtaaaataaactcttaccccactccaaatatcttccaccttatctcagccaacagtgttactcttttactgagtcacctaggcttgaaaccctaattccatgattgatttttccctccttatccctgaatctaatttcagccatattttacagacatttactctgtctctgccttctcttccttcaggtagtgatagttcaggctgctggaatagcacacaccctattatttttgctttcagtagggttatccaaacgtattttgtggtcatactgtttttcccttctttgttccttagttctttcccttttctggtctgaataaccattttaactttattcacaaagaccactaaatcttctgtgctaacattttctcagaacttccactaaacatgtttagaatggctagaatggcctgtataacatgcctggtaagtaacagctgggtgcaagttgactattgtttataagtagtgacatgacaaaaatacatttcatagcgtatgtctattaatttgcattttcaaatgcagtcaccatcttcatattagaaaattcaaccgtatttgattcagaatgctgaaattttgaggatctaatgacatgctaatgaatatacactgaacatgttgcctgacttttaatactttttcaccagtcatcagaatataattccagtttatgtctaacctcatcagaaacatcacctttcagtctctaggactctagctctctaactttgtttctgcagatcctattagcaaaaaaatgattaaggacagcttcagttttcccagttttgacattaagggtatttgatgccacagtagtatactgtgcaactgtaaaaaagaatagggaagctctttatatgtctatatggaaagatctctattaagaaatgaatgttcatgtctccctcaaaactcatgtgtttaagtcctaaccctcaatatgatgatgatatttggagatgaggcctttgggatgtaactggggttagatgaggttatgagggtgggactctcatgatgtgattagtgcctttataagattmgatgccagaaagcttgctggttctctatctgcatgttaggacatagtgagaagaaagccatctgaaaaccaggaagagagccctcaccagaatctgaccatgctggtgccctgatcttggactttcagcctccagaactgtaagaaaattaatttccattgtttaagccacccaatctatagtattttgttatggcagtctgagctgactaatacaatctccaatatttattattattattattttgagacagagtcttgttctgtcacccaggctggagtccagtggtgcgatctcagctcactgcaacctctgcctctgggttcaagtgatttgcctgcctcagcctcctgagtagctgggattacaggtgtgcaccaccacacctggctaattttttgtatttttagtagagacggggtttcaccatgttggtcaggctggtctcgaactcctgacctccagtgatctgcttgcctcagcttcccaaagtgctgggatcataggtgtaaaccactgcatctagcctccaagatttatttttaagtaggggagaaaagagtgccaatgtgtactgcaaagtgccaatgtgtactgcaatgggagttaaaaaaagaagagaaaatatacttgtactggcttgcatatatgttttttaaatcttgggaagtgtaaatgagaaactgataatattggttacctgttttktggagataggcagatagagaataagggaggaaaggagacattgctgtatatctttttatactttttgatgcttgaactatgtgaatgtgctaccagttcaaggaattaaataaataaaatttacttttttaaagtaataaaacaaaaacatttaataacaaaaacatttcatttggaaaaataagattatattcaaagaagaaaaatactgattatgttgaaagaagatggctgactagcagaataactaaagcagaagtttacatttgatgcaggcacaatttgaacaagatgaaagaataggagcagatgtattaaataactttcccagtcagctctttaataactcccatgacagtgtaggcaattcttattgttactgcccttttcttggatctgcgttggctactgccagcagagctggaagtgcccacatgacatgtattcaattgaaaggtgatagccacaagttctcaagtactctcaataatgctcagatggtgcctgagagtgacaccttctccttcaacttcccttggttggaagtcctaagtacaaggagagcaactactgagaaaaggatccagtcatccatttgaagagggttaatttctcttccaagaacacaaatgtaacttttctcacaacctactttggcgaattaaacatccaattgttttacggacactatatcatactgccccagaacattgtccttctgtagttctgatcattttatttctgtttaatatctatcaaagaattcttctctattagtttcagggtaaaatccaaaattcaaaatatgatattcaaagactctggtcatcaggcttcagcctatctctctacccacatctgctcattttgagctgttttgccatgaccccaaagtgctttcctttctctacctccatgcctttttaaatgccattttcattgcctggactacccttctatttcttccttttgatgatgcttttccaaattaaagtgagtgttccttttctaatatcaccctgtatttattgcacaccattgagattctctatgtgcttgtcctttctatcagactcgagaagttcaggggccatagcatattcattttgcatctccaatgctggcatccagtaagcatttgatggctgaatgactgaataaatatgtagtctagctgaagttttaaagacagaacattgtagtaccctataataaaatcctacccaaggcttaggaaaagtgccttgcaggaggattctaactytgcattttaagagtataattcagcctcagattgacttgtaagagctgaattctgtcagaacaattctccctgagccttttgattttttggaaggctttcacttttgcagatttgtgtgtctgtggtttgaaaactctggtgagcattcccatactaaggtagctctttgaagatctcctctgtttaacagcattttacttctcatattctaaagcatagatgacagcttgcaatccagtggattttcatccttatctcctgaaaaccacatttcttaggcattgtgatagtaagttccatatctatgaaaatcaccccacagaagtgagttttcagctcaaacctcagatacgcatttgcttgcaagagagcaagagtgacagcagggcaaactcaaccactttgtagttagatgtctttctcatgtgtctttctcaaagattttcttttaaagtgtgaaatttccagaaaaatctaacagtttctagccaaaatagttcacttcccaagctaaaggggttgattttggtgggcttcagttgtrtcaataggccactagtgaggcagacttcagagataagcccatcttttgttaattcacttcactctgaacaaaacagacaaaataaatgcttgaaccccacctatttagacatgcttgcataaacatggcttcataatagtttgctttcagagtccattgactttaattgtcctacggatgctgtttaaatgcgtccattgatataatgtgttagtgctcattttctatagtaatgagcatagtcacaagcctgagttcagtatacatttgagcaaaatcctggcactaatcacaatataaatagcacatctgatcttactgacatgtggctgaaggcaaaacgtaaatccaacaaaatttgcaggactttagttctgatgccatttcttgtaaagtttggggataaaaatgataggagtcctggaatatttttcccatgctaggattttagttattctgcagttaccaaatctgcaaaatttctggatttgtcctcctccaggaaacactgtcttaattaaataattaattaagctcatttaaaagccagtgattctcctgtggtttgcttctataattgcctctttactcatttaaaaaaaaactacctaagctaactcttttatttgttcttaatatgatgctttacctagttcatgcaattgtttatcatatgacttatgtgtctctctgtgttgtcattgtcattatctgtagaaaattgttaggtcccaaaaggcaggacctgagtatccttattttctgtggcacccgcacagcattatgtgatattaaacaggcaataattattttagtgtgatgaagatgggaatctatagcatgctgatgtaatgtgagtttaacatcaaaaaataaagttactgaagctcaggtatgctatccatagcacacagtaacctgtattagttactaagaagggtttagtattatgtgaaagcagttgatgaaatgttcaaaatagccaacttccaatgactcagagtacatgtgtcccttaaattgctcacctgcttttgctctagagctatgtttcagcctgtatgtttccagaaagaggctgaaaaggcatacaggaggtcaaatcagccaacttctacattttggtggttctggtgatagggttactgagcgagatggtgataatgattgttaaaccattatttttagggattaatgtggaatttacatttacagtttacatcattaaattgacatgcattatcaattgcactgtttgtagaactgtggagaaattcctttttctatcaaaagctctacatggttagtctgactgtagatcttgtatccacatgctagtcttgatggactagcagagctcagaggaccaagccttaaacacagagcacagtttcctagaagtaaagaatttaacctttgttctagtccttccatcagcctcatcagcaggaaaactgtcaaggctgatttcaratgaatcatccttggcagcatttttccccctaaaaccgcttatctgtcactttatggaaattgctrcttgccctcagtggtatgcgatatgagctcagacattacacataattcattataccacaaagttgaaaaaatatataatacatataaatatattatatattaaacataaataaataggtagatagataaaatttatcctgaaccagctatgtatcaataaactcagcagttttacagttaagttctgaaaccacagccttttggtcacttgccgccagtattcttccaagagagattaagaaatgtttgggcctagaggcaacctttaaaatgtactgagaagtgcatttttgccagctctattgatattacttctacctagatgacccacatacttcttgatattctttaaatctttgcaaactgggtttataacatttccctcctggggttaaaacaaccccagccccttaggcaccatgtctttaagacatagcattagagaactttcactcctggagtgtgtatctgcgatcaaatatgatcatatgctctattctgaattgaaattagctttatgacttctacaatcagagcgagtgttgggctgaatgagttgagactagataacagaagatgcatctttcacaggctgtagcactgagtccccacttttctcatacaggtccgcgatccgtggtctgcaattcagaaatccaaagggctctgraaagcaaaagttttagtaacaaaatttggtggccaaaattgatgtgaagctttatagtccccattcatctcacttaatggaaatattagtacatttgattatgggttgctgcccaggacccactgggggtgttacataaacagatatactcaccacattatcttcctaaaatccaaaaaatgtcacatctagcatcaaatattttgggtaagaaattgttaactgtacctttccttaaaatactaaagattttttactggggagagcgagccaatcaggttttgaagttcacgaaaggcaaatctgtagatgagggtcttgatgagggcagaagtttagggtaggtcctaagactttacaacgtaacatcctctctggttcttttctgtgttcctagttttgtacagatttatttttgagtgttggtcaaaataaggggacaaaataaggggaatgttattttttaagagaattcttttttttttttttttttgagatagtctcactctattgcccaggctggaatgcagtggcacgatcttggctcactgtaatctctccctcccaggttcaagcggttttcctgcctaagccttccgagtagctgggactataggcatgtgccaccacgcacagttttttagtagagatggggtttgaccatgttggccaggctggcctcgaactcctgacctcaggtgatctgcccacctcggcctcccaaagtgttgggattacaggcgtgagccaccatgccyggccaaaaattcatttttattgttgtccccttcttccttttctgtgaaagtcctcatcctaagaaatttttatattttatattagttaaatcatttcctattgatttttgttgtgattttcaaaggtggattcccacagataaaatcttagctattgcccaagacatagtaaagggtcacatgtatgaatttttataattggaagaaaattctgcctttgtgagtgcacatgtccatccacatttcatccctccatccctcaaaaccctagtgaggggcattaaagaatggttgatgtatatgcaatgtctgttaagcatgcactatgtatttcatcctcatttattgggtctgggatggaagtttctagccagcatgaacctaacctactttttgagacaaaattcactgtttcgttacaggcaaaattctggtgtggtgtgaatgctgtggctcagtccgaacatgtttttttctgtaattttatcattattacacgattgcaatatcagttttgttttttaattggaaagcaacattttctactgttgaaagacgttttttgacaaattgacccttcctagtattgagtactaagttgaggactgcatctacttgttttttacattatagagaataaaatactattgatttgaaaaatacatatcacttggtatctctgtcttggttgcagtggtgatacagaattggtttcattaactcctacatggttggtaatcactgatcaagaaagtgggaaaacaaaaccttaaaacctcaatcctcagtaggaagtaggttacattaggtcaatttataggtaatctatgcacatgctaacagggttggaaagaaccttacgaagcatattacctgataaacttgagtgggtttgggaggacaaactaacaggattattgtgtctcctagttggtacatgggagcaactgacgtacccccttcagaaccttaactgttagtaacagtggcagtgacaacacaaaccagtgagcagagatacagctcttaggccaagctggccagactgtatggctgcaggaagtgactgaccagtgacagtgctcagccagaccaagatgaggagagaagagtcaataagctttctggaggctaaggtgttcccgtggtgggaaactgtgcccccagccttcatggatgagttataggtcttaaagttagtctcctcttgttgggatttcacactcattaaataacctgataataacctggttttccatgtaactgcctctaggaagaaaagtactgttcatgaagacataggtatttcagtctgcatggtaaaagatctatatcttactacaaaataataaactagctggtttataatgtgtaaaaaagatttttgagaaatcattggtggtggtataatattaagtgatatcattcayatgggtagttattctcataacatcttgtatgtaactataacacttataatgtattaataatttgttttcaatcttttaatttggactagacataactcttacagagagaaattgtctttaggctgggtaggtgactcacatctgtagtcccaacactgtgggaggctgaggcaggcggatcacctgaggccaggagttcgagaccagcctggtcaacatggtgaaaccctgtctgtactaaaaatacaaaaagtagctgggtgtggtggcacacacctgtcatctcagctacttgggaggctggggcaggagaatcacttcaacctgggaggcagaggctgcagtgagctgagattgcaccactacacaccagcttgggcgacaaagcaagactccatctcaaaaaaaaaaaaaaaaacaaaaaacccaaagaaatgatttttattattttatgaagtatatgcttcttaaagaaaaattggaaaacacataaaattttaaagaaaataaaaatcacctataatcccacttcttaaagatagcaaaagttactgttacattttattaagcattttctcctatatatgtcattaaactgtgatcatactaaaacattattttcaaaagcattatttttaatgactacagcatatcccacaggtatggatataccttgatttatttaactactcttttattatagggctttccaattgtttctgattttaaattttaatttaattattaattaattwatttatttatttatttttgagacagagtcttgctctatcgcccaggttggagtgctgtggcacagtcttgggtcgttcaacttccatctccccaattcaagtgattctcatcccttagtcccctgagtagctgggattacaagtgcctgccaccacacccagctactttttgtatttttagtagagatggggtttcaccatgttggtcaggctgatctcaaactcctgtcctcaggtgatccgccagcttcrgcctcccaaagtgctgggattatagatgtgagccaccgcacctgcctgttcctgatttttaaaatgatgaatrgagaaaccatttcttaatcagatcgttagccacagtatctagcacacttagtcacttaatataaaagtattgaattgaaaagttattttcatctgagatcctatcctgaataggtttattaggttttattagaagcttaagaggaatctgacaaaatgaactccagagcacatatattttggtgtggaagggagcagtttaagcctgtgctcagagaggcaacccagggatggggaactgctaacagtgtgtggggtggagcaggggcacatagaagaatttctaaggtgaatgttgactctgtcacagttttacctactgacagaagtgttgaaccatccacagtgggttacttctcccactcttctgaagaaggagctgttttgtcacttgttctgtttctcttttaattgctcrtagttgttcctatgagagcagacatgtgctctttgaatttaattgaacgtctgcttcagaaaaacgtgacaaggaaatattatcttcttagatttcagtatgtgtaagatgggtatagtcgtttacaaaaattcccaaatcagaattttgtgacctcttctagaacatgtgattagcctggcccagcatgactcyttcccaagcagggccaaacagatggaagctggaagcaccattttcaccctaaagggatcaagacaaggcccagcaaactgaactagcaatatctaattgtctggtgttctgatgatgctcacattgaccccacctccagagtgcctgttaccataacatctggaactgttataacactgcctattttgatatgtggccaaaaccactctactttcagattgtgtgaacactgttgtaatactcaataagcaattagtgrtgmaaaccccgattgtggtaatattagtgcctgatttgtttaatttaattaagcatttaatttccttctggtgtctttataaaagaaaaacagggccrggcgcggtggctcacgcctgtaatcccagcactttgggaggccgaggcgggtggatcatgaggtcaggagatcgagaccatcctggctaacacggtgaaaccccgtctctactaaaaatacaaaaaattagccgggcgcggtggcgggcgcctgtagtcccagctactcgggaggctgaggcaggagaatggcgtgaacccgggargcggagcttgcagtgagccgagatcgcgccactgcagtccgcagtccggcctgggcgacagagcragactccgtctcaaaaaaaaaaaaaaaaaaaaaaaaagaaaaacagaagggaggaaaaataatctcagattattaactactttaagcttttcacctactacctcttgggctatagcaaatcaataatcttktaaaagcaaaacgcaaaataaagtaaaataaaaattaaatgtaaactttcaaaaggcaataaaaatataatttcttttaaagcatgtattagtttcaccatatttctagaatattgtaaagtaatatacaattatatagaatacagcattatacagtaatgtaatatgctttagactatcccccataatattaacaacccattctttatcaattgatattcattagtcttgtctgacaatgccaaacctattccctgatctccaacttacccgtcaatgaccacttctgatgaggatctgaacactattgcaataaggcagacaatattataaaattcaagaaacattaagtcacaataggaaggatacaactgaaaggataatgatatggtttggttgtgtccccacccgaatatcatcttgaattttagttcccataatccccacatgttgtgagaagaacccaatgggaagttattgaatcatgggggtgggttttcctattctgttagtgaataagtctcatgagatctggtggtttcataaatgggagttcccctgcacaagctctcttgcctgccatcatgtaagatataactttgctcctccttcaccttctgccatgattgtgaggcctcctcagccatgtggaactgtgagtctattaaacttctttcctgtataaactaccctgtcttaggtatatcttcattagcaacgtgagagcagactaatacagataattcctaaaattaattaagatgtcagaaagcattcttggcaaaaagcaagttagagtggaaacttctcttttctttttaaagatgtatcctatgatatggtctttagtggaaacccatgttttctataaaaatgaaactgatttttctatrtaatattcttgcccatttctctccaaaatgatttatctgtcagcattctcacagaagaaaaatttgctttccaaggcaatttcctttcccttttttccctatatttttgaaaaatactttctttaaaggcttttctaattttttttagaaggaaagttggagaaactgagattaggagattttgagttggcagatggcatagatcattaattttttgcaattatgtttaatatattaaaataacaaaaactgaatagagaatagaagcccatatactagggaataaaagcataaaatttcctgtacaataaattatagacaatttgtacagcatttttttattgatgcatatgctaatttgatggttgagatgtttaaataaattccctgaaaaatttagtacgtagctacatatgtgacctgtatgaacacaaattaccattttcttctagctttcacatcaaaatttcacatcataatatactatatatatttctatatatagtagagatagtatatgcatatacatatactatctctgctatatatagtatagcagagacagtagtgtgagtcatatatcatctctaaagagcaggataatcttggtgtgagttaatcttgatttacattttaactccactctataataaccaccaggatgtgttatattttyggtagataatgttttcttcgggtggttttcaatggtgacttctctgaatctgcatggttctcacgtaagatgtcatgaggttgtaggggacactcttctagttgtaaaggctgtagaaaaggcctgagggcggatgcatattattgacaggccccctgtcattggggaggcacrtwtttatggagcccttacctgtgtcagggctctcagccaggagctgaccctcagctttaaaacaaggttaacaatatcactgacattccagctgtagcacatagatttttctcttccttcctccaayatgctaaattccctcccaccttgtgtctttgctcatatgctcggctcagtttggtaatttctctccactyctgattaatacctactcatctttcaattctcagctcagaagtcacctctccagggaagtcttcctttattcccccagacatatgggatttacgttattatacatgctcatggtacccagtccttttcctttacagcacttagtttgtgagtatttagtgatggtttgattcatagctgtctctctgctagacagtattagcacctactactagtcagtgactagtgctagttgtgtattatggaccctgtttttaattcagaaaaaagttagcaaaacttcagaaaatgaaagaaatttttctgaaaatattattgaaatactatcttggaagaataacagaacttgatactaagagtgtgactggttaatgatacacactgcttccatcaagagaaagtgtctgttcccctccctttgatgggcaggcctgtgactgctttgaccagtacaggatagcagaaatcatgccatgctagctatgtgcatagcccctaaagagcacggcagcttccacttctcacctgtaggaagccaaccaccaagaaatgagactattctgggaccactattctgtgagaatcctgagccacatgaagaagctctggaagaagggacctgtgtggagggggtgagctgggggtcaggctgaacaacactgaggcactagagatgtgcgtgagaaagtcagctggaaagtggttcccagcttcagctgccccartggactccatgtggatcagagacacaagcttttccccaattcctaatccacaaatcatggtccaaacaaaatgactgttttataaagccactaggtttcagagtagttttttgtgcatcaacaataactgaaacaaagagtaagaaaagtaaatgcatgagaagaaggagctgaggaaagataattcagaggagaaagtaggtgaagggcaaaataaagaagcgtgtaacaactatcttgaggctggacatggtggctcacgcctgtaatcccagcactttgggaggttgaggcagacagatcacttgagttcacgagtttgagaccagcctgggcaatatggcgaaacctgtctgtataaaaacacaaaaacaaaaccaaaaattacccgggtgtggtggcgtgcacctctagtcccagctactcaggagactaaggtgggagaatcacttgaacctgggaggtagaggttgcagtgagccgagattgtgccattgcactccagcctgggttacagagtgagaccatgtctcgaaaaaaccaaaaccaaaaacaaacraacaaacaaacaaaacccaaccacctcagaggtaagagttcaggtaatagggacagtgaggctttctccataaagccactagaagtttggaacctctactcccactccaccccaaccatttttgcatgatgcaggtcccgatatatggaagccctctataattttataatggtgctggcaagaaaaagaaagtgtggggaaataatctgacagtgtttacatgatctrtttttctaagagttatgcctatacattgtcaaacatattgaattaagtaacctgaattatttaaaatgtaggtaattcttaccaaaatttaatataagaaggttcccattcagcaggggaagttgggcaataattttattgtaatggggtttgaccctagaatgggtaaatgaagctttcccccaaccaataatggaataggaaagaggaaagggagtaacctttgttgaaagtcaactattgctatgctttgcatatcttcttctttttccctcctcctcccccttctcctcctccatcatcatggaagtggctaacgtttgttgagcacttgctatatctacatgctgcaaagctttacatggatcatctcattaatcttcattacgtcataatatatgtgtaatctttgttttacaaatggaaaaatactgaagctctgtatgtgaagttaattgaccaggattgtacagatagtaagtagtggagccagcatttgagcaaagggctcctttgaacaaagggctccctcagcagaagggagacgaagaacatatttcatatgttgtctaagttaatttaatttagtcctcataataactatgtaagattgatattactaccctcatttttcaaatgagggtcttatgctcagaaaggtcaagcaagttgtacaagatcacacagctgtgacaaagccagggttcaaaccctgaccatgaaccctccactctcccatagcaatttataagcattgggagcaacagaatcatagattcttaaagctggaaggggcctagtataattttcttattttataggaactgaaacccattcttatgaaagtgggctgatgagagtggggagaaaggaatgccatctattgctttaattcagccattctctacacaccggaattgaggatccagtaataacaagatgtgcctgtttgccaagagctccttggattagcaagtaaaacagtgctttgtcataggagtcaaaacagggatacagatgcatctcatcccacctggggacccagggaaktctycttgaatagagtgatgacttcaacgagtctaaagaggattaggaattacccaagcagggatggggccacacacattccaggaaatggraaaccatgcacagaagcccaagtaagagagaatagggatgagatcagaatgmggatggcaagtaggcagaggccacatcatgggggtggggtgttgggtgggccatggtaaaacatgtggacttcattctgaggatactgggaagctactggaggatttagacaagacaatggcagttagatttgcagttcagaaagactgccttggataagatggctgttkcagtaatctaggaaaccaataattattttctggactaagtggtagcagagtggatgaagagacatgggtggatttgaatcmttttaaggggattgattggtcaaaacatggtgattgattaaatgtggaggtaaaggagaacgtgagccaaaggataacactcagattactggcttaagcaactaccagtatgaatggaatagggattggaaggagcaatcctgggcaggatatgatgagctgtgctttgggatgtcaactttggagtgcctttggagcagccaaatacggatgtcttttaggtagttctgaagctgggcaggaaaagaccagaaatgaaagtttgagccatgttggcactggggtgtatttgaagtcatgggcctagattcgctcatccaaagcaggaagcatgtaaagttggaagaaaagagatggaggctagagaactctgggaartaccaacatttaaaggaaagaatgaggaaaagcaatggagtagaagcagagggagagagacagactggcagaagaaaagaagtcatgagagagaagcatcactgaagcaaaggattctttggacaygtgtataccaatgctatgttaaaaccattgtgcgttaataccacaaaagcaaatacagtgattccctggcattgcgaaactggcatttctctgtgcttcrtaagaaaatgaagcaacttcatttcacaaggaaatgaagggggttatcagagccctgtgcgcgtgcgtgtgtrtgtgtgtacacatacatatacatatataacaattttaaatgtagagtaatgtttttcttttcttctacatttagatttcctagaatttgaaagatctttcccctcaaactatttcttccccataaatatatattgaatatcaaatggtcataaacatacttctggaaaaataatgttgcaaaaagctctgaaaaactgaaaaaatagctaatataaaagtttggggaactaccatttgacccagcaatcccaatccccttctacccaaaggaaaakaaatagttctaccaaacaracactgtcactcatatatttatcatagcactactcacaagagcaaagtaatgtaatcaacctaggtgtccatcagtgatgtattggataaagaaaatgtggtacatatacactatggaatattacacagccataaaaataatgcaatcatttcctttgcaacaacatggatgcagctggaggtcattatcctaagtgaattaaagcagaaacagaaaatcaaatactgcaatactgttctcacttaaaagtgggagctaaacaatgaatacacctgracataaagacgaaaacaacagaaactgcggactccaaaaagaggcaggaggggaggtgggaagggctgaaaaacttgctattgggtactatgttcactacttggatgatgggttcaayagaagcccaaatctcagcattatgcaacatatccatgtcacaaacccgcacatgtacccgctgaatctaaaaaaaagtttggagcaacactcacctctgcttattaccataatacatcacaaacttgttaaaactcaacatatttatatagtactttgaactttacaggatattttggttatctcattagcccctaatgtggttgcaatgaggcagatgactctggcatccgtgggttattacactgtgctaggagaaagtaataagcagcataagagcggtgtggggaccaagggccctttgaagtttcactgaaaaatcaactctcaaaaggaagatkaataagagaaaaggcatataaatttatttagcatgtacacatgggagccttcagaatgaagacccaaagacacaggagaaattgatctattttatgcttaggtttaacaaagtatggacagccatgtagaaatatgattgcaccaaaaaggtatgatctaatgctaataaactgagcaaggaagcccagccaggtctgtctgcctagattctccttcgcctctctgagcagcattccttccttctggggatgggacatgaccttctctggaatgggggtcttatgatctacaaacaaggkatgtcagataatttctttatggcctgttttcacagaaatagggcagaaggaawgttggagtaayatttttaggttttatgtctggctttggagaaaaaggcattttggtttctatgacccgccctggggaagagggattctagtttctgaggctagcctcagtggggcatgggactgagggacaggagggcaggagaaggtcagasaacaaacctacacctctgaggctgcttctgaggccttcattttggggcattgttttctgagccccaacagaggaacacagaaagagctacagaaattcagaaaagggatgtgttgcttgcacaggaggaggtggggaccagagaaggttgagctttgaagtgcagaaagcactgagtgtttgcagtgtccctatcactgtcgtgggcactttatgttatctcatttgaaggacttgggtattttaagtagtgaaaataggcactttatacagaggcagatggatactccataatgaatacaatgcctggcacaagagcacaataactgttaatattagtggctatcacaattgagtatttactgtgtcctagaagcaatgctcagatcctttgtatatgctgtcacatttcagcctcaaaactctgaaaacaaggtattataactcccactttacacatcaattcaaggcaatgtgtgtgcacacatatacacatatatgtatgtaacaatgagttataagtgagggccctggtaaaaaacaaatggcatacttaaagaattctgaagagcatgtttaataaaaggaatgtttttagaggtgtgagcaggtaaagagaaccaacgaggaacccagggactagcaaaaacgagaagccaatactacccctagatggaataatggaaggcaacagcattatcagaacccagctgagagctggaaccatagrataggggccgccagcagaagctatgattgtagaaggatggagctgttgctacaaccatgaaaaagcaggaagggagccagagaaataaataccccaatctctgtcccctcttgtcctccagtctcctgtaagtatatyccattcaccaaaaccaacaaaaatgggatcgcaggtgatgaagtccatgaagatcagtcctccacagcttcaagcaagacagaaaatggtgaaacacgggtcttgggtacactaaggtgatacagccagaatgtaggagggccaggaatcamattcaggcttgtctgaatctaaaacccatgccttatccactgcttttatgtmttcctctaccatacatactgtagatgcttagtaaatgtttcttcaatgaacgaaaccccagatgaaagttggagaaactgagattaggaggctatgtgtcttgactttaggaaccagagtcctggttaccgtggaaccatctctgggtctgtaactcactgcctgcccattcaaccaaacaccactcactctttggatataacaggcaatctgcagcaatgggtttctttcacggtaaacatttatgtaataattatgttaaaacactcaggacttactgtcaaattgcagatttatggtacttactttatccgatatttctagcacttaggttggacaaggacatccttgagccctccttctctttgagaattcccaccctgatatggtttggttctgtccccacccaaatctcatcttgaattgtagctcccataattcccacatgttgtgggagggacccagtgggagataattgaatcatgtggggtagtttccctcatattgttcttgtggtactgaataagtcttacaaggtctgagggttttataaggggaaacccctttcacttgattctcattttctctcttgccttgtggccatgtaagacgtgcatttttgccttccaccatgatwgtaaggcctccccagtcacatggaactgtgagtccataaaatctctttttctttataaattacccagtctcgggtatgtctttatcagcagtgtgaaaacagactaatacacacccccatctcaaaacacctgtctcctatgaaagtaaatcttgtatctgctaaaatggagtaagaaaagagtaagacaggaatgcctgttttaatcttcagatacttgctatctaaaattgacttcaaataaggcaagataccagcaatattatcaatggaaaagaaaacttgcccctgtgttaatcaacatccaaccagaacagaaatagctttaggtatgtcaaacagagggaatttaaaggaaattgcttataaaggtcttgaaatgtccagaagaggaaaaggaacaatttgaccataagccataattatcattcataattaccattcataattacatccccatttcctagcacaatacctggcatatggcaagggttcaataaatatttattgmatctatgattacacttgtgggtgagatttggtctgtcaacctaggaaggccacaaattctcctggaaagcataccttcaagcagctatatgactctggtaattcagtgaatgtgtacgtgtgttttggcattcggtaggaaatcatgtgcaaagccttctgttcaaaacctctcaatggataatatttactgagcatctattaggctctagttactttctatgcactttttaagcactttgcaatattaacatttataataactctatgataacgtgttcattgctccgcatttatagatgatgatgaaactgaggcaaagagtttttaagtaacatgtctaaaatcataaaacaaggaaatagtggagccaagctttcattacacagtctggctctagaagctatgctcttaatttccacaccatatgcctccccacagctgatgtgatgaaggcttagcccacttttccacctttgttttccattttccccactgttctctggaggcagacaccagctagctgtttccccaacctcatgttttcttttctttctgggcccacagcagaatgtattttccagcccttgctcgtggttattgtagctgggtggcagaattttagccagaagaatgggagcagaggtgatatgcatcccttctgggcctgacccattaagcctttcacatgtggtggctgtatgttctttcttgttctttcagtttgaggaaggtgagtgatatggtttgactgtgtccccacccaaatctcatcttgaactgtagctccgataattcccatgtattgtaggagggaccaggtgggaggtaattgaatcatggtaacgagtctttcctgtactgttctcgtggtagtgaataagtctcatgagatctgatggtttaataaaggagagttcccggctaggcgcggttgctcacgcctgtaatcccagcactttggraggccgaggcgggtggatcacaaggtcaggagatcgagaccttcctggctaacacagtgaaaccctgtctctactaaaaatacaaaaattagcygggtgtggtggcgggtgcctgtagtcccagctactcaggaggctgaggcaggagaatggtgtgaacgcgggaggcagagcttgcagtgagccgagattgcgccactgcactccagcctgggcaacagagcgagactccgtctcaaaaaaaaaaaaaaaaggagagttcccctacacaagctgtcttgcctgccgccatgtaagacatccctttgctcttctttcgtcttctgccataattatgaggcctccccagctatgtggaatcgtaagtccattaaacctctttcctttataaattacccaggcttgggtgtgtctttattaacagcatgagaactgactaatacagtgagcatggaaaacttggatgccacatgtagaagagttggagccacaaaatagaagaaggctggatccctgaatattgcttggaaaaaagagttgagaatcaatcaggaacatctgtgctagactttgagtgaacaagagataagcttctgtcaattttgtgccattatatgtgttggagttgttttgttacagcagctatagatatgtaaatagatctacctactgtcctttgaaaatgcctttcccttagaattctcattctcyccttcagttactcacatccaaaaattatttaaggcctaaaccaagtccaatcatcttcaagcagctttcttccactcccacccaccatagagatagatctctctttccyttaccttcctgtagcactttgttatctatacctctcatgkgcacttaccccakctccaattctggatgtcttgttctcctagtgagattgtgagctcttcaaggtaaggatcatgtctttgtgcttccttcttttgtgactctgaagtgcataacatggtgatgtgccttgggaattttcaataaatattcatgggaaaaatgaacatatcaatgtattaagctcaataaagtccgttttcctaaaaacagtccttcattgctgaagtgtgaaagcatgtaaactataatctamtggatttggtatttttattattcttttttactaatatatacattctaacactttttgaccactgcttagagaaaatagaaggcatgcttatcaaatttcagatggcacgaattagaagtaataagtaatgcacgagataacagaatcaaaactagacaaattagaaataagtaaataacatttaacagggataactacaaaattagattttaaaagaacaggtacccaatttcagtatggaaagacatggctaacatcaggttttaattggctgctagactgacatgagcccagagtggtacacagaaccctgttcatagttagactcagggcactgagtggtaggtgaaatattcaggctccaacaaggcacaggcatgaatgaagattgctagatggtggccagctagagacagatggagcctcaatgtctggtaaagtctgcagtaaagagcagaatgaagtcctatactttatttaacccgggagctaaacaaataaacaatatataataagaataaataggctgggtgcagtggctcacgcctgtaatcccagcacgttgggaggccgaggcaggcggatcacctcagttgaggagtttgagactagcctgaccaacatggagaaactccgtctctactaaaaatacaaaattagccaggcgtggtggcacatgcctataatcccagctactcgggaggccgaggcaggagaatcacttgaaccccggttgcagaggttgcagtgagctgagatcgcgccattgcactccagcctgggaaacaagagcgaaactccatctcaaaaaaaaaaaaaaaaaaaaaagaataaataatgaactaatttaaaaataaataaattttatatttaaccagggcaagcttaaggtaaaagatcaactttcacctgtaactttgatggraatcctccatctgaggacaccattaagtgatttctgacgctaaactggggctaatggggctgcctggatcccctaagaattttgctttagaagtactacctagtcggtcttaaaggtttgttattttacttttggtcccacttcccaatgtcagtgtcagagctgtccttgagactcctcaaatttgggcagggcgtggtagctcaygcctgtaatcccagcactttgggaggtggaggcgggtggatcacctgaggtcaggagttcgagaccagcctagccaacatggtgaaaccctgtctctgctaaaaatacaaattagccgcgagtggtggcgtgcacctgtagtcccagctactcaggaggctgaggcaggagaattgcttgaactggggaggcagcagttgaagtaagccgagatcgtgccactgcactccagcctgggcaacaagagtgaaactccgtcaaaacaaaacaacaacaaaaaacaaaaaaaactcctcaaatgtgaagctgagaattttgaagctcatttataaattcacaccacccttgtgggaggggagagaaggcagrtcacatctctgggctcagttggggcaaccattctaggatgctcagagagacctgctcctagaaatccagagtttcctaaaagctgggatcagagttctggcaagaaggctgtagcctgggccttggccctagaccaccaaaaaagtgaatacaggcttaggcagtgttcatagaggcccagcatctggaacaagggtgctgctgtagtctgtgctggtcagaccacacaggaagaattgtttattttccggatactatgattttaaaaggatacaagcaaattggtgtgtatcaaaaggaagctgaccagaatgttgaagggacttggaaaccaaatcactagttacttttcagtggtttgggctccaggactggagggggtttagggtggggggtagaggatggtgttaggcagcatagataattagaactgttttcagatatgcaaatgctgttttgtgaaaacacacacacacgcgaacacacacaaaacaagaaaaacttgtactttaggtaaggccagaaaacagaactgggacccgtgggatttaagctcaacatgaagaatctgtaaaccattatagctcttcaaaagtgggctagactttgtaagcacgcaaggtttaaactgttcaggtaaagaccaggaagccctccagctgctctgtccagaccgaggccggctctccaagtccgcgctggggacgatgggaggtgtgcacctgcgacagaacacaggtaccgccaggtccgggtagcggtggcttttcgccgaggtcccccgcctccgcatacttcttgccctcgctgcttccccggccgcctctcctggccccactcctcgcccggcgctcgccgctacaactcccgcctgggctggcgcgagacccgcgagcgccggagtgggcgcgcgggatgcgcgcgggccggcgcccggagctctgggcatgctcagtcgcgcgggcagggctccgggcgcgagctgggctccttctgcaccacattcagcggctgccaagaggagccgacgggcgctcgcaggctcagcgcgcgctgcccgcggcaggacccggccgcctccgccgccgccgccgcccctaagcctcccgaagccatggccgggctcggccaccccgccgccttcggccgggccacccacgccgtggtgcgggcgctacccgagtcgctcggccagcacgcgctgagaagcgccaagggcgaggaggtggacgtcgcccgcgcggaacggcagcaccagctctacgtgggcgtgctgggcagcaagctggggctgcaggtggtggagctgccggccgacgagagccttccggactgcgtcttcgtggaggacgtggccgtggtgtgcgaggagacggccctcatcacccgacccggggcgccgagccggaggaaggaggtaactgccgactcgaggggcgcggccggggsgcgcgccaggccctcccccgccgccggccgccgtgttgcctggggagtcgcgccattggccctcgggctagtagttcacaacttcccgtcggggggcgagtktgtgtgtgtgtgtgtgtgtcagagagtcagagagaagttcattgttcacacctcccggctgccggcagccttctggaggatccgattcaatgtggttgtacggtctcgggcaggtgggtgggcgggggattccgtctcacgggcatttttatttgtgaaaattaaacggcagcgacgacagtgcaactctgagtgtttcccagggagcgagggccgcgaggggtgccgctccggtagggcgggtggaggctgggcgtccctccagggggcagcgccagtcgtgacaccgaagcccccaagtcctgcctggcgctcggagcaggacaagctggatgaattaacggggtgtcggtgcccacagacctggggcttctcaagttagttttcagtggtggcgagtgagtcccaaagaacgggactagtaagtgaatgaatggaaggaaaagtgttttgttggtgagctgtgctaaatgtgtgcatgaatgggctaggtttgaaaagctgtactctgtgcggtgttgggtgtgtgtgctagcgagcgtgtttaattagagatggttgtttcacaaattccataatttttattctctatatttttaaactcacagcaattaagagagtttttctgttctcaagggttgtaactactttgaaatactgcagcttgtgaaatggctgattgctttaagtgcaatgtaggttagtggggagagacaaatagagtgagattggattttaaaatgccatctggcctgggattcttctcattgccagttaagagcccaggctcaagactccgttgctattggcatccagtggcattgcaagaagctagtggtttctttcatttctggagatttaagaattttttttctattttgtctgtattcacttcacattggaaatgcctcatagagcttatgataaaatatgcttattcctcacctgctccactacttggttgatggaatgccacatggtctgagaaaataagcatattctactaatttctcatcgagataatcagcttttatttcaccctccattaacagaaaaccaaaagagtaacagatctctkctagccctttgatgtctttgccacacctctccatctttgagtctgtgagatgtcccactcttttaaactgataaggaatgtaatcccatttgaatactttctaatgcgttctaggccaaatggcagagctatggtttgaacttaaaagagcaaaatcgatttcaaaaccctttcaaaatggcactcttttgatgagagtagtccartttcttctcaagagactgtcaccatatttattcacccatttcattttattcctataataaaagcttccaagctttggcctccctgatacctaagtgagcagtgatctttttcccctgcctagattttgaagcatacattttaaattggtttaattctgatatcagcctggtggcccactgccagaagtcacatggtgtagtggataaaaacattagactgaatctcagctctaccactttctaattctgtgacctttagggagtgtctcttgcctcagttttcgcatctatacagtggacataataatacctgtttcacaaagttgttgtaatagatgtattaatctacctgaaattcacaggacaggacatttgatgaatgttgactattattattcacttaactatggatcagggaagatttactcckttaataagaagtcrgctatacactgatgtagttagtgacatctctctactatgtgatactgcctctgggtttgggtctcctgctggtgcctgcctttgcattgcacatgatctgggtcaccagggtaacaggcctcccaggcagggagaggaatatgggcagtcagtgttggatgggatgcttctggagggcagagtcatgtagggcaatgcttgtagaaatctctcacggcaccagctcaccgccttggtaggtgttaatgcttgttgagtgagtggatgaatgaatgaatgaatgaaygaaatgctaatacaagaagatagttacttcaagaccctctakggattgctgtatatttttttcatgtgatgtctgcattcccaactgtgaaaatccacagtagccaaggaattattttaaaattattgtcactgatctctgcctctagtcttgtcaattttccattccattcccacactgtagccaagctggtcttttaaaaactcagatctgatcctgtcccttctctgactaaaattctcaaggggcccccactgagcttagataaacccattgagctgggctgtgcttgcctttccagcttcagcttcacctctgatcccaccccaagcatcccctgatccatggatcgagcgaggttctttcactgaagctcaccagactattgcttttattttgyccgggtactcttcctctttcctctcttcccttttatctgtcttaagttctcagcttactgttatcactattattagctaatatttattgggtacttgccacttgccatacaccataccagatttatgatgtgcatttcattaatactcacatcaactctttgaactcaatactatcataattcctattttaaagttggtgaaactgaggcctggagagattaaataaattggccagggttatagagtgtaacctgtaaaaccaggatttgaactcgggtttagagaactccaaagctctagtcccacttagacatcacttttccaagcatggaattggttctccttttatgagctcctaaaacgctataaacttccttttatatatatcataccacrtgataattgcctgtttacygttctgtatctcccactattatgtaacctgtcagggctaggatcatgtctgtattggtcaacattttgtcaccaaggccttgtatacaataggcatgtagcaaatattttgttgaacaagtgttctcattattttagattaaccttaattctccctccttatgacatatttggtgtttcacaagcattcccaatcagtaaggtcccaaaagttctattatgaacgtaggtggtttatagctgtttcttcttctccctttccctgtccctgcctctttctattgttattgttgttttgtttgtttttataaaaatcttgagaaattccttcttaatcaaaacatcgtgtttcatttaatgacttttcttccttggaattcaagaaagtattcctgtgaaagcccagtgtttgcctgaatggggcctcaaagattaataaaacacaggccctgtgtgcaggaagcctaagttttagtgaaggaaactgtatttacagaaagtcagtaaataatgttaattgtctaataatgttgtatctttagattttgagtattttttawgtttaatactttaaagaaaaatmagccgttagaggcctatcaaattttacatgactccaacttactttttagggaaaaaatgcaacttctctgtttgtttgtttttagagacagggtctcactctgtcacctaggctgaagtgcagtggcatgatcatagctcactgcagccttgaacttctgggctcaacaatcctcctgcttcagcctcccaaagggctgggattacaggcacgagccactgtgcctggccaaaagtcaatgtttaaatgtcaaataatgtaaacaaataatctaaaagatgatgtargagaaataacagggtgtgaggattgaattttttaaattaaaacttttgtgtagataattaatgcctacagtgccaaaatcaaaaggtacaaaaggatatgcagtgaaagtgggtgttgcccttctacgcccactcttgcacctgcctaaccagttctcctccttagaggcaactactaatgccaatttcttgagtttctgtccaaaggttcttagtacctaatgaatgattaactgacaaaacttaacttaagcaaaattgcaaaatatatcctgttttgcaaaaggcccttttgcccctttactttttttttaaatttatttgtcatgtaccctgttgactaggattgctcctttttaacagctattttatcctttcccaggtaccaagtgttagtatgtggggtaattttgtcttggagaaaaccacacaaatgcattcttacaaagtgataatagctttaattattgtttccttgagcttttgcatttgtaggggcctcttcaggaagaagtcaatgcttagcaccaggtaataaatcccaaaagtggaattaggcatcaaatgggggaatggggacataaatggaagggatggggaatataatttggatagmtgttccccttttattagggtacttagtaggacctatatattttggttctgggtttattctctggttaggaaaaagcctaaatatgttcatcctggaggcaagtgaacatcaagataatgtctaatagctatagctaacaaatgccaagtttttgaatgtgtgtgaatcctaaaaggtggtattattaaccctattcaaaagataaggaaactgaggctcaggtaactgaggttaagtgacttgtccaaagtcatacacagtaataagttgcagaaatgaggtttttatgaaaatctgaaggtcattttttgcatgaagtgcttgttgccagttgcggttaatcctaacataacattaaatctatgtagaataactacttaaatcccattttacacattagtgatatgcaatctaactcgaacactaagtgaattattttacttcccttctctcgtaaatgagaatatgttgttttcactttagtttaaaaataacaattcagtcatttatataaccccctaaatggcctaggcacagtttgtgcgtaattgtatcttatttaccagcatagtggatgattgcatttttaaatgcataaatttcctcaaacttctgtttagtttcaagtgagaaagctgccccaaaccataattagaaattattctgacaccaagatggaaagtgaatgtgctggaggctcttcacatggcagcagattaacagttcttgataaatcatcaccgccaactagttagaacaactgctccttttcaggattttttttttattgttttgactcttctacatggccttggcagtaacgtttggaaattgatgtgtcccagagactgggatgcatccaataatgtmgtctcttcctgtgcagctgatcttgaaagccttgaaaataaggaacaaaatgactagggagtgacttctattagatactrttagctgaaaatgagctttctgcagagattcttagactcattagagaaccattataagactaagaaggcagggctagatcccttgtaattcagatatgctggaaaattgcctttgcatgtatttgaattcttattaagctcagatttcttcaaaattagtttttattataataatggtaggtatccatccattaatataaaccacaaaaacagaaaaatctacttacaacttttcaacaaacagatttaccttccactgcctttgtgtcataagtaaattgtttgtggcatcttatgattctcaatataaatttggaggtgcatgttttaaaaatgagtgctagttattaattttatgggcttttgctactaaaatctgtaaccatttcagaaagcctcattttttgactggagatctggatatgtgtagtgttccttcctgcttatcaagggagtaccataattaaagagaaaatgactaaaaccttaataagagagaaaaaagtttcatttatatcttatacagaacatagtgcagtatttatttcaggttgtccataaatatttacttacataactgaatcctctgaacttccatcaaaatattcccctgacctttgaagttagcttccatcacttcccctaaactgatattagatattaaatctgtcagacatctcaggctcatttcataagcaggggcttttcatctgaatggacaagcaggcataatctcaagcaacaaatcccattttaaaatgtgtgtgtggtgyctgtagtcccagctactcaggaggctgaggcaggagaatcacttgaacccaggaggtggaggttgcagtgagatgagatagcrccactgcactccagcctagcaacagagcaagactctgtctaaaaaaaaaaaaaaaaaaaaaaaagtgtgtgtgtaatgtcatcctagttcactttgtcattatcaagtaatttaataatgtacatcattttcctgaagctgatgctgctgaaggagcagtagcatcacatagraaggaataaatcaccagactttagacttttgttgctaaatgtttagattatccaagcaactatgacaagaggaatcagyatgaaaaagtacaaagaaaagtacaaactaatacagggttggtttaattttgtccaacaaatcagtgtggacaagaacccgacttagtttaggttagcaaattaaaaggactatatcatttaagctgcttttgcagctggatgggcttataggggtaagttatcattccagtgaagatacatacatcagcattttcctctgtttgaatatgtgtaagtaaacctttgcctttattaaaagacgttttgggctgggtgtggtggctcacgccwgtaatcccagcactttgggaggccaaggtgggcggatcatgaggtcaggagttcaaaaccagcctggccaacatggtgaaacccccatctctactaaaaatacaaaaattagctgggcgtgctggcaggcgcctgtagtcccagctactcgggaggctgaggcaggacactcactygaaacgagaaggcagaggttgcagtgagccaagatcacgccacagcactccggcctgggcaacaagagcgaaactccgtcttcatccttttgccttgattctgtcgtcattattttgcttaagaaatattaaagttttccagtttttgtgtggcattaattatgagtgccatgattgcgtgaaaaatgactgcttttgatagtaaagggataatagttgtgttactcatatctgttagtacattcaataactgtctattatgtccaggctgaatgtttggtgctggggagatacagatgaattagacacttccactgcccctgaggaygtcacagtccagagagggaggcagatcagtgacagacacttgcagaacacgggggcagattttatgacagacctcagcccagtgccatggaagctcaagaagatgtgtctcacccacaccaaggcttcccagaaggagcgattattgagtgagaattaaccaggggaaggcagagaagagcaaccttccagatacagagaacaggatgagataagatgggggtaatagtccagtgaagattaattttattaatgttgagaagatgtagaattgagaaaaactcacccgtgccctctcagatcttttgaaatttcagatccaattccaagttcaccaaaagaaacaggtacagaactgtattactttgttttgggtctagagggatttggccactttgcacacttcatttctaagtgtacttccctcttactcttatccacatgctccataatggtctggaaccccttctaggattcctgactrgcacagtttgggaacaatgtagcccactctggagttgactaaagtctactttaagtctgaaacttaaacatttcctgagtttgccatttagattctggtaaggcacttttttggtggtggagggtgggggggtcctgtaagttatcagtatattctttgctgggggttttcccccttgacccataatttgttacatgagggtgtatcaggaaaacctgtcatcttgtagtatgtagttatatacagatgctcctcaacttataatggaattacatccggataaacgtatcttaagttggcaatatcataaattgaaaatacacttaatacttgtaacctaccgcacgttgtagctcacgctacactaccttaaacatgctcagaacatttacattagcctatagttagacaaaatcatctaacacaaagcctactttaaaataaagtattgaatatctcatgtaatttattgaatactgtactgaaagtgaaaaacagaatggttgtatgagtactcaaagtatggtttctactgaattcatatcacttttgcaccattgtaaagtcaaaaaattgaaagttgaaccatcataaattagggaccatctgtacattacccatgtcaatgacaaataagacaaaactaatttctatttgctgttgaaattatttttattcacaaatctctccatcttgacattagtcaccattgaatctcaagtgcagcgtaaactgagaatgcatctataattatgggttgaattttgcatgagctacaggaggcagccaggtggggatacccactgtcctgggggcaggagacactggttttgatttttgcagtgatattaagatcaaatagctgagggatttttttyttttctttttggaacccgggttgtaggggagagaaagtgtagggtgggaaagagataagaagatgggagaaagtggatggggagctgatgataacttacatttgtgaaatggaattgsagtttgataaataaaaaatactgattttattcraccaaagacattatactttttctgcttaattaactaatcatatgaactcatgccttgttaatgataatccattaygagatgcagttgaatttgctaaatctatttcaaaagctctgcttactcaaccatttatagcacatttgacaagtaattttttctatagaagactttaaataaaaaccattgaaatagtgtaagatcctagacccacatactgtctgccatcacacatcactttcctcagtgtctgtcagttgatgtttttgtgtggtgaatgtgaaccagtggcctgaagaaatggagagtaaatggtgatgaggtattgctgtaagttgtgttttctgttataactaagtcttgacttacccatggtaattctttcttacaaaccttccatatatgtgtgctggtttctattcctgatgctgaactgttagttttctaatatttaacttttggcttccaaaactacatgaagttatttttctaaagaaagacaaaaaaaaagaaaaagatacctacttaaaagtagccttcctataattagctgtgtacacatgttagccaaatraggtatagatgtagtcatttttagcctgaaatgattgaaaaaggtgaaattaatgaattaatcttggtgcagtttcaaaatagtaatggaagaaaaacatagccattttattcttttaattatttttttcagtcataagggaaccatcatttcaggaagaaagattattattactacagtttggctttaggtcatattttaggccatttatgatgtaatcatattttccagctcaagagttttgtgtgaagagatttagatctagtactttattttgaaatacccaaaccattttttaaatcttgtttttggaattttctaactttctgcatgccatcctagttctctgtcagggaccctggttttccagctcccttttctctgaaaaatacacagttgggatgttgaagggccctagtcgaaaggttattgatttcttcactttcgtcttttgttactctcaaactaaacatcattaaggcttcggcctccctaatctctgagtcttcccaagtcaccccaaatgtagaaacagtccaattatgactagagcacagcttcaagacaaggtttttgtaccattttttccccaattgctgctctctacccactagtgggtcatgaaatcaatttagtgggtcatgaccagatctttcatttttattgtaatagaatcagtagaaaatgtcagagtgtactgcaacatagcgtcataagggtaagtattgtttcataaaacttgtttcatttttacacactatgtttgtgtatactgattaggtaaataaatttcttacactaggtcatggtaaaaaataaatgtgaaaaatcgaccgcatcccctttcaactggattgcaccattcagcctctttatagaaattctgcagggccattcctgttggccagttgggtcctgggaatcatggccaaaatctcagcattactttctatccagtcatgttttatttcctctcacttgtgttgactccttacggtgatggtttcctgactgtttggacccctgtccattcagcaaactagtgatgagtccatagttctatgtggcctggtaggtgtgatcggggaacatgaagagggggaagattgtcagcttcaccatttgctagaagctgattctacctttccttctttggtgacaaattttaacctggttaagggaaggttatgttaagacaggaaagcatagttttccttctgaacttgcatcttttgcatttttcagaggcggggaggggaaaatttggtggcagcagcattccctgaatcccttgccaggggktgtacccagtaggaagcagtagcatccaggtgggggctgagacctacasagacactgggaggcatcaggatccaacatcaggatttgaccacagacactcttggggtagggaccgaaactcagcacacttactttaaccccagcatgtgttcaaatacagaatgtgctaaaatgtgattataatgttcatgtcattctcagatcactggctaaaggcctaaaagagatcttggaaataactagtttcactctctttccttcacacttatgcaacactagataagtggaaatcctgccttatgtaagaatccaaagaaaatttagttttctctgccaagtaatccatttcagcaatatttgttggtaatggtgcctattaagtatgagacatctggactggcatataaattggggttcattctgacaaagtatatatggatgtttagtaatgggtcaatctgggattgcagggaaatgaagcacccagttttcagtggtgatccctttctcctagctgagcagcctagtactaagagtggaatgtattcccttatatatgctcttctatgccccaaaaatgagtgccttgaagattctgatgagagacattaatgatagaggcaaacagtgtgtggctgtgactggaaaaattgtgtgtttgtaggaaaagggcttggaattgtgagacttggagctgtaattacatgagaaaaaatggggagtgcagttgtcatgtccatgtctgcatttttctttgtgagcactgagctggataactgaagcctctgagtggtttgcagaaaagcaggattaatactgcttctaaactgtccagtcctcagaaggaagtttcttggtgagtggatgggataatatggatttaagttagaacattttcttgaaagtaaatgccaaaaaacacacaagatatagcttgttggcctcaatacagctgagggctcaattatgatttagaacacgctccctgaaacactcgcctgccctgaggtcaacctaatgactggaaattctgcaaatgtaacagctactatcacttggtctgtttttataacatacacacacacacatacacaggtttggataaaatcagttttctaacagtgctctgcttgtgaatgcttggtggtattgtggattatcaaaaatgtttacagggattcttgagttacattatttcagtgatcgtttagccaggagaaagtttttgttgttgttggtttgctttaatgaattgtgccttttttactgggctctttcagcctgtgatcacctccatgcaggtcgtcttgatttcatcattgggatgggcttttatggtgctatctgtggaggagaaagcatatatgcagttcctagaacttccctacccttctttaccttycttttttaggggagctcctataacactrtgagtttgttcttttactctaggtctagatggtgattttcaaattttaagttcaactcgtaagtggatcgtaaaattactctagtaggtcactccagttttttttttgtttgtttgtaaaggaactgaaatagaatagaaaatatcagagtgtattcgcaacccataatatagctaggtaatgtttcatgtaacctttgtttcatttatacacatgcacgcatctacrtgttccctcttatgctataggttgcaacataaagtgtacttcttagtgtaggtcattgtcaagaggctttatttatttatttatttatgtcgttgttgttgtcaacaggttttaaatctacttatctaggagaccaaaaaataccttaaataaatgctgtcattttagcttttgttgccattctttgttgtttgcagcaacagaattttggcatgtgtcaaaggcacttgacttccattgagcaaatgggctgtttgatctcagggcactgggtttttcattgcctattaggaaggtaaagccattcatccaaaggcagcaaaatgcaggggatggcgaggaagagaaggaaaacaaacagtgtaggtggaaagtctcaggctcttcccagtaaacaggcattttcaaatatcaaagactcccctgcattaatgctacagagtatttctgtacactttgaagtgatacactcatttgtaaaccaaattataatgttgtgatattatagcccaggatggcaggtgttcagaaagcataycacttattaaaatggccatatgaaagcctagtacattttctgttctattgattccagtctcatttctactgcttctactttcctctgctcctcactgaactgcccacctgctcccagacccacaatcactcgagatatcaaatcagcacaagattcagtcttcatcacccctctagcatgcatacctctcactcaacccaggtatctagagacacatgcttctaagctgactcaggaggcagacttgcttgactcctggggcacttttgagagggggcgttctcttcctttccatgtgccctgaggactggcaggggacagctataaattcaaattgtggttccagtgcttattagctgtgtggccttgagcaagtacagcatcactttcatcatctgtagtgttgaggtggttttgactaccctatagcattgttatggtgaataaatgcaataatacaggtaaggtactgagcagtaccatgcacagagtagctcttccatcagtgatcagtccctcttctttctgcctttatatgctttttgtctttctaaagggctgctattcaagcccctaaggattgaggctgtgcccttctcctgctatcttctcttcctggaaactggagacctccatccattgggctgtggccagaccacctgtggcctgcccagactgagattctgtccagcagttggcattcattgctcttgtattttggacccctatgctgactccacctgaaacatgccaggaggatggtaagaccattagagatatgcacttgatcctcagctggcagccgggccagtcacccagcgcctgtgccactctacaggcaggtctcttgtgggcactggcctctctccagctcatggttttaggagtaggtcatcagactcaactgagtcaaaaggtactaccctttttataatttctcttcatcctctgatcttctaagtgaatgaatacttagagatatttctgccattaagcttatcatctgatcttgaactagtcatatattagcatttgaattcacattttaagtatctttacacattcgatatattttccattttaagtacttaaaaaattcctcttacattgcaggtgaaattccacctggaattgagtctcagttccacttctcagttacatcatctcaggcaactcaaaagtttcagtttcctgtaaaatacctttatgccttcttcccaaggatgcatgaagatcaaagttttttgaatgctgtgatgctttatacaacagtgattacagtggcaatgttatgatgagtgaaggattgtacgtatggtaatagtaacattattatttatggactggcgataactagcctattcttgatgatatatcggattgactagatttgaccaatatcctttgcacaataactgtgacaccaagctgtgacaaccttagagagaggtcctgatagaaagagactactcttagaaagcttcggtcacctgtaaagacccagacctaccacttattagcaaggtgaasttggccaaaaaaacttttgatacaggtttgtcacctgtaagaaagggtgacactacttttatttattcaacaggcaattgttgtttagtgcctactacatgcaaaacataaagtaaacaaatatgatgcctgccctcatggagcctgtagtttaattggagagataagcatgaaataaataatcgcaaatatatgtgtaattaaaaataccagtaagtgtcctaaagaaaaaacgcaacttgtctcataaagttgtaaaatgtcaataagagaccttacttgcaaaagacctgagtatcagcttttagatgagaccggtgttacctgtgttgcagaggaattagtggattacccatgctgttgctcctgtttgtatacctctgattttattcttaggaatattccctctctctgctggaagggacaagaatcctgcccctgtactccagcaccatgggcacctgcttctggccagctctgacttcttgaccctgtagtctacctctctctccagtacaaacacacctcttctccacctcccaacttcatctgccacctgttcctgctgccatgctttccagagatccagccccacctgcttggactttcacccaccacacatgcatctccrttgtgcttcatgtagttttcaggttcagagaccccttccagtgttatacaccttctcccagctaatccttcacccgcaataaacaacagcagtatcgtttatcctgtatttactgggtgccagcactttaaatccatcattctctctagctgtcttggcccccttccaagccctggaagccatctggctattagaagaaataaagtgtcccttgttcaataggtctgttggtcagcctcatcattctgctgayggccctaccccaccrtgactcttattcatttcatatgctcaggtagtgccttggttccattaactgggtttacatcttgaccccttttgttkgtttcctacctagattccctgcaaaagaccccaaggctgacctctagtcctcatatgagagaatctctcaaacatactgctatgtcctcttggtgccatgttctgccaaccttctcatatgtctgcattgggccagacaccaacctgccttatgctggcctgtgccctcagcctagccccttctgtgggggcccctgatgccagctgccattctgagtcttctttgttttgcccagagtcggaaccatccctggtcactggccttgtgctattgggccattttactgacgggactcagaaccaatgtgtgcttttatattttaaagtatttactagatttagcctcttaggaagtttgaggtacgataacttgactgaggcacacccttaactttgtctctttccccttctcctgtagtaactagctatatagcttatcaattaaatgctacttttctgtctcagtttaacaaacttgttcttggaatgctcactaaactgaatctagtccaattttgtaaaatttgtaaaattctttgctggcagaaaagaaatttcactgtgtttaattaaacagattaaaatgtgattttctcaattgtcaaaactgtttttgatagatttcctgtgtttcgtggggtttttttataaaagaaaaattattcacattattgtaattccatattatgtagaacaggaacaaaggaagtgatgcagatcctttggcagaaaggtcatttgagtcactggagtgtcctgaaccataggggaattagagctcctattgatgggatgcagagcacatttcttcagattaagacaccgctcatttatgtggatgtttttcatctgaatatttgtgccaaaggagagcaacagagggatactcacttgtaaacaaaggggggtggtacaaggaggaaatgaatacttcatagaactctaaaataaaccaaccagattttcagaacctctcactcttaataattcctgccattccttatctcttagagcagagatgattgagagaattaaagagtaggcttagtaatggtgaaaacacaaattctgattggtaatccaggataacaacttcaaagtaatagaccttggtgttctaacataggggtgtccgatctttcggcttccctgggccacattggaagaagaagaattgtcttgggccacacataaaatactctaacacaatagctgatgagcttaaaaaaatcacaaaaaaatctcctaatgttttaagaaactttacaaatttgtgttgggccgcattcaaagccgtcctaggccacatgtggcccrtgggccatgggttggacaagtttgttctaacaagaaaggatgatgaagatgctggctcctgactacaatgggtggatatttactgctgaacacacagcactgtatagggtctccaaggcctccatgtcatccttgggttaattaaaataagggatgaatttagggatgcagccggctcctctttctgatgattcagcgtgaaggaagagggtagttttgcagagaagaaatmcttccagtgtttctgtcaaggattagcctgttgatgaggaaattcagacatcaaaggtcagtgtagcttttggttaacattttgcataattcagactgactaaacttacaattcctggtaactccatttgaatctttggcaagccttggaagtaaacgggagctacctccaggctcagactagcaatcatattactaggtcaatgattttacattctagtcagattcctttaggttgcaaataactgaaacatattcctgcaagaaggaggaggaagattgtaaggatagactcaaatagaaaccacagaatcattagggacatgaagtctctctttctactcatgccatctcttctcactgtccacttgcttcattcaattctctggtttatcttaagcttccttgtggcccactcgagtttacttcatattcctgtaacttagctgctgtggctttctgactcagatttccagtttctcaacttaaaatgtttaaatggagagcctcatgggcccatgctaattttttgatgcaggcaaccaagtgatatatagctggccagcctataaatagactgaattcagttcaggtgcccagctctggttcaaccagatgtagcttcagaggccaagatcagagtgggtttgcttagagcagcaggcatatttttgcatataaataggcaggcagtgattggtgtctcctgtgtagctgacctcctcatgctaataaatgaatccaaacactgacctgtcatgaaagaaagagtgccttgtgtggggaagccacattctgatcttttattccattgagttttaaaattcaatgatgaccacctttctttcttcctgttgaaaggtggcctgtcctatatcctttcagtgagacacacgtctctcctatcctaggtgaaatttaagtrtaatgtaaaatgctgttgctgcaggaatagtgtacatcaggaagaaaaggggcaaataggaagagagaaggagaagaagaaaggaggaggaactaactggaaatgaaatcctcagtttctacccagaaacttgatacatctccatgacactaagccatatgctagaggattgggggaggggtggcaggagaattgagggagagggagaggaagggaggtgggattgaaacaagggggcaaataacaggaaggaaaggattttggatattaggcctcaaaaggtagaaattccaccttgatgtctttggcgtgatgttgccaaaggataggacttggaatggacatgatcaagtgggccaggtgggttttccattttcctttttcctgaaagcccaccagtagacaattgatatggttaggccttatgtccctaccaaaatmtcatcttaaattgtaatcctcataatccccacatggcaagggagagaccaggtagaggtaattgaatcacgggggtggttttccccatgctgttctcatgatagtcagtgagttctcatgagatctgatggtttataaggggctcttccccctttactcggcacttttcctgccttcttgtgaagaagttgcctggcttccctttcagcttctgccatgatcgtaagtttcctgaggcctccctagccatgttgaacagtgagtcaattaaacctcttacttttataaattacccaatctcaggcaattcatagcagtatgaaagcagactaatacaacaagtccatgagcaattgctggggcggtacagctcacagcatgaatgtctcaacttctgacatgccacagtcagacatgcaccagaaaataagtgtctggctgttcctgatgtccttactggactgtaatattttgaatttgccattctaacaagtggtcagaattgcagatggcatttaactattgggattgcttcatttggctttaaaatgtaacatgaagtcaagtgtgatggcttatgtctataatcccagtattttgggaggccaaggagggagaatagcttgaggccaggtgattgagaccagcctaggcaacatgaagagaccctgtctcttaaaaaaaaattatctgggaattgtggtacacacttatggtcccagctattcaggaggctgaggcaggatgattgggcttaggagatcaaggcttcaatgagccatgtttgcaccactgcactgcagcctgggcaacagagcaagaccctgtctcaaaaataaataagtaggtaagyaaattaatccaatgtaacatgatattttcattgagcatataccctttaggaaggacagaaggacctcattattctttcacatatcttcacttgctttttacgttaaccgtctgtcctaaattgatgccatatagtctggcgtgcagattcacatttgtcaagatttctaaatatttgatcttaaggcactgtctagtattgcacaaatcactaatcttttatgcttttttcttgataattaaaaaagagtatgcttaaaactcctgaattcatcctcgtaacctagttcagatgcccctcctccttgaagcaccccacactcctagagctatcatgtcyccctgtgatgcttaatactgagtgtcaacttgcttggattgaaggatacaaagtattkatcctgggtgtttctatgagggtgttgtcaaaggagattaacatttaagtcagtgggctggggaagacagattcacccttaatctgggtgggcacagtctaatcagctgccagcayggctagaatataaacaggctgaaaaatgtgaaaagagagactggcctaggctcccagcctacatctttctcctgtgcgcgatgcttcctgccctagaacattggactccaagttcttcagttttggaacttggacaggatctccttgctcctcagcctaccaatggcctattgtgggaccttgtgattgtgtgagttaatacttaataaactcctttttatttatatatctattccattagttctgttcctctagagaaccctgactaatccccctactttggtcagcacatagcgctccatattgtccttacttatttgcatggttactcacacatctatgaactcctttcccacagcacctgtgaccttttcacttctgagcctccagcacagagcacagtgaggagcacacagtaggcgctcagtgaatgtcttgaattgagtagactatattcagtacagtttagcactcacaacattctcaggacctaccctgtggggccacattgtaggtggaactttgacacaggacttgaggtcaggatgcctgtggttaagcctagccttgttcttaagagtatgtggctttgcctgggagagacacaacaaaaaaagagaattttagaccaatatcctggatgaacatcaatgcaaaagtcctcaataaaatactggcaaaccaaatccagcagcacatcaaaaaagcttatccaccatgatcaagtgggcttcatcactgggatgtaaggctggttctacaaatgcaaatcaataaacgtaatccatcctgtaaacagaaccaaagacaaaagccacatgattatctcaatagatgcagaaaagaccttcgacaaaattcaacagcccttcatgctaaaaactctcaataaattaggtattgatgggatatatttcaaaataataagaggtatttatgacaaaaccacagccaatatcatactgaatgggcaaaaactggaagcatttcctttgaaaactggcacaaggcagggatgctctctctcactactcctgttcaacatagtgttggaagttctggccaggayaatcaggcaggagaaagaaataaagggtattcaattaggaaaaaaggaagtcaaattgtccctgtttgcagatgacatgattctatatttagaaaaccccgtcgtctcagcccaaaatctccttaagctgataggcaacttcagcaaagtctcaggatacaaaatcaatgtgcaaaaatcacaagcattcttatacaccaataacagacaaacagagaaccaaataatgagtgaactccccttcacaattgcttcaaagagagtaaaatacctaggaatccaacttacaagggatgtgaaggacctcttcaaggagaactacaaaccactgctcaacgaataaacaaatggaagaacattccatgctcatggataggaagaatcaatattgtgaaaatgactatactgcccaaggtaatttatagattcaatrccatccccatcaagctaccaatgactttcttcagagaattggaaaaaactactttaaagttcatrtggaaccaacaaagagcccccattgccaagacaatcctaagccaaaagaacaaagctggaggcatcatgctacctgacttcaaactatactacaaggctacagtaaccaaaacagcatggtactggtaccaaaacagakatatagaccaatggaacagaacagagccctcagaaataataccacacatctacaaccatctgatctttgacaaacctaacaaacataagaaatggggaaagggttacctatttaataaatggtgctgggaaaactgactagccatatgtagaaagctgaaactggatcccttccttacacctcatacaaaaattaattcaagatggattaaagacttaaatgttagacctaaaaccataaaaatcctagagaaaaacccagacaataccattcaggacataggcataggcaaggacttcatgtctaaaacaccaaaagcaatggcaacaaaagccaaaattgacaaatgggatctaattaaactaaagagcttctgcatgacaaaagaaactaccatcacagtgaacaggcagcctacagamtgggagaaaatttttgcaatctacccatctgacaaagggctaatatccagaatctacaaagaacttaaacaaatttacaagaaaaaaatcaaccccatcaaaaagtgggcaaaggatatgagcagattcttctcaaaagaagacatttatgcagccaacagacatatgaaaaaatgctcatcatcactggccatcagagaaatgcaaatcaaaaccacaatgagataccatctcacaccagttagaatggcaatcattaaaaagtcaggaaacaacaggtgctggagaggatgtggagaaataggaacacttttacactgttggtgggactataaactagttcaatcattgtggaagatagtgtggygattcctcaaggatctagaactagaaataccatttgacccagccrtccctttactgggtatatacccaaaggattataaatcatgctgctataaagacatttgcacacttatgtttattgcagcactattcacaatagcaaaaacttggaaccaacccagatgtccatcaaygatagactggattaagaaaatgtggcacatatacaccatggaatactatgcagccataaaaaaggatgagttcatgtcctttgtagggacatggatgaagctggaaaccatcattctcagcaaactatcacaaggacagaaaaccaaacactgcatgttctcactcataggtgggaattgaacagtgagaacacttggacataggatggagaacatcacacactggggcctgtcgtggggtggcgggaggagggagggwtagcattaggagatatacctaatgtaaatgatgagtgaatgggtgcagcacaccaacatggcacatgtatacatatgtaacaaacctgcatgttgtgcacatgtaccctagaacttaaagcattaaaaaaaaaaagtttgtggctttggtcaccatctttctgggcctagttttctcatagatgaaatatgggtaatgattcctaccactcaagactttcacggcgatgaaatgaaaaaatatatatgaaaagtctttataaagtgcagtttataaggaagatatcatcaaaactattctttcggaatttctgaaactaatcttctttagatgtgatataagacagatctttcttctgctgaatcctgctgtatggcaaacataaagttgaaaggtatactgttgtgagaataataaatatgaaacattggtgtagtgcctagcacatagtagtcacttgctgatagctgtcattactattattactactgctattattaggataaagtagtgtttattcagctggcttggagtaaagcaattgagtgatctgagaggggtaacaaattttcaatccttgtgtagtctgccactttctatccctgaacaagcaactgatttcttttttgagatggggtcttactctgtcgccaggctggagtgcagtggcatgatctcggctcactgcaacctctacctcctgggttctggtgattttcctacctcagcctcccgagtagctgagactacaggcgcatgccaccacgcccagctaagtttttgtattttggtagagacggggtttcaccatgttagccaggatggtctcgacctcctgacctcgtgacctgcctgccttgtcctcccgaagtgctgggattacaggcgtgagccaccacacccagccagcaactgatttcttacctcctttctcaatactgtatgtaatctttccttccttgtgtgctgtgaggatgactttgagctcagagaagtgctgtaaaaatccaggtgagtattgctatcctattgagygtgtgctttaattctgttattatctgcatctgtcagacatggagccttcaccgaggatagtgaggctctaaaaatttcagcatttatctgcagggctgacatgccactttatttagaagttggggtggagatggaaactttccaagtggttgatgccattgagccttgtgaatttgtgagttttgtacttgccctctttctctcttaaccattcttaattttccaatcctgctttttgttggcttcaaatgtgctcaccagaatcctgccagctttagttggaagaaatacatttccgagcttagttggacatcagttttttttgggccctgcccagacttttgacagagaaggtagtgttaagggggttgatggtgtctagacagtaaaatcagaaactttgtaatttatgttgtattacagacgtccacttcccggattggaaaaaggaaactgacttttatctaaggaagttacattaaaaaccaaagcccctgggtatttctgacccatgaaaagttaaagcttgagtaattttacataacattctccagccccttcaaagactggaattattgagagtagtcctgtatagggtcagggatgaaaaataaacttccaagtctcagaagataattcatagacccatataacagtctttcccggctactcacctctgattagacccctgtgagctcacaatgtgagtgggtcttgcacatcagtttcagagggattttggaaagttgtagaggagagaggctaatagcaaaagagcatggaggtgtttggaattccaaagaagattgaagatctgactcagggctcaccccgctaaaaaaatcagacttttccttaagggaaaaagcatgttgttgatttggaaaaagtataacaaaaattaaaagtaccttaattatgcaatgatattttgtttttctttttatgctgtttaatgctcataaatatcagatacatcctcaatattcattattgtggaaaataatagaaaaaaatcttaataagctaggcaaaatttatgtaaaactaaaggcttttaaagcccatgtcagcttttgttttgttttgacctggatcatcatccaggttyccaagtagaattctgagttcctttcagaaaagtatgaacttctttatgtagaactatgacacatcatatcaaaggctactatctgaactgttttagaacacatgtatttaaaatgctgtagtcttattagcattatgaattaattctttgcttttctatcagtctgaaaaattttaaatatcttaaagtaggaaaattagtaaaaactccattcattacggaaaaattgtcttgttattcttacaagatgctaggtcactctccctgagttaaatttcactttgacagtttccagctgattgtgcctgggtcctaayagacacacaataagtgttagctgaactgtatgttgaattctttctaaattttacatcgaaagcacttttcaatgtgtagtaactagatgattaaaatttgtcttgaagagcagatagtttaagaaaacagatataagaaacaagagaagagtgtcatgtatagtgtattgactactaaatactgatgatacgtataatgtgcaggaatctctgtagcagccagggatgtaatggaagcctttttcacagctytgtagccccctggcagagagctgagagatcagaactgtgtcagacacttgggaagctgcagtcctatgacatttactcgcatgttactcagtttaggatgtttaagttgttggcttcccagggtgatatttgatgtttttctttagcttccacagttctagcagaatgcagaaaaggtaaagggtacagtgggaaattcctgattagttggcgaattgtctttacagaaggatgcttggtaatcagcctaagctggaacattcatattccacccctgctaattaatggcagaatgcaaagatagtaaaactgcagaaataacaatgactgattataatagtcaccattaattaagcatttttatcagctcacttaatttttacaactctatgaatttgatattatcacagttttcaaatgagctagttggagttcaaagaagttaaataccgtgactaagatcacagacttagtgaagacgagttatttcaaatcagatttggtctgttttgagttcaatacccatccttttaattaccatcctgttataaagctttttattcaccttcactactaatttctcataagaagttatattttggcttaccctagtctgctcaacaaaagtatctaggtatcagtatatcatacctaaaaatctaagagccctttaaaaatagatcttcctccaggatcatcttgatccctgttctggttatttaatgctgcacaacaaattattccaaaacgtagtgggttaaagcaatggcagcatttaatttgctcgtgaatttgcartttaagcaggacttggtggtataacatgtctctgctttgcttggtgtcagctggggttgctcaaagaggactagaatacagttgacccttgaacagcacaggggtcagtgcatcaactttcacacagtcagaagtctgcagtcatttcctgtcattaggctcatcttccaaaaagtggaagaactacagaatgttctcagatggcaaatagattttaaacctctacattcttgagcaaatttcacccttaaatagaaattcagccaattattttaatctcataaagagccattttaaggagccctaaaatttttttcttctagtttttrttttaggttcagggggtccatgttcaggttggttacagggtaaattgcatgttgctgtagtttggtgtacaaatgagttcatcacccaggtactgagcataaagttagttgtttgatcctcatcctcctccaccaaccctccaccctctagtaagccccagtgtctgttgttgccctttttgcatccctgtgcacacaatgtttagctcccacatataagtgagaagatgctggtatttggttttctgtttctgcattaattcacttaggataatggcctccagctgcatccatgttgcggcgaaggacatgatttcattcttttttatggctgcatagtagtacatagtgtatatgtaccacattttctttatccagttcaccattgatgggcatttgggttgattccgtgtctttgctattgtgagaagttccaaattgccgtctgttagatttgttgtgagaaataaggagttaatgagaacaaattacatgaaacaaatagaagtcctaacattaatggttaatctgtatttagtggtaaactatgcttatgtgtttattaaaattttataactttacattgaacatttaagagattaaatacattggcacaaaaaaactgcatataacttttgactcccccaaaacttaactacaaatagcctactgttgcctggaagccttaccaataacataaagtgcattaacacatattttgtattgtatgtcttatctattttaatcttataataaagtaagttagagaaagaaaatgttattaagcaaatcataaggaaaatatatttactgttcattaagtggaagtggattatcataaagatcttatccatgtcttcagattgggtaggctgaggaggagaaggaagaggaggggtcgatcttgctgtctcaggggtggcagaagcagaagaagatctgcatataaatggacccccctcagttcaaacccatgttgttcaagggtcaactataattatttaaatatccggcagttgatactgggaagactcggataactaactagaggctggcacagtgaggctccacaggcctctctcttcatcactgtgtggacatgccatgtggtctctccagtatggcagaatcagagttgccaggcttcctccatgttcatgttggctcaggttgcccagtgtgtgtggaggggctggtggcaggcagcgagagagggagaaccaggtggaagctgcattgtctttttcaagctagcctcgaagtcactcagcatcacttccatcacaggtttttttttggttagaagtgagccactaaaactggcccatattcaagggaaaggaaattagtcttcccattcctgggaagaatgtcttaagaatttgtgaacttgttttaaaaccatggaggcacctgtgaaccttgcttgagtagtgtctcccatgacacctgtttcaacttaaagtgatagggttggccctggacagaaatgtgcaagaactgagagttgtcaaaaatgtctaccgcttcacaactgtgaccctcacctcccttcagggcctcccttcccaccagtaatggcctgtgtggccatagagctgctctcttctcccacttcacacctcttctcacccccaccataatactcatctgattgattagttagcccaggatactgaagcccagagataagctgagcaccattaccagcatagccagcagagcttctgcagcatcagcaacactttgtgcctgagccagctctgactgaggttcatagtgtcccagattgctatagcatatatgttttcacatcagcagtacatgctttctcatctcttctaacacattcgtattaatgatatgcaacagctttccctggggttttggccaaaagctatattgtccattttagtatattttatgcccatgttctctttgtcttgttaatgtgaattcacatrtagctttaaaatatgataaatattaatcaatgatcaatacaaaagcatgaaagtatttctattaaaaatcatcacaagtttcttccagaggttaaaaataaagttaaaataaagggaaaaaaaaawttttwaaattatcacaagaatattagccaccwtgcctggcctaatattctgttaaggagaccttttttcacctttatttttagtattgttcttgaatttatggccaatgcaataaaatataaaacagatataagtggctgggcgcggtggctcgagcctgcaattcctgcactttgggaggccgatgtgggcagatcacttgaggtcaggagttcgagaccagtctggacaacatagtgaaactccatctctacacacacacacacamamamamaaaattagccgggcattgtggcacacgccagtagtcccagctactcrggaggctgaggcacgagaattgcttgaacccaggaggcagaggttgcagtgagatgagattgtgccactgtattccaacctgggcaacagagagagagaaagagagactgtctcaaaaaaataaaaataaaaaagatataagtggtccagcacaatcatatgtcccttttatttcacttactcttctgttctaggctaactcccatttagccacttggctctctcacttcyttcaagcctttgcttagggaggcctatacagaccactttattatttaaaatttcacarctctccacctcctgcatttctgttccccttactcttcactacttttccgtaggacttactaccttctcacatactacatttacttgttgtacttatttattttttatcccccactagcatgtaagctccactaggatggggattttgtatgtattgctcacccatttattttcattatttagtagtatgcccaacatatagtagatgctcaatgaatatttagtgaatgaaagaataactgttggaaaagaagagaacaaaatcatgttatttgccttattaaatcatttaattagaaatctcaaggcaatcaaatagaataatattgaaactaatgggcaggctagtccaaaggtactgagttttctcagttgattacagtcagttacaggtcgaactctttgttctacccttcccctgccttctcactattgcacttgactagtctttaataatacaataactaatgggcaaattaagtggaaaaatccatttttattttatatagcatcaataatctgttagcaaatatattttttaaatcttatgcaaatataaaatgccttggaaaaatttttattraaacagttataggaacaacacaaggaaaatagtaaaacttagagacataaaacaagataaaagggtatgtaatctgggtaatcattacttattatatactgtcaagatttctattttttctaaatttatatatttaatactctttcatattatatactaattattaatttcaatatcctgtatttaatattgttccaatcaaattctaaaaggattttttgcttgggaagtaagttaaagtttgcctagattcaagaatatgtagatgaaaatagccaagaacactttgaaaaagaagggatagtgtttggtcagagaatgtcacttattgtaacattaaaacagaatattaggccaggcatggtggctaattcctgtaatcccaccactttgggaggctgaggcaggaggattacttgaggtcaggagttcaagaccagcctgggcagcatagcaaaaccctgactctactaaaaatataaaacttagctgggcatggtggcacatgcctgtagtcccagctaccctggacctgggaggcagaggttgcagtgagccaagatcatgccactgcactccagcctgggtgacagagagagacaccctgtctcaaaaaaaaaacaaaacacacatacaatatgatactttaataattaaagtggtactagtgtaagaatagacataaaaattaaagaaatgtcatagtcatggaacagactcaagtgtacataaaaatctggtaaggaggcatcacaagtcaatggggctaggcaactgattaatcatttttaaaaattggggcatcatgtgacacatcaaaattcaagatggatcaaaatgttaaatgtaataactaaaatataataactataaagtaataataaaacaatgagaaacaggtgattttaagatgtgctgttaggatagggggtgagggaaacagtgtaagtggaacaaggaaatcacaataggaaaaatcaatcactttgattacattttacatcctgatatggtatcttaaatgtattttaatttttaattaataaatactgtacaaaaaatgttaaattatttttttgaatcctacatttgatctaagtaacataaataattacctgaagatttaaatgtgtttcttttctacaaaatcaaatatcaagaacatttaacatatgtagattttgaatgagctaaatcagaaataatacaatattttatttgtatcttaagtttaaagtttccttagtattactcttcatagttaacatagcttaggctacaaataacataactagattrtgttgcatggctgttagcttgttgttgacattattgtttttatgaaagaacatgactattttaatgatgtccttatgaaggaatagaaaaatacacaagcttgagatttttaaaaagttgctcaatttttttccagcttaagaatttagtacaagttttatgcatgttgtttgcctagttgttggattgacgataatacctgtaaaattcctkacaatttastgtattaattagccttcctcagaaaatcctgaggatgtttccagactgtgtgccgcttgtacgttattgcagttgtcrttgttttgcattaaggacaggaatctctacagatggcaaccacatacttgatgcattttccagaaatcactgaagagaggtagatttcatgtgcgaaggtggagaagaaagccctgtctcctcgcccctgccaagctcaaacccctgctgctcctctgctgccctcttcctaggtctgccagcctgagtcccttgccaggtcctgggtgttttacctcctaattacaactctgcttggcacctcagcctttctttccatgaaaaatcactagtggcacatagaggaccttaaaaacaaaaacaacaaaaaaagattaaattatatatgtatgtatgtatgtatatgtatgcatgtacgtatgcatatatatgtatagtctggccaaaaaccagttttgttacatggattggtatcacacagtgtaaatatcatggtcatagagtagattcccccatctgtagttatcttctctgaactaatatatttaagccaaaactaaaatggagaattataaggtctagggtattgttttgtttattttgttttgtgggagttagtccaggtcttgatcagttcatgcccctaatttgctttcaccatgctatgccttcaagatgcygaaataccagaattaaaagtagaaagttcctgttgatttttagatgycttaaatattaaacatttaaattaactaatggaaggtgaagtagataaaccaaatcatcaagtaaactgagattcatttctgtttcgttctgcagtaagtcatgtgatattttcctgggaaaattcatatycttaattatctttggtttgcaataatattaaaataactgcatttcctgagtacaattcaattgtgccattaagggatgtggtgttctttcatcattccaggcacgatggaatctactgaaaaaagctgaccattccaggaaaggtggaatctactggaaattggtcagamacaatacacacgaaaataaaatagatttgatgatatttagaagcatgcataatgacagaagttgcattatctctgttctagtgttgcttagacatctcagaatcatagctttgggagrgatgggtggaagttgtgtcattgatttatcactagctagctgagggcctgcttaaccatgtacctgttagcctgtggaaaaagaaaaatgggagatgaagaggccacactttsaaggagttccggtgtggtgatgttyaatcttgctatcttgagcctttattcatttcttcatgctctaggactgccaaacaggaggtcacagtctagggagaggcacagaaggacatgggcctaaagagggagtacattctacatagcsctttcacaactttctaactctgcaaagttaccacgtgtttcctgaggttcttttagaaatcccttttattgtatttaggagttaacaaaatatttaactgtaaagctcatcatgtttgtgttaacattagattgtactcatttggtatgttagcatagatcaggtgcctgaggttgtgggaaattatcatgctctgagatcctgcctcttgtattaatttcaaagcaacttcatgtgtgagaaatggcgggacactttaagatcattcacctcacctagcttgacccttctgtctattttatgaagctgtaaataaatatatgtaaggaatattgcttatatctccaagcattagcattgtcaggatggaggtgctgattactgagtaacagatcaagagcctcctaatagggtcagatgcattactgcacaagggaaggcatgtggaagtgtttctaacactatcgtagagctttctgagaggaaggaaagaagggagggaaggagggagggagagaggagggggtagaggtgaggaaggagggaagaaggaaagaaggagagagggaccataggttttctggttattagacaaaggaggaggattctagcttaaggaacagcctagtccccttcagtccctgaaacttttgttttctcactgtcagacaaagaaggtgaagtgtttgtcaggtgccctgcacaactgtcctagctatccttagcaggactaaaatgcctcctatcaatttcaggccaatacccctgatgaacatcaatgcgaaaatcctcaataaaatactggcaaaccgaatccagcagtacatcaaaaagcttatccaccacaatcaagtcggcttcatccctgggatgcaaggctggttcaacatacacaaatcagtaaacataatccatcacataaacagaaccaatgacaaaaaccacatgattatctcaatacatgcagaaagggccttggataaaattcaacaccccttcatgctaaaaactctcgataaactaggtattgatggaacatacctcaaaataataagagctatttatgacagacccacagccaatatcacactgaacgggtaaaagctggaagcattccctttgaaaatcggcagaggacaaggatgccctctgtcaccactcctattcaacatagtattggtagttctggccagggaaatcaggcaagagaaagaaataaagggtattcarataggaagagaggaagtcaaattgtctctgtttgcagatgacatgattgtatatttagaaaaccccatcatctcagcccaatatctccctaagctgataagcaacctcagcaaagtctcaggatacaaaatcaacatgcaaaaatcacaagcactcctatacaccaataatagagagccaaatcatgagtgaattcccattcacaattgctacaaagagaataaaatacttaggaatccaacttacaagggatgtgacgaacctcttcaaggagaactacaaaccactgctcaaggaaataagagaggacacaaacaaatggaaaaacattccatgatcatgaataggaagaatcgatatcgtcaaaatggccatactgcccaaagtaatttatagattcaatgctatccacatctagctaccactgactttcttcacagaattagaaaaaactacttaaaatttcatatggaaccaaaacagagcccatatagccaagacaattctaagcaaaaagaacaaagctggaggcatcacactacctgacttcaaactataccacaaggctacagtaaccaaaacagcatggtactagtaccaaaacagagatatagaccaatggaacagaacagagccctcagaaataacaccacacatctacaaccatctgatctttgacaaacctgacaaaaacaagcaatgaggaaaggattccctatttaataaatggygttgggaaaactggctagccatatgcagaaaactgaaactgggtcccttccttacaccttatacaaaaattaagatagattaaagacttaaatgtgacaaatttgccaaaattgacaaatgagatatatttaactaaagagctctgcacagcaaaagaaactaccatcaaagtgaacaggcaacctacaggatgggagaaaatttttgcartctatccatctgacaaagggctaatatccagaatctacaaggaacttaaacagatttacaggaaaaaaacaaacccatcaaaaagtgggtaaaagatatgaacagacagttctcaaaataagacatttatgtgaccaacacacatatgaaaaattcatcactggtcattagagaaatgcaaatcaaaaccacagtgagataccatctcacaccagttagaatggcaatcactaaaaagtcaagaaacaacagtgctggagaggatgtggagaaacaggaacacttttacactgttggtgtgactgtaaactagttcaaccattgtggaagtcagtgtggcaattcctcaaggatctagaaccagaaataccatttgacccagcaatcccattactgggtatatacccaaaggattataaatcattctactataaagacacatgcacacatatgtttattgcagcgctattcacaatagcaaagacttggaaccaagccaaatgcccatgaatgatagactggataaagaaaatgtggcacatatacaccatggaatactatgcaaccataagaaagaatgaattcatgtcctttgcagggacatggatgaagctggaaaccctcattctcagcaaactaacacaggaacagaaaaccatacactgcatgttctcatwcataagtgggagttgaacaatgagaacacatggacacagggaggggaacatcacacacaggggcctgytggggggtgggaggctaggggagggatagcattaggagaaatacctaatgtagatgacgggttgwtgggtgcagcaaaccaccatggcatgtgtatacctatgtaacaaacctgcacatactatacatgtatcccagaacttaaagtatataataaaaaaataaaaaataaataaaaagcctcctatccccacagccatccccagtttcctagccttccagtctatagctctagacttccaacaattgccaccttggcttgtttcacttcctcatgttgcttcctctggccatatggccacagattcttatcttttatcatacatattcaatagaagaaggctgcaccagaaaattttaatccagcagcgttcttatcctctagctaaaatgcttgatcttcctgaataaagcacagcattctttgtcttccaagcaagcaggagtaaacaggcatgctgctggctatttatgttgtctggagttacttctcttgagtctttgctgcaggaagttgatgaggaacaagaccatttccactgccttctcagatatcagttctctgaccttggcaacaaccttacccttgttaagtagtgtttgtctctgatatggtttggctgtgtccccacccaaatctcatcttgaatttgtagctcccataattcccacgtgccatgggagggaccaggtgggaggtaattgaatcatgggggcgaatctttcccatgctgttctcatgataatgaataagtcttatgagttctgatggttttataaaaggcagttcccctacacacacactcttgcctgccaccatgtaagacatgactttgcyttttctttgccttctgccatgattgtgaggcctccccagccatgtggaactgtgagtccattaaacctctttcctttgtaaattacccagtctcaagtatgtctttattagcagcgtgagagaagactaatgccgtctccaatcaaacctctacacatacaataatatccttcttctgagtcttggttctgagaagtctgaaaaggcagatggataactggaaggatcttgggtcacacaaactacttgggttcttacttaggtagaccacttcatggcagttagctgtgactcagctggttaacaccacagcttcctcttcccttctataaccaataagactgggatgtgggtgccatgaatgtaagggttgggtctccctatcttggattatacttctctcacctgtgttcagccacactattagaggagacatttgacacctgacagactggagcctttcctatcccctccctcacctgtgatatttgcggagctagttcattaggaaacacataacatgtttatgaggtgggaggggtacaaaaagaaaaaaaaatgtatgctcaaatatcaggggctcctaatgcaagtttttctatccctctttctttctctctttctttgttacatccttagagagaaacaaaatatttacactgtgtttgtttgttttcccagagcaattgacaacagacagtcatgtaaacatacccagtttaatgatcatgtaagaagatgatgactatttcagtctgtccctttgagctggctctgcatagactggcaagacacaagcgttttgtacttgctatttctagataaagatctcactgctgtaaaagtcttgcttgaatccaagttaccatatgaaccagttggaataaaaatcctaaacaaagttccttaactagctgcttccttctgagcaggctttttgacagttagagatctgatgttttgcattaaaaaatttcagaaaatgaacagattttcagacatgctgtagtacagaatgccctcttctccagtttgttttccattgtctcccacttttttttttttttttagctcacttggaaaaaaacaaaaacaaaaacagagccacaagcatgatgagttcttaacacattgtggaacttagtagcgtttaaatgagaatcagagacctgtattctcttttatatgtgaaggcacctgatgtgtgcttgtcttggtttaaaggtgaaatggaaattggcactaactatgatcctgtggaagtcacttaacttttctgagacttatttgccttcgtataaaataaggaaattgaactaacatcatccttaagataatgaggtttagaagttttagcccaagtgggtagtcaaggaaaatgtaatttatttttctttttccttttttttttttttttttgktttttttaagaatcagagtctcactctgttgcccaggctggaatgcagtggcacattatggctcactgcagcctcaaactcctggggttaagcaatgctcctgcctcagcctcccaagtagctaggactacaggtgcacaccaccatgcctagctaagttttttaaaactttctgtagagatgggggtctcactatgttgcccaggctggtctcgaactsttggactcaagccatcctcccacctcgacctcccaaactgttgggattacaggcatgagcctccacactgggcttgtttttcaactcctttgagatgtcaggtaatttattgataggcaatattaaattagcagaagttgttttgagtagcttgttacctacttataataggttagtgtcttgggtctcaagtatttcagaactgctcaaatagtagctatgcaattgcttaggccataaattaattcaattaacgtgtattgaaggacttctgagtgcaaggacttaagccaaggcacttgctacataatgacatatttagtctgtggagctcttgatagtttacaaagcactttcatttaaattgtttcattttatttttataccaacactgtagagggggatatcaccattttataggtaaggaaattgaggcctagtgatactacattaacactattattttataacttaaatctattatttctaagttccaaggaaacaaggaatgggaaaacataaaggaaaactttttatgaaaattaaatatttgattatggtgatgatggcttttactgagctctcattttgtgacactgttataagtgttacgtatgtattcatcaatttaattcttgcaacaatcctatgagagaggcactgaaattatccckgttagtaatgaacgtaatgtgaggtccaccaggacaggatattttaaaatctgttttgtaaatgtatatccccggtagctagactagtgcttatcacaaaatgaatacttcataaatattattttagtgaatgaatctgtttttcaaagagagaaactgaggcccaggataattaagtaactgtccttaaccaaagtcactcagctaatacaaggtgggtacaagatttgaactcagacagcttattcaagaattcttttaagaccacaagctatccttgttttaaaaatgaaacaaaataacctaccagccaaaactaaataygtgtgttttggagggaaattttaaactaccttggaaaaacgtaataacttctcttatcctcggatttaagttcttgcaaagaaacatttacttgatgtaaaacttcagactggagatataatcgttacgtattgatggtgatcagacttggaaaacagttgttaagtattctggtgtttctgcttaagaatgcattctctaagtgtgtttgatattttatgtttgtattggcaaaagtattccttatagatgaggaaagtctagctctgatttatccatcgaagaaatataaatgtctgagagatggcatggctagctctagaagcagggagtgggagttgtggggaaaggaatacaaattcggatcaataaaaaaaaatatttgaagaaaactgagtaaaattactagcttgcagagatgaacaagtgaaaatctagaaagaaaaataaaaaaagaagtgatggattgtctttgaaaagtgcaagtctaaaactacagtcctgaagtgagattttggtttcaacatgaaagaactgcagtgtgaaatgtaatgcctaacttcatctggtagttaatgtgacatgacagctcacatgaaaatgaactgcaaataaatgcttaattttaaaagatactgtatgatctcaataattgaaayattgaaggcttcttaacagagcataagtaaatgtttcaataaaaaaaagggatactcttttctacagacagccaacgacaatagactggatgactgtgatcattctcattattgtttatataactaattcttatctcttcctatgtgtttatatttgcttcctttttttacactgatacattagaaaggaaagccaaaggtcattttctctttattgtataacttttttatkattatagaactaataaatatatactcattggagagaatttggaaaattaaaaaaaattaaatttaataacacagcacttagaaatttcattaaggtggtatatatgcctatgataaatccttagggaactcaggaaaattgactggtgtttttctaattatatagccctgtgaactaaaaaggaaggagataatggtatctatttttacatttgagaaaatggagatactagttaagggggaaaaatagttttttaaaaagcatgctcaccagactatctctgtatctacaaagatcttcttttctttacttatatagtgtgtggacagatatcaccttagttcatatttgtgctgaaaaatataggtatttgaagataatcaggttgcataattcattctgtatgttagtctcacattccctatactgccttgatctcagtgcaattaataacttaaaaagagaagaataccaggctcaagtttaccttattgctaaattataccaaagacttaagaaataacaccaattctccttaatctcttccagaaaacagaagcagagagagcacttcctaactcattctgtgtggccagtattatcttaacaccaaagccagataaagatattacaagaaaggcctataggccaatagttctcatggacatagatacaaaatcttcaatgaaatattaggaaattgaatctaataatatataaaaaaattatacacaatgaacaagtgacatttatgccaggtatgcaaggctgattcggcatttgaaaaccagtgtaatccaccacatcaacaggctaaagaagaaaagatatgtgatgatattaatgtgtagagaaaaaaacatttgacagaatctaacacccgttcatgataaaaatygcaacacatacttaagggtgacaaactcaatgcttgccctctaatattgggaacaaagcaaggatttcctctctgaccactgctgttcaaaactacagaaagtcctagctagtgtaataagaaaagaaaagtaaataaaaggagcacaggctgagaagaaagaaattaagctattttttgcatgattgtctccataagaaaatcccaaagaactgacaaaaaagaaaacacaacttctagaactaataaggaagtatagcaagatttcagggcacaatgttaatatacaaaagttgattgctttcttacataccagcaatgaacaattggaatttaaaatttaaaaacaatacatttacagtagcaccaaaaaagcaagaagggagggagggaggaagcaaggggggaaaaggaagggaaggaggaaaaatgcmtacatataaatctgacaaaataagtacaagatctatgtggaaaaccataaaacttggatgaaagaaatccagttccttgttaatgaattggaagactcaaattgttaagatgttaattattctcttcttcacctatagatttgatttattcccaattaaaattctagcaaaagctktcctgtagataatggcaaactgattctaaagcatatatggaaaggtgagaaacctagaatagctaacataatactgaagaagaatgagtggaagactcacactacctgatctccagatttcctataaagtcacggtaatcagtacagtgtatattggtgataaaataggcacatagatcaatgaaacagaatagagagcccagaaatagacccacacaagtataggcaatttatctttgacaaggattaaaagccatttctcctaatctgctcagcctgccataacaaaatgccatagattgggtggcttaaacaacagaaatttttattttctcataggtctggaggctggacatcttgagattagggtggcagcatggttggattctctcttcctagctttcagacagctgccttcttgctgcgcgctcatatggcctttccttgctttgtgcacatagacagggagaacaagcaagccgtttggagtctcttcactaatctcatcatgagggccccaccctcgttacctcatctaaccttaattatctcccaaagatcccatttctaaatatcaccacactggggttagggcatcaacattttagggggactcaattcagtccatagcaccactcagtggcaaaaggatcttttcaacaattgttgctggaacaataggatgtccataagaaaaaagtgaatctaggcacagaccttatacctttcataagtattaatgcaaaatggatcatacaccaaaacgtaaaatgcaaaactaaaatttcttgaagaaaacaggataaaatataggtggccttgggtttggcaataaatttttatatacaacaccaaaagtatgatttatgacagaaaaattttataatctacactttattaaaattaaaaacttctgctctatgaaagaaactgttaaattaataaaagacaagccacaggatgggagaaaatacttgcaaaacacatatctgatagaggagttgtatccaaaatatacgaagaactcttaaaacacagcaataagaaaacaggctaattaaaaagtaggaaaaaggcctgaacagactcttcaccaaagaagatatgcagatggaaaaaaatttgaaaagatgcttaacataatttgttgttaaggagttgcaaattaaaatgagatatcactacccacctattcaaatggctaaaatttwaaaaaactgacaatatcaatcrcttggcaaggatacagaacaataggtactctttttattgctagtaagaacagccattttggtagtttctttcaaagctaaacatgatcttaccatacaatccagcaatcatgctcctaagtatttacccaaatgcattgaaaaagcatgtccacacaaaaacctgcatgtgaatgtttatagcagctttattcataatcaccaaaaactggaagtaaccaagatgtccttctatatgtgaatggataaacaaactatggtacatgaatataaaggaatatttttcatcataagaaataagtaatctttaaaagacacagatgaatcttaaatgcatattgctaaatgaaagcagccaatccaaaaaggctacatactgtatgattccaattatatgacatctagaaaagacaaaactttagcaatagtgaaaagatcaggggctcagggagagagaaggagggttaaacaggtaaagcacaggggattttgtgggcagcaaaactattctrtatgatactataattacagatatgtaatttgtcaaaacccattaacttcacagcacaaagaataaacctcaatgtatgcaaacttaaaaaaaaaatcattcaggaggttgggagtcccagaatggaaagtagaatgtgataaaaccaatctaactgtgttacaatgtgtgaagcaacctcactgaagcgggtggaggagaaagctgctgacctcagtaactttggaaatgagtggaatttgtaagattaaaaacaaaagatacaacacaaaaagaatgtacagtattctcattgataaagttatttcttttgtgatatggtttggatctgtgtccccattcaagtctcatgttgaattataatccccagtgttggaggtggggcctgatgggaggtgattggatcatggggtcaattttcccatgaatggtttagcaccatctccttggtgctgtcctcacaatagtgagtgagttctcacaagatatggttgtttaaaaatgtgtagcacctccccctccctctcttttgctccttctctcttgtgaagcaccagttcccgcttcaccttccgccatgattggaagcttcccaaggcctccctagaagcagatgctactgagctttctgtacagcctgcagaaccctgagccaattaaacctcttttctttataaattacccagtttcagatatttctttatagcaatgtgggaatggtctaacacagaaaatcagtactgaggagtgggacattgctataaagacacttgaaaatgtggaattaggtaacaggcagaggttggaagagtgtggaaggctgagaagaagacaggaagataagggaaagtttggaacttcttagagactggttaaatgactgtgaccaaaatgctgacagtggtatgcacagtgaagtccaggctaccaaggtctcagatggaaatgagcttattgggaactggagtaaaggtcacttttgttataccttagcaaagaccttggctgcattgtgtccrtgccctagggatctatggaagtttgaactttagagtgatgacctagggtatctatctggcagaagaaatttctaagcagcaaagtgctccagatgtgccctggttgcttctaacagcctatgctcatatgcaggagcaaataaatgacttaaagctggaacttatatttaaaagggaagcagagagtaagagtttggaaaatttgcaacctggccatgtggctgctgagcaaccacttgctagagaaatttgcataactaaaaataaggcaagtgctggtagccaagacagtggggaaaagtcctcaaaggcatttcagagaccttcatggcagcccctcccatcacaggccctgaggcctaggaggcttccctcctaggtttcctgrgacagacccagggagtgtgctgccctgcacagcctcgggacactgctccctgcatcccagtcgaaccccatctagccatagctcagaggagcccaggtcgaaccscagctcagaccacagctccagagggttgatagtttgcaaccttgataaaatgtgatgaaaatggcactttacccctgtgattctctccaaaaaatgataagcccagactaattgttatttttaaaaaatcaaggaaatgcaacttgagggacattctacaaaaataaaataaaataaaatcagctctcctgaaaactctcaaggtcttaaaaaataagtctgaaaaattgttatagccaagagaagcctagggaggcatgaggattcaaatgcaatgttggatcctagatgggatcccaatataggaaaaggacattaggtgaaccaatatatggtaacaaatgcatcatactaacgtaagaaggcaataataggggaatgcatttgcaggtccatataggaactttttgtactagtttcacaatttttctttaaatctaaaactgtcccaaagagaaagtttatttttaaaatatgttacccagacttttttttttttttttttttaagatggagtttcactcttgtcgtccaggctggaatgcaatggtgygatcttggctaactgcaacctctgtctcccggtttcaagtgattctcctgtctcagcctcccgaatagctggggttacaggcacatgccaccatgcctggctaattttttgtgtttttagtagagacagggcttcatcatattggtcagggtggtctcgaactcctgacctcaggtgatctgcccacctcggcctcccaaagtgctgcgattacagatgtgagccacacttctggccacattacccaaactttcttattgctactgtttgaaggagcacttcatcgcacaattccaggagacaccattcatataatggtatctcctggagttgttcaaggctttaacacttttacaattttaatggctttttcctaggaaaagcaatcacatctgtcatgcatcaacttgtttttcctgtaaaacttagcatacgttgattacagatcctacttaactgatttgtccagctaggaaaagttgggcagaaccagtcttttataggcaaaggcatggaaggctctttccctcttgtaatgcagacatcaacccaactacgatatgagcagagggcatagagggagccaagttggagagatatgactggcttctcctgtcctgacctataatctgtactccactcctttatccaccactaacattgattatgggataggacccatagcatggcaagatagtgttcctgttgcaccaggaaccaattcaaatggatgggaaagcagggatatgggtactgtgttaaaaggagaagtgacagcattcctgaacactgaaaaggacatttccarcatccgaagagatgctacattttccagcttgctagagagaaaggctgaaagataaaaacttttgttgacttcctctgcaaacgagcatttaactgaaaagtgtaaatgaaattttaaataccaatgaaatgtgatgccttctcctggtatttggtccataaattatgttgcaccagagtttagatcatagttcgcccatttcagaccaaattcatggtcttttaccttctgttcctataaattataaaccccagatgtgtcaaattgtataataaacacataaaaagaaatttgttttttaaggaatttcataaatttcttgttttaccgagttttattggtctcattttagtgggacaaaaaacaaattaacctttcatgttttcacttgttacattgtagagagaccctgaattgttgggacgaaaaagggaaatgcttttcttggaccaattttttgattggtccacttgctgagataagcctcctgctgaatcaaatgtatgtttttgtgtttggtcttggatcttatctgcctgcagcagcagcaagcttaatagcaaatgaggttcaaaaagatgaagcagctatttcagcctcttatcctaatgttttcaaagagctctgtagatttggtcattatgcccatcctaatcaaactgtctgaaagcttatcttctgccaccatttcctacagactttccgcaaagcaactatgatttgtaatcgttagtagaatggtatgtggtatgtaaatatatgtaataattatatttctaaaacagtctttgtgaccatcttttaaaggatctcagcttgacaatgaattgcctatttttagttttcaaatcagggtatttttcaattatcttgcagttgattttctaaattcactcttcaattcatgagagaartggcttttatagggcaaatacatactatttgggcattagagaggacagagattattttattctttttgtattgaataattttgcaggaagctgctgctgattacaaggagagttatatgtattaagattgataaasagaaatatttttaaggcttttagatttccctataaggagataggatttacattccaactttgattttcttcaaagggatcctgtttgcttaaattctcagaaaatatgattggacttctcagtcaactgagctgtaagagtggtgaagaacctgccctcaggaagggacctgtcaacatttagagggtgtgggggtggtgatattggggatggagactggcatgatggaagggatgaggcctagaacacaagcatatcgaacccacttgcctctctgtgaatggggctcttgcacacagccaggcctgacttccctccccgctgttcccactcacccagcacagtagactgatccagccctgccaggaggtggctgtccttcaccagcgccaactcctggctgcacgctgtgctycacagagccttccagcccagccagcttggctgtyggggtctcagatttcaactcaaggtgccagcagagtcccttcactaaaatcatattttttcacctgataatttgatcattttacagttggtgggtttcatccacaaaaaatggttttctaaaaagtaaaatctagtgttgtcttcatgatgttatatgtaggaccactacccggtaaaagccactgagagaaccttggttagaaaaaacactagttcatccaggtgcagtagtggctcatgcttgtaatcccacctatttgggaggccaatgcagacagattgcttgagcctgggagttcgagaccagcctgggcaacatggcgaaaccccgtctctacaaaaaaaacaaaaattagctggatgtagtgatgtgcacctgtggtcacagctactcagaagactgagatgagaggattgcttgagcccacgaggcaaaggttacagtgagccatgatcatgcagctacactccagcctgggcaacagagcaagaccctgtttcaaaaaaagaaaaaaagaaaagaaggcaccagttcagttgtctgatccactccaggtctgaccacactattctaaattctttcttttccagaaactagagacaactgtttttaaaataactatctttgggaatattatgaactttatgaacatttccctgcagataatcaaactagtcaaatactgtttgtaggctgggcatggtggctcatgcctgtaatcccaacactttgggaggccaaggtggctggatcacctgaggtcagaagtttgataccagcctggccaacatgttgaaaccctgtctctactaaaaatacaaaatttagccggtgtcatggtggatgcctgtagtcccagctactcaggaggctgaggcaggagaatcgcttgaacccgggagtgagactccgtctcaaaaaaaaacccaaaaaaacaaaaaccaaatactatatatagaaggaaaccaaaatcacagtcacacaaagactgtgataagactttgttagagtgaaagattcaaaaaatttatattcttttttcatacctcgaagtaaattatatgcaaatatgtcctaacataagcaaactcaaaactaaaagtatgagcatcagtattaataaattaaggggttattttatttgcttttctttctttaatattatttgcttttctaaagctttcatgatataatttatataagtagataattcctatggtaggattcaggaagaatttgattcattttaaaatgtagctgacatataattttttaattattgaaaagtatacattcagaacagtgttttaaaacaactgaaaagtttaaagaaaataaaatgaatacctgtatacttattacacagatttaaaaaatcaaaatttagaaggcatctgtgaacctctcctcaatcacaatcctccccacagaggtaactactcgtctgagttttatgtcaacctattcccttgtttttcttcattatttcattacttgtctatttccccccaaataatatagtgtttcatttttttctgtttttgaactttgcataaatagaatcatactttttatgtttttgtgtgacttattttacttaacattactgtatgatgtatttcaatgtatgaatatattcagttttttctgctgatttatatttggattgtttcttgctattaatactatgagcaaccctgcaattaataaactgaaatgtatctcctaggttacacgtgctagaaattctctcagatttctagaagtagagctggcttgtaaagtgtacaagattttaagctatagtaagtactgctgaaatagctttcaagcatttatgttctcacaagcaatgggtaaaagtgccgcttggccaggtgcagtggtttcacacctgtaatcccaagactttgggaggccaaggtgggtggatcacgaggtcaggagtttgagaccattctggccaacatagtgaaaccctgtctctactaaaattacaaaaaattagccgggcgtggtgtcaggcacctgtaatcccagctactcaggaggctgaggcaggagaatcacgtgaacttgggaggcggaggttgcagtgagccgagatagcaccattgcactccagcctgggtgacagtgcgagactccatctcaaaaaaaaaaaaaaaaaaaaaaaaaaagcaacacttgaaatatttgattttcrttaaagtcacaggggccttccaaattttgattttaaaattttccttctattttttaaaaaacaaaaccattgtggttttcatttttctttccctgattaccaatgagcttgggtatcttttcatatgtttatgggccatttgtgtttttgttcattcatcaaatgttgtttgagtacatcccatctgccaggcastctttgagtctctcctccactttcaaagaacaataaaatagaaggaataacctagaaacaactccacacatatgtacagggccataactcagacaaagagagcattgtaggttagtgggtaaaggagaatctctctcctccatttcttagaaagtggaagagaaacactgtacctatcgatcaattgtccatttttctattgagttgtttctctttttcagaggaattctttatatgttctggaaacatcctttgttgattgtgtgtgttgcaaagattgtctccaagtttgtggcttgcctttttactctgtggtactttttgatgatgaaccagagctcttaattttaacgtggtcagatcctttctttatattgtcttctaaaagctttagcattttgcctttcatgtttaagaccttacttccatttggaatgtattcttatatattgtgtgaggatgggatccaatttccttctttttcttgttacccacaccgtatatggagaactaactctcctggcaccattattgaatggtctgtccttttcctgctgatctacaatgctctctttgttgtgagctatagccctatatatgtgtggatctgtttctgggttctaatccttctattttattgttctatttgtctctctctatgccagttctaccataccactgtattaattactcatcacaagaagaaaaggataacaattattttgaaagttaaatgtacagtgcctgacctgatacatgttaagcatacaataaatgtcatctgttattattttagtaggaaacacattttcatatgttgttttaaacaatatctaaaatctgtagagaattagkcaacattcaatagatataaccacttctgtttttgcatttgatatgagttactgtagctacccaaagacttaagaaattcatacattcasttactgtttttgtcttcttctgaagtatgttggaaaagatgaaagatgaactctataatttctttactcatcctcactctgcagtctcttagaaaggttaaatgaagaaggcttgacttcgattgtttttcggatttgaattttggaaaagaaaatgatgctggaagaataaagcagcatatttaggaaagactttcagtgataaatatctggagtatcctgttttctataccttgcttctatgccatattttacttattataaactacctcaggatctttgttaaataaacccatttatttgatgaaggagaaggaagtgccacattttaactgttactgaaagaaatgttctttgccctgttggtcttggacttccacaaaatacttgattccagatgttaaattgttttttcagaagccttgttaaagggccagagcattagatttttgaaggcatttccaaaccccagctgattatcacaacacacaggaatccaaactttcaaagcttagctttggctcttcagtgtatcagcagctgcaaaaaatacgtkctaaggcacaggtkcataggactgggatccagtgtccttaaatggtaaaactttaagtaaatttcctttactttccacttatcatagatgcagttcagttgtttaaagtgcactaaatttccttgattccatcaaaagtagtgagaacttgataatggtaatagtcatgtagcagcctggtgtgtaggtattcatggtaatagatttattttacgtttttctctggctatatatttctagaatatattaacaaagtaatccttcctcagaaaaatttattttttgagagagggtcttgctctgtcacccaggctggagtacagtggcaccatcacagctcactgatacctcgacctgctaggctcaatcagtcctcccacctcagtctcccaagtagatgggtctaaaggtgtgtgccaccatgcccagctaattttttagttttctgtagagacaaggtcttgccatgttactcaggctggtctcgaactcctgggctcaagcaatgtgcctgtcttggcctctgtaagtgctgggattacaggtgcaggccaccatgcctggccctcaaaatattttatacatgccatttgcactgttctttagaccagttctcatcattctctaaggaactaccttgatgcttttccaaggatgaggggtacaaatgtcctctcaacagatgccttcaacatgatgaagccaaaaagaggtgggattagggggaaataaaggggaagttttgggccatactacaccgattggtagtaaagaagaggggaagatgttctcagtgaaagaaataaccgagcaaaggcttagagccagtaatgaccaagagacttcagtcacaggaagatcgtcttgtgttgagtgaaggggtcattgtggtttgccatgagggactagctagaagaggcagatgaacaattgttagaagaccctgaaagatgaaattcagtgtgttctaacagtagactgattatttctgtgttcatttgtgtcacttaacaaatagcgttagagcctctagcatgacatagtagactccgactcaagaaattcctgtagtcacatggagttgaattataaagacagtttatagtaaacaagagactattgcaggccttaaaacaaaacctttcacatgttttaagttaattttttaaaaaaatattcttttctctgccattggcactatgtctggaatttggtacatgtaggaattttaaaaatcagtccaatgcctctcttaaattccacaagtacattctatatcagtgggataatttagacggaagttctaatgatatcagtggagaaaattcctgcaggccttggtagattggaggttctgcttttattcctttctataccctcttccagctattgattgacctccacagtgctgaggctgaggtgtcggctgacctttctctggtttctcaagattcctccctttcagagcagaagccagcatgatcagaatacttctaaggaatctgcagcagcagcagtccccatggggagcctcagaatcatagtgaaacacagcgtttaccttcaaatggctcagcagttgccatcatggcagctatcaggaactgcagatgtctctttcatagtctttatatttaggacccaatagaattaattgtctgttgtcctgatctatatctagacagatgtatacaggacagccattttgctaagagctagggagtctagaaatgaaagacagtccctgcccccagatgagctcatgcaatttggtgtagaagacagaaggacagcacagcatggtagtgaacacagcatcagtcccctcatcagggtcaaaatttactttgtcaagcaaatgagcatcctrattaaggcaggcctgttacctttctaattgtttctctagttatgtgaattcctctgtttgacctacttgaccttaacacttgtcgtttgttttttaaatattactctaagctacttactgcaattgttccaaatgtttaatttattaattccaggcaattcataacaatttattgctatttcttagactcctgcctcactgtcwactgttattggtctgtttcatggatgacagtggttaaatgttttcatatgcactgcagtgttttttgtgatgctgtgataacttgtgggctagactaagatagctggtcaggatccccgccaagacactcagtcagtggacctatgaagaatatgcttgggtagagttgggtctcaagacatcatctcagctccatggatgaacagtgctatctacaacagcctacgagttctttgatggttgactctacccttttatactgtctccctccctctttcccacacctgtcatcagaatgcctgcttcttataggttcatattccaccagaagcagggggatatttctcattggcttgtatactttggcattctagcagggaagcaaagaattatttatgatacaaacttaggtaaaattgagaatcaaagtattcttaggactaggtcaagccaactactacaaagtcatctttaaaaatttattcaaattatgtgttttaaactcaattatactcagtacctgaaccccagaatattcaatgttaacctcatttccattttttttttttttttgaggcagagcttcgctcttattgcaggctggagtgcaatggtgccatctcggctcaccacaacctccacctcccaggttcaagtgattctcctgcctcagccccctgaatagctgggattacaggcatgtgccaccatgcccagctaattttgtatttttagtagagatggggtttcttcatgttggtcaggctggtctcaaactcccaaactcaggtgatccacccgcctcagcctcccaaagtgctgggattacaggcatgggccaccatgcccggcctcatttcctttttctcaaaaagagataaacattattacattttaaggaaatttctgtagatctattttttttcccttgagaaagggtctcactctgttgctgaggctggagtataggggcatgatcacagctcactgcagtctccacctcccaggctcaggcgattatcccacctcggcctcccgtgtagctgggactacaggtgtttggcagtgtgcctggctaatttttgtattttttgtagagatggggttgtgccatgttgcccaggctggtcttgaactcctgggctcaagtgatcctcccgcctcagcctcccaaagtgctgggattacaggcctgagccactgtgctcagctaatctataatttcataatctctgttgatatatacataaggagaattgttatgattacaaytggctttggatcttcccaattaacttgcagtccaacaactcaagtagggctgaggactagtatagcaatgagttatgactgataacttaagatttgacaaaaactttagcataggtaggtgcttcacaattgayttttaactaatatgtacaatttcttataaataaagttgaaaacttatatatgcattacaaataatgctgaaacagcwtgaaatgccattatagaggtgaatgcaacctgctttgggagcacagaaraagtaaatccctgctgtggaagtcaggtagccctttaccaaagaggcaatgttgaagccggtgtagagcaacaagcaggagatccaggtggaaaaaggtaaacaacgttttaggcagtatgtgaaaaagcatagaagtgtgacgtagaatctccacagaccagtaggaagtttgatgtgactagaacttaaagtaacaggagaaaaattgggaagttagactgtgaatgtcaggttgagatgattacactttgtcctgtattgtcatttaagggaaaataatgaaggtgtttcatttgggcagtgacatgatyagatctttctctttgggaatatctctgctgtggattagcagttcaagacactagactcaagaaaaccacataggggttcctgcaatagttcacaccagaaatgtggaaagtctggaccaggggtgtccaatcttttggcttccctggggcacactggaagaagaaaaattgtcttgggccacacatgtaatgtaccaagactaacaatagctggtgagctaaaaaaaaatcatcaaaaaaatctcataatgttttaagaaagtttgtgaatttgtgttcggctgcattcaaagccatcctgggctgcatgtggcatgcaggttgtgggttggacaagtttggtctagactatcagttactgtgggaatggaaaggaggggtgaagttggaaggtctttaagagttagactgttacccccatgagggcaggaaccrtgtgtgttctattcagctttgacccataaagctctctactcctctgctccaagtgacaaggcccctttctggcaagatccccatcatattcgtcttactacttggattttagcatccartgtaacaagcccattcattgcctctggtgctattggatacatataattgtcaagagtgaagtaagttaaaaaaaataggctaaatttcttcactcatttgtacttttccatatgctgttttgttctatatgaccatctaggttattctggaagaacagctgtatttttagtggatgtgtataacttgccccatttcagaaagtaagctaacactgtgacatactttttagcaattttaaaaatgaaatggattcaaatgtacaggtatgaaaagatttccaagaagtactttttttgtaaagtaagttatagaacaatatgtgataatatattaaacagggaaaacatgtaaatcaaaatgatatacctttatgtgttcatttaatcatggaaatgctccacaaaacaatatgaaaaggagtacttcaaattgataaacatggttacctctggggtggagcagagaattgttcagttaatcctgaatattttaccacaaaaagataaaaaaaaaaaaaggaagaaggagaaaaaggtaaggggaaagatgaggaagaagaagtaaagcagacaaaagcacagctctttcaaggcagaacgttccatgctctatgcttacatttgtgaagggcaaaagaaaccaggaagtatatctttgttcaccactgggaaacaaggatttggtttcatggattatttttattatagctgctgaagttgtgagtgataaagtagtgcaatgcgtctaatactcaattttaaactagaatatccatttgtaagcccgggcctgcacttgatttgaatacctatgaatgcaagccaacaatttaaaattccacatgcgtggtcttccagttctaaagcaggagaaataatacttgcccctaaaaaggatgttgaggagacaaatgatagatgtaaccaaaagagccgagctttttgaattttatataaatataagctaggatgtcctggtatatataatctttacatgtatgcataaacttagagacatgggatatctgttacataatgtttaccaattttaaatgcacaaattattgtttagggtaatgtttcataacccttgggtcaatattaccaaaaaccaacaatcagttctttcagtttgggatttcaaaaagcctcctttcagatttaaattgaataggaaaccattatttttagtgcttaaaagcacggtggtgtccccttagaaacctccaattagtagcagccattgtctaattaggtraaaataataatctatcgattgttataaaagcaagatattataattcaagtgtgtttccagatgccagtgaattgctggaaagctgcaagtttaactttccgctctgatagagttttaaaagaggtcagggtacattttaccatagtgtctagcaatgtgagtttattcagaccttttggcagacattcctgcacactcaagctaaatcaatgaatcatccattgttggccagctccgctctcagttgctaagagattttttcaagcatactgaggctttattctacatggtctgtaaaaagggcaaactgtattaaattttaaaatgtctcatctttcctaaattagtaattaaaattttacccagaactttaatactggggcaatgggaaagtctgtgtgcagctggaggcctttctacttgggaaaatacgtgagaaaacttcctgctcataactcttcagaaatatgtgtgtggaggaaatggaaacatttaaaaagtggacacatgaaaaacaaaaactcaaggaggaaggtctaaagtctcttaaagaaatataatgtgtttttcttcttatatatttcaaataaaagagctttcctttaaattttatgaaatatactctaattttccttgtttctctttgagtcataaagacccttgtaatatagcattttattttaaagctttaatataatagtttttaatataaaaatttaaaactaccatgaaataaaggaatgtaattttttcagcttgccctttatgaatgtttatagtatattctgttctctatatgtaataacagtgcttcgtatactcaaaaactaaaggagtatatttttacgtgttctcaccacaaataaatgatcagtatatgaggtaagccatatgcctgattcagccattccacaatgtatacatatttcaaagcataatgctgcatgccataaacatacacaatttttgttaattaaaaaattaattttttaaaaatgtatattctatatgtatccttcttgaatatttcaagttttaaaacataatagttgtttcatttcttttctctttggacttcatgatgatttcacattatagataatctcataatttatcatagaggttactatttcattttgctgagaggatggggataatttggactacaaatttaaaaagagaaagaaaccaaatgtaatgtatcttaaaaaaatatttttaagtttattggatccagatgtagtgatgaggaaagcttctcttctgtgtttcttagtttctcaagataaaattctatttcataaatctctatgaggactgtatcaaatattctaaaagaagcttttgagatagaacgtggcttttggaattggacaggcctggttgctccatgttctagacagtgtggccttgaacaaattactcctcatctttgggctccaactttcacatttataaagtaaacataataatgcacaccaccatgggtggttatggaattcaaatgaggaaacatggtaggtagccctggcacatagtgggtcctggataaatgtcagttcttagcttctttaaaactgttggaggctaatatccgtgtgctcttaaatacaaccaamcctctttaagttggcaacataagtgttaggttttacttctaatttcaaaagaaacgtattcgagtgagtggctgagagcattcattacatgagggcagcttggaataagagaacgggatagtcttgcaccttggcattctttcttgcagagaaacaaaacatttgtgattcttgggttcttgtctcccctctctgaggctctctctttttcatagaggattccaccttctctcaagacttgtattccaacatgctatctccagtttactattcactgctataaagtagggctttttttttttagggcactttttagatccagccaaggaccaagtctttcccagccaaatgcggagcagggaatggaccatgccttgatacagcccctgctcctgttgatccagaccacgactttttaagactttaagcttacagaaaaaataaggtgtgacctccatttacatgcttaagcgtcctgacacctgtgtttatttaaaggaaccatctccgtgtctgtactcacagcctgatgatgcatgccgtctatagaactacatacagtgttttttacagttaagttttttaatagcagggaaaaacaagatcwtttcctcagatgcttgactatttccctctgtaatcttaggtatagtttcaaccctatttcttttcggtaatatttgttatattagatgttggaggccaatatcagctaataaatagacccatgtggccaatttattgaattaaactgaagagaattgctagcatgtctgctgttaggatacagtagtatgaagtggcagctacataaaactgattactctggtggcccytgcataaagggagaaggcctcatacaactcaacagtgatatcagcaaaataacatgtctatccttgtcaagagagaaaacagggttgaaaatgacagaatgaagatgtaatactcaggctttctagggcggattgtagagtctggcaaaaatgaagcaaaacaaaacccaaaggaaagaagtttagatttaatgcctaaagaaatggcgttccctcaaagaaagtccacatgaactgacttaagttgcagtgatgggtcagtgagaacagtacatatagcaactcctgtggccttctgttagagcttcaccttacaattgtaatttttatataactcaacttgagagagagagagaaagacagagaatttccctcactttctgaatcatggctcagaagtgtgttataaaacaccaagaacggaaaagctattacgtggaatataaagaaatacttgagtctacagtatcattgaactcttggattcggtttcagcagacatgctctgtattcccacaagagtctggaaaatgaactcctatttttttttctgtctggagctgcagttagtgttattatttgctccatggctcaatccgggtcagactgttcttcagtaacacaggtggatgttaaaacagggaatctgttgaaaagattgcggaggaactgcttcccaaaagcagttctggatggcaatttgatggcagtcagctatggtaaggacaaatgaagcttagcagtaccttctagaatgtggtctttcaggctttgtcaactgcaatcctacaggcagaagtttcatgtataatgggtcaatatgaactggtggcatcttctaagaagtggattctagaaatggaggtcattaaatgctcaatacttgcgaattgtaatgttgatctgcatttttctgtttagctttatttgtgaaatataatatgtagttcttaaagaaaaattccataagccttttttttctttcgtatgggcttaaaaatattttagaaacttgttaaaaactagttatagaaatattcattatcctactaaaagtggcaggaggaatatagttgtgatttaagatatagaaattgttttgtactaatgtgtttattgtcagcaattacattgttaaaatgtaacaagtaaattttgccaagagtacaacatgtatccatttgtaagtaagcacacagggaaaacaatattttaaatgttctacccattgaattatttttctagtaaacaacttgacataaaatagactgaaacatccatttattttaacaactatgttaaattacagattaatggtccaaaataaaatttgaactgatttaatacataattcagttttgggggaaaatagatctttctccaactgagaatagactatatattttttcttttgtgaataacttattttacccttaataagtttaggacttgcctgaaccacagccagccttaagaatcctttgttcagaaatgttcagcgttatattgactaaggagcaatttgggggttgaaaaatagatcactatttcagtttctgactttagactatttttaaagtaaagtgctgagagttccaattgaaaaattgcaaatgctccaggacactgtgcctggaaataagattcctgaagagtagagcctagggatgtttaggcaacccttacagaaacaagccttcaagtacattttaagtacagtgtgtctcgcacgttttgaatkattcttttcagatttttttttctttggatataactattctgttttactttacatacatatatatacatacacatatatgtatatgtatatatgtgtacatgcatgtgtgtgtgtatatatacacacatatatattcacatacatattcatatatatattcatatatatataggtatatgtatatatgtggtaaatctaggagtttacatatccaagggaaaatttccctcaaacttgtgattgytactcaccagatcaaacattagcagtccctaagggacagtcccagtccacagccaacacacacagatcccttcttatcacttggaacagacactcctccatgggtacatacccagcatgcttaagaaaacaggtatctgtggaggttaaactaatatttttggagcaaaaaatgagaattgtcagaagttttttttttttttttttgagatggagtctcgctctgtcacccaggctggagtgcagtggcgctatctcggctcactgcaagctctgcctcccgggttcacgccattctcctgtctcagcctcccaagtagctggaactacaggtgcccaccaccgtgtctggctaattttttgtatttttagtagagacggggtttcaccatgttggccaggatcatctcgatctcctgacctcgtgatccaccgcctcggcctcccaaagtgctgggattacaggcgtgaaccaccgcgtccggccagaagatttttattaattgtgttttctagaaatgtaatcttagttcagctatatttaccagaaaaatatacaaagcatttttatatcttagtatttgtaactgaaattatacatttctgaagaaaatatcaaatctgagataaaaacagcatggtaaattaatttgtactgaaaatatttttgaaaatattttgtctataagaatagtttgacaagtagccttatttgctatagttgaaagactctgcttgaagaaaagcattcacacttagaccctggctagaagaaagaaattggaggcagattttttaaaagactgtactttcaggcctgggcacagtggctcacacctgtaatcccagcactttcagaggccaaggcaggaggatcactgaggctaaaagttcaagataacctgggctacgtagtgagaccctgtctgtaccaaaaaaaaaaaaaaaaaaaatagaagtattagctgggagtggtggttgcgtacctgtagtcttagccatttgaggggctgaggcaggaggattgcttgagcccaagagtttgaggctgtagtgagctgtgattgcagcactgcactctagcctgggtgacatagcaagaccctgtctctaaaaaaattaattaaagtaaaataaaatacattgccttcagaacacattaaaaaggaacaagatgcaaaatagttttgaaaatgttttcttttaagtaagatagtaattgtgcttctttttaaaacaaaattacatataactgaaaatctaattctacagttcaataataggaattttaagagctcaaaagctgcttcttagtcaggtgcagtggctcatgtctataatcccagcactttgggaggccgaggtgggtggatcacttgagtgcaggagttygagaccagcctggacaacgtggtgaaaccccatctctacaaaaaaatcgttaaaaattagctgggcatggtagtgtgcgcctgtagtcccagctacttgggaggctgagatgggaggattgcttgggcccaggagatcaaggtgacagtgaaccttggtcatgcgactgtactccagcatgggcaatagagtgaaaccctcctcaaaaaaaaaaaaaaaaagaaagaaaaaagaaaaaagaaaagctgcgtctcttaaaatccaaggtaaaattatatttcatcctcattacaactctttttcctaaaagtaaatataaaccatgctcttctttatgtgctatttagcctatctttatctgatgtatttagtcattctctactgctccaaggaagtgaataaatccaggtaaaaagaagataccaataatgaaagatttcacttttcatgaatgttttcatagtaggccctcttcattttaggactgtaacctgttggaaaaaaggatcgattcctgtaattgtattgctagactgtgtcaaggcagtgtattatgaaagctacatttgagcagcacgaagatcgccttttaatgatgagagatagtgttagtctgctgtactcaaaagtgttcactctttagcccaatgttctcgtattatataaagctttagaaaccctggacatttgcctacaatgtctttgaagaaggcaatcacattgtgggcatggatcatatctctctgcttacatttttatggttttcatttatgtaccattgtactgcagaagggatagaaggcagcttggaaggatatatataataaaggtagaaccaatcaaaagatggatataggaataagataaaatgattaccattaggtggccaggaacacaatgtatggtctacacactgttacagatgggtcacaaattccactgaaagctttctaaccaccagcataaagaagtgaacctggtgggtattttagtcwatgagggcctaaagatacaggcaggtcagattctgagaagtgaaaatgtgattactactaagctcagagaaaaatttcttcctggggatcccatgtggacagtgcgtaatgatataaatagcatcatctaccacatttttaccagtaggtacagttcagttaattcaatattatagaaagtaaactctctaattagatgtacattttagaatttctgcaagagtaggccaggcmcagtggctcaagtcgtaatcccagcacttygggaagcccaggtaggcagatcacccgagatcaggaagtcaagaccagcttggccaacagggcaaaaccctctctctactaaaaatacaaaaaacaacaacaaaaaaagctgggcatagtggcacacacctgtaatcccagctactcaggagattgaggcaggagaattgcttgaactcaggaggtggaggttgcagtgagtcgagattgcaccactgtacttccagcctgggcaacagattgagactccrtctcaaaaaaaaaaaaaaaaaaaaaaaaraaaaaagaaaagaaaagaaaggaattcctgcaagagtagactatgtgtccttcaggcattcctccctgattgtttttgataaataatgccagtgagctcaaggtttttttgctaaacaattggctgggatgcagcaaaacaaggccaagattctccaaagaaaaaaatatttgagtccacttgggcatttcaagaacaaaattacaatagatttagttttaaagatcacggttggctttattgcaattctagaatcaggcaacattttatgccataaaatacaataaatttgccagtgagttgaacagaaggggttggttttatagacagaaagggctaaggaaagcaaaaatgaagaacaaaaaacagattgattatttcaaagttactttccttgaaaggcagggacagggaggcagaaaaatagaaagattggttagcatcaggttacttttaaggattaaaacagaggaaactattatcctactgattgaagattgaaattggcctatttgggaaattggctgctatctctctctcctgctttcttggaatgttatataacaacttagtttcagtttggtgatgtggaacttcagcatggataactccattttgatttttagtcaaatctgttggggcctaatgcaggagctgtggggcctagtgcagaagcttagtccaaaacaatggcctcctatattttgtatttaacaattttcccctttcagtcatgctttcacctgggtgagtgcatgaccaaaactaagggcattaatgctactcttattatcatgctgggtttctggtctctacaagtcattcataggttatggtgtactcatcatcatgcatttatttgagtttttgtcattccagcagaaaagagactctttggtgtttgatgaatggctgtgtgcaacctttaaaacttttcgagaggatatagtgtaccagagaaactactattatgactatcaaaaggataatgccaggagtttggagtatgctcctttatctaggatccccataaactaaaccaactgaaattaaatagatcaaagaatgagccaggccggatactcattatatctatgggtaacaagaagtattagcaattgcacagatttctccctattcatttagtcggtagcarttctatcatatagcattccaggaatgggttaaattaaaacagacagtactaactctataaaagagatcactagtacaatttgaacaaacagttgcattagggatattagggatgttgctgaagttacccactaggtggactaaaggatctcaggttttttaaagattcagatttgacataacagattcaacrtgctgtcagattactcacaaaaactaaggattgtgaaactttaaccatagccttattctgccaagcgaaagaagtaggcataagcaaggaaaaattaagaggggtaagaatatcataagaagtcttcgtctgatggccttgggaaaagctgtccacggcatgcagttagcaaattctcaacctggtttgcagtttgaatgtccctggttgtggcgttagatattctggtgaactctctgtatggcacgcacatcacacatgagacttgtcccttgaaatttctatcaagttgtccagcttagcacttttgctcttagttgaagagttgaagctagatactggaggtagtgcactaaaagaattcaggatccagtccagtctagggaaaaagtgaacaaggctgcaatctactaaaaggtgtactatagtttttcttttgcaacataatttttctgtctataatcacccccatttctaccaaagataatcagagtaagactaatttgtttgcaaaataagtttcgtctcattaaacttcacctgattatttgtatataagtacagcaagaataaccacacagttctttttaaatttgatttgctggaaattttgacaaacaatctcagattatacttttaaaaacctctcatcactaggaagccaaaccaaggccgacatcagactttgtctactttgtctatggttatctagtgtcttgaggttcctaggcctgccaggaagtgacaactttttactcactcactgtaatgctgtgtgtaagtccactttgtgttgctataaaggaatatgtgagactgggtaatttatgaaaaaaaaaaaaaaagaggtttatttggcttacagctctgcaggctatataagaagcatggcaccagcatctcctcaacttccggtgaggggctcagaaagcttttacttatggtaggaggctaggggagtcagtagagtcacatagcgagagaggcctcccaccaggccctaccttcaacactggggatcagatttcagcatgagatttagaggggataaacatccaaactgtatcacactgggaatccttgaagcgaggcattctattaattctcaaatattacatttcagtcaaagccttggyaattaaaccagtgtttccaattgtattgtgtaatacagagagcaaattcttattgagcttatgaaaataatcatattaaggagaaagatggaatgtttcaatttttgtttataaaagtgtactctaccaaaccattgtgagctagagatagctttaaaaaatcgttttcttaaatctggaaaataaaacattaagagaaccagcaatgttttaaataaaaaagcaataaaaacccttactttttccttatcagtttttcagtctaatgtaattaattcttgctctgtttgatcttagttgatagtttcactaaactaccagtttctttcttagagttctacaaattcttacccaatccagtgctatctcaaagttgtcacaaacctgtacttgtcagaattttttccattctttccatgaacttctttgaagattatggttcttgcaaaaagctttcagaacagcatcagaataaagcaattaactgaggacaataagacttaaaatagccatcattgaaaacctgatgagagtctataatgatgcagctgacaaagaaattgtgttatttctgtggcatacaacattttaacataataaccaaaattatgattgatttctagaaatttaatgcaattttgaaaaamctttttttttttttttaagacagggtctcacactatcacccagcctggagtgcagtgatgtgatcatggctcactgcagcctctgcctcctgggctcaggcgatcctcccacctctcagcctcccgagtagctaggactacacctgtgtgccaccatgcctggttattctttgtatttcttatagcaatagggttttaccatgttgcccagggtggtcttgaactcccggactcaagcaatctgcccacttcagcctcccaaagtgcaggaattgcaggtgtgagccaccacacctggcctgaataaatattttaatatcgtatctatacaaatgtaaggaaaagacggttaaacgttatctcttattgacaatatttcctatataatttaacatatcaaataaacctaattggtttaatatctctcttttggacttccaggtggctgtggtttggatgtttgtcccccaaatctcatgttgaaatttgatccccaatgctggaggtggggcttaatgggaggtgtttgggtcatggggatggatccctcgtgaatggcttggtgtcttctttgcgatgagtgagtttccattctattagttcctgtgagagctggttgtttaaaagagcctgtcacctccccactcctctcttgctccctctgtggccatgtgatctctgtactgtgactcccttttgctttctgccataagtggaagcttcctgaggcttttgtcagatgcccagtcttccagccagsaaaactgtgagtcaagtaaacctcttttcttcataaattatccagccttaggtattcctttatagcagctctaaagggactaagacaaggagacttagaatttcattttgggaagtttgtcaaaaagattcaaacacttgatcaaaaataggatcacatttttgatcaagtgtttgaatataatactcatttagccacaatgataattaaaatacttcaaaagaagttacatagctgtagaaaatcttaactcttataataaagaggagactcagttttcctaagtaattaatgacctaagaaagaaaacatgaagcacagaaattattttgacaaaatacagaatctttcttttctaggccacatacctaaaaagtctcacaatttttttaataagaaaagatcagtacacgtcaagaaaaccttgttttaaaattttaaaaataaagcttaatttttagaaaaacctaaaaacaattcttttttaattttagccaacttgatcacactcaaaattcctttcataagattcatcttccataaatcttctaaaacttgcaaagacctcgtgcagcttgctcaaaccttcacttctttttcttttttctttttttttttttgagatggagtctcactcttgttgcctaggctggagtgcaatggtgcgatctcagctcaccgcaatctctgcctcccaggttcaagcgattctcctccttcagccttccaagtagctgagattacaggcatgcaccaccacgcccagctgattttgtatttttagtagagacagggtttctccatgttggtcaggctggtcttgaactccctccctcaggtgatccacccaccttggcctcccaaagtgctgggactacaggcatgagccactgcgcccaatctcctcgttttcatattgaaacaaccagtcattctaccttagggcaaaaatttacttttctttttccctcatctttctgaccacacagaattgtcattcaaaaaaattagtctgttttcaactttctttaccaaaaatatattctcagacttacaacttttttgtatctctttttcctacttaatagttccttcctgccttgtttccattttctccataaatctttattgtgaaaagcctttaacctttgaattagctgaaataactcttttctacaaaaatatattctcatgactwtttataatttttttcacccaaaacacattttactktctcttggtatactttgcatatagaattacatatattaattagaatttttaacttttagtaaccttaatttctagtgaaacctaggaagtaagcaattttgaactatcatatgccaacrttttataacaacacaagatgacaaagtatctatactttaatcatttttagcaattaatgggtcagtattctaacttacttggaaatggctgacatttcaggaatgttacttaatcatatgactttaagattatgttactttaagatttttgaaactatgaagagtttatttaaaacctttaactcatttactttcacctaatttacttgttcttaaaaattatgcttcaattggtcgttaaacaaagctagccactatctcaagttatttccttgttaaccatttttacagtatgccaatgttagttgctacctaaacaagagccctaaagttaaatatgaggttattttgttggtcagaagacacactgttttattgaactagccttatttaccaaagatttacctgtcacatgaactgaaaggtatttgagttagtctcttagcctgttttyttttgctataacaaaataccaaagacttggtaatttgtaaagaaaagtggtttatttagctcattattctagaggctggaaagtccaagacggggcagcccatctggtcagcttctggtgagtgtctcatgttgcatcataacatggtggagaaacagaagggaaagcaggcatggaaaggggataaaacacaggcgtgacctcaccttataacaacctgttttcctttgagaactaatccagtcttgtggaattaacccagtctcatgagaaagacattaatctatgtgattgacctaatcatctcttaaagactttacctccccacattgttatattggcagttaaatttcaacacgaattttggtgcagacacacagcaaaccatagcatttagtgcagtttttctgatgaaatattatattttgtcacttactttttctttaagccaattaattaaagctttttcatatattttggtagcaaaatatcacatacatataacacatgtagacatacagacacacagccagaagcagatcttagagcttttataagattctctatttgccagtttttcaatagtttctctttcttctttagattatcaatctcctgattacctgttctgctgttttaaattattgttagctaggcaaccctaaatttgtcattccaaagacatgactcttaggtgagacaatgtagaaaatttacatctcaaagcacacaactgagatctaaacaccattatttgctgagacaagggcaaagattaagaccccataagacaagatgggcaggaaaagtactataaacacagttaaggtttgttatgtgaattttaagccaatgtctttctcactgtaaaaatttctaatggttttaggtgcaaagaaagagaagcccttagaaatggagattttcttcatagatgtaaatttcttttacaaggggtttttaaatagccagctaaatgttagaaagttgtattttagagaccaatttagtacaataggtggtcattttagattgtttattaattggatcactgtcttcagggtagagccctctaatgaataggacaaagaaggcattttctttgcctggactcatggatagaactggatttgatattcctcacaactgaaattttgttttttattttgagggagagactgtccccacaagtggagtttaaactgtgtgacttatgcctcagtctcctgatctgtacactagaggtaataatatctccttcagaggggtattttaagaagtaaagatgatacatagtgtacagaacaatgctrtaagtattagttgttgatgttgttattgctattaaggagtgtcttgtgcaaaataaatatttcgtttgagggaataaaacaattaaaagaatgggcaactgaattattgttatagagcaaaatgacctaggagagaccaaatactaggaatcagccatgtatgtcagatgcttagagtgtccatgtcaaagacctttggaaactgcaggacttttattcttacatcagtccccatgaagtcaggatctgtgaagggtctgagattttacttcctttccttgtagttgcatcgtagttgacccacctcaaaatgggaagtgtcaggcctgagagtcatcaggggttcattttctttctttttttttttttttttttttttttttagacagagtcttgctctgttgccaggctggagtgcagtggcgcgatctcggctcactgcaacctctgactccctggttcaagccgttctcctgcctcagcctcccgagtagctgggattacaggcacatgccaccacgcccagctaatttttgtatttttagtacagacagggtttcactatgttggccagactggtctcgaactcctgacctcgtgatccgcccgcctcagcctcccaaagcactgggattacaggtgtgagccatcacacccagcccacgggttcattttctaacaagagctcagcagcacttatgttatgagttgaattgataccctctcagaattcgtatgttgaagtcctaacccctagtacctcagaatgtgatcttatctggagatagagtcttcacagtggtaatcaaattaaaatgaggtaattagagtaggccctaattcagtataactgtggctttataagaagaggaaatttggacmtatagacatgcataccaagataatacaatgtgaatatgaagacagctatctataagccaaggaacgaggcctagaacagatgctttcctcatagccttagcaaggaaccaaccctgcagataccttgatttcaagttgctaggctccagaactgagacaatacatttttgttgcttaagccaaaaacaaaaacaaaaatggagtttaatgtagaatctcagaaatcaccactaaagaacttattcatgtaaccaaacaccacctgttccccaaaacctattgaaaaaaaaattaaaaaaaataaatagataaagtagaaatcacagttctggtgtctacctacaggataacaactggagcttcccccaaaggcctgtcaatcctggtggtcaatgtggagwttatcagagggtagacagcctgtttataatgttttccctggaaatatttggggcagtctcttttccaatgtcctgcttgtttgcaccaataccaacagttttttggaaactgttttttcagccatttattaaagaaatgccccagagcaggccaaaaggccagcctaggttgttgtttgccatccaactgaaacactttggtaatggctttcaaaaagttatttgcagtttttccctgctttccataatggaccaggcagggcttgtcaggtaataccattctgcatctttcacccattttggggcttctctaattctcaccaatatgtgtattagttggttgagctcagatatcctggggttataagtttcagtgaagaccctaaatttttcctacatttttctatatttatttatttatttagagatggggtctcactctgtcgcccaggctggagtgcagtgacataatcgtaactcactgcagcctcaaactcctgggctgaagtgatcctcccacctcagcctcccaagtagctggggttataggcatgtgccactacacctggcttctcttcagaaaatatttggaggtcttctgtaggtttaggaactttttaaactatggcccttggctctgtttttgtccgaagagtataagtcactcagggattacttcctgaatttggggtggtttttcttataaagaaagcatttaattgtgttttcagaaaaggaaggcatttaagacagaggggagcagaataagtcaggttaatattactgtccttcgtatggatgatatctcacatttgtaactttttattagctctttgcaatgaatttttttaaaaagcaattttagaatcctgttgtctgcttgaggcttctgaatgccaattagaataacaattccattctctctgcctaattatagaaacttgggattcaagtacagttatatgaatggtcttgttcatctggaacattctgcatartagccattataattctatattatctgtagtaagatttgatatttgcagcttcctgagccataattctgtacgtgaaaaaggcaggcatactggaaggcagagttgtcagatgtttagaaattaaggatcccatttttatgttggattttgggtctctcagagctaggatggctttggctctaagatctcagtgctcaagaagagaacaaataaagaggcccctgcagtaataaccacttactgtgactaccgtctaagaagctggcactgtggtatgggggtgggtgtggcaaccccatgccctctttgggtaccttacatcccagcatatccatgtgttccccaaccccaaagcttatcaaatcttgttattcagaagtttttatggagtctaatctccagtccttcccccttccctttcctggaggtcagtaggtsacatggtttggctgtgtccctacccaaatctcatcttgtagttcctataatccccacatacgctgtagaatgtcttgggacaggtgtgtggagtasaggatggtgcagttgggttttaaatcagattcactctaattgcagatcaggctgtgttcagttctaactagaaggtaggagatcttgccagttctccaatttggccattaccaagggaccccggataaagctgatatatgatccctatttgtcatttgtctcttcctaattagccataaggtagaggagaggtgggaggtggtgattgacacccctaaccaccagcaaatagggtgaggacactgaggcaggactgggcttgacttaacatagaaagatatgcgaccacatatttctttctatcttttgacttcagatataaaaaygactagaatttattttcctatgataagtagtaaaaaagatgcttctgtttttcgttagaagttgaggtcttctagaatcgtcaacttggattaygcattcttttgctcttatcactgaattacattagcataactgtaacagaaattgttgatattttactaatggtgagcccactagcatggtgggctctaaaattccctctctaacactttttgcttccattgtcttttagggagctaattccaactcccaactagaacatgagttcccctaggtcaaggagttaatcttccttgtgtcgtattcattcatcctttgctcatttattcattccataaaacttgttagcatctcctgtttggtaggcactgtgccagtccccgtacattacatggttatatagccatcaacatcagagtagagactctagcctcacagagctcacaatctcttataaagcccatcatgatgagaggatttcaactaagtgagtaaagcattgagcacagggtctgagacagcatcagccactcaacacacatctgttcagtgaatggataactcagcagtgctggaagtagcacagagttggtattctgagacttctgtatgggattgtctagactcccagactaaaatttaatagttagtaaataatatttattgaacatttactgagtaggtcaccatgctaagagctttataaacatcattttattcatcacaacgctttgagataaaaacaacttttatttttattttttccagtttgtttttgtttgtttgtttgtttgttttgagacaggatctcactctgttgcccaggctggagtgcatttaattttcatttttagtagagacagggtctcactttattgtccaggctgatctcgaactcctgggctcaaggtatcctcctgcctcagcctcccaaagtgctgggattacaggtgtgagccaccacacctggcctaaaaacaactgttaatgatcattttatgggtgaggaaactgaggctcagagtgtaatatctttcccaatcaactagcaactatcagaaaaaggatttgaaccaagttgtttaatttcaaaacctgtgaatgtaatcattttgctacatagcctcttaggggtcgtctatttgaattcctttaagtgaatcctgggccggtgaactttaaacagactgtcagtcaggatgccaaatactccacactgaaagtagatagaaatagcttcatcaggagcacagtgaaggtgacactttctcctttgtgacatttttcagagagccattggtggtcctagagtattactatctactaggatttactgggtgctacatccagataagccaaagaggagatggctctgggttgttataatgacattttcatgattttttcatgtaacatgtcattttacactttattaagtattctaatgattctggacaacagattttgaaatggtactcagaaaaatgaggcaaatttagtgtgttgtttccttttatgattccaattgcattttttcatgggtcactgtgaacaaggcttacaattatttttatataatgactttttcattcacattatttctgtaatctcatagtttaatgacaattactgtctatttatatgacttgtatttataagactggtgttcaagagaaagtttattttttcttaacaatagtagtaatggcacataactaagattgagggatcactttgtgtcaggcttttcattaaggctgtttatatgtattatttcatttaatcatcatatcaaccctatgagatagtcacaattgtgatctccaatttacagacaaggaaccagaagttgtagaagttgagtgatatagtttggatgtttgtctctccagatctcatgttgaaatttgacccccagtgttggaggtgaagcctagtgggaggtgtttgggtcatgggggcagatctttcatgaaaggcttggtgccatcctcagagtaatgagtgagtgctcactctattagttcccctggaactgattgttaaaaagaacttggcacctccccaagttccgttgcttcctctctctcaccatgtgatgtctgcacacaatgactcctctttcccttctgccatgagtggaagcagcctgaggcccttgtcagaagtagatgctggtgcaacgcttcttgtacagcctgcagaactgtgagccaaataaaccttttttctttataaattacccagcctccagtatcctttatagcatcatagacagaaaattggtactgaggagtggagcattgcaataaaaatacctgaaaatggggaagcagccttagaactggataatggacagagtttggaagagtttggagggctcaaaagacaaaaagacaagggaaagtttggaacttcttagagactggctaattggttgtgaccagactcctgatagaaataaggatagtgaagcccagctgacaaggtctcaaatgaaagtgaggaacttagtgggaactggagcaaagatcacttttgttatgccttaacaaatatctcggcagcattgtgtccatgtcctagggatttgtggaaggctgaatttaatagtgatgatgatgaaggttatctggtagaagaaatttctaagcagcaaagcactcaagaagtggtgtagctgcttctaacagcctataatcagatatgggagcaaaggaatgagcttaagttggaatttatatttaaaagggaaacagagcagaaaattttggaaagktctcagcctgcctatgtagtaggaaggaaaaagcacttttagatgaaatccaaggatgtggctgatctattgcttgctagagagattaacatggataaaagggagccaggtgctaatagtcaagacaatgggaaaaaggtcctgaaggtgtttcagaaaccttcaagaccacctttcccatcacagacccagagacctaggaggtcagagtggtttcaggggaatggcccagggcaccactgccctataccacctcaggacactaccccccagtccctgctgcttttagctccggccagttatttctccaattgtctgtctggagggtataagccttaataagccttggtaatttccatatggtgttaagtcttcaggcatgcagaatgcaagggtgatggaggcttggcagcttccacctagatttcagaggatatatcagaaagcttgagtgcccaggcagaagcttgctgcagggtggagcccccacagagaacctctactagggcagtgtggcagggaaatgtagggtaaaagccccctacacagagtccccactggggtattgcttaatgaagctgtgggaatggggctgccatcctcaagatcccagaattatagacccaccagcagcatgtaccctcagcttggaaaagctgcaggcattggactccaactcatgagatcaaccatgtgtgctgcccagcaaagctgtggggacagcactgcctaaggccttaggagcccaccccttgcaccggtgtgctctggatgtgggacatagagtcaaggattgtttggagctttaaggtttaacgtctgccctactgagttttggacttgcatggggcttgttaccccattcttttgtccaattcctcccttttggaatcggactgttaacccagtgcctgtacaaacattgtatcttggaaataaataatttgtctttgatggtacaggctcccagctgtaagtaacttcccttgagtatcagatgagactttggactttggacttctgagttgatgctggaacaagctaaaattttaggtgactgttgggatagaatgattgcattttgcaatatgaaaaggacatgagatttggggaaccagggaaaggattacatactttggatatcatgttgaaattttattcccaatgttaagaggtgggcctagtgggaagtgtttgtgtcatgggggtagatccctcatgcttggtgccatcctcctggtaatgggtgagttctcactctattagttcctgcaagagctgcttgttaaaaagagcctggcatcttccttccctctctctcctccttcatctctctcaccatgtgatctctgcttatacctgctcccattggcttccaccatgagtagaagtgatttgaagcccttcccagatggatatgctggcaccattcttcttgtgcaacctgtggaaccttgagccaaatacacatcttttctttataaattacccagcttcaggtattcctttataacaatgcaaatgcactaaggcatggagtaatagcccaaggtcacacaactagtaagtaagtggtagatcctatattcaaaatgaggcctcatttgttccaatatccatgagctcarctgctctcctataccatcttcctgccaggccgctctaactgcagagtaaacttgcatcagataagaggttatgccttgattaaggccttgtggtccaaacttatgggttttccagtgggcaaaattatttgaggaaaagatttcacattttccaacttttcttcttttgaaatatgtgttaaaatgaggttgctttcttaaaagcaaactgttaaagaatacagtcagtaagctataatttagtatgtattttactaatgctttatttatttctaagatgatcctggtcttcttcaccagccttcagtggattgtttttctccaagccattctgaatctgtttttgattcaagttagaaaagctccctggctatagctatggttctgtgtttccagctgctttactctgtgccagtggctttgagttcttcagcaaaggtactctggcagaccaagtctgtcttactcaaaagcttaaatagatattgcagaggagaagaggaaaagaatcagcagtgattattacttgtacttctgagactctgttaattgtaatgtcatggttaaatttgcttattaaccactttgattcagactcatcttccaaatacagtccagagacagactgctatacagttataaaaggtctccttaattagcttccaagttccattagagttaaggttgtatcagagcttagcattttaagtaacatgtaaataaatcctaaagaagttttatcacactcactgtctgctccctttcatgccaatgtcaccaagatcatcaagaatcactaaatttgttcttaaagaagcaatttctagacctcccttctgttcatttgttaaggggagaaatgttgttcctcattgtttaaatgagaaaaaattttcatttgagttatgggacattatataatgttgtcacagaggtggtcaggaaagaaaagtaacaatgtttaggtgtatagtcttgaagctttgacttccatcatgaaagattaactgctacaggaatttttcttttgctgtaagtaattagaaaactggaccaactatatgaaacagcttttcagacagtgcacacaggaagtgtaggactgatccctgagggaagggaaacaaatgaattgagattacaattttcccagcttattgtctggaggcagttttcaggccacagaggtggaggaggggatgcagaacagaacctactggtcttatcaaattgaggggacaaaaaatcagtttgggagaactaaaatggtagaatttgcagggcagagtactggagatgaggggctgctcaaatacagcattccagagatatgcaggattgttacttgagtctttgggtaggtatgtatttgtctgtgcacgcataagaggaactacccaaagctagagaaagaaccagcagaaaataaaccagacaattcccagaactcacgcagaaatgagattatattcctaaaagccagaaaggagagacctcacaatacacagggctttgagtagagcctcagaagagccttgccttagcagtgaggggaaatcactacttaataccagaaactttacayatcatgatcaaatacaggaatacctcagagatagtacaggttccattcagattattacaataaaagcaaataccacaataaagggagtcacaattttttttgcttcccagtccatataaaagttatgtttacattttaatgtagtctattaattgtggaatggcatcatgtcttaaaaatatatatgtatctcagttaaagaatattttatggctaaaaaatgctgacaatcayctgagcctttagcaagtcataatctttttcttggggagggtctcgtctcaatgtcgatggctgccgacctatcagggttgtggttgttgaaggttgaggtgactgtggcaattttaaaaaataagacaacagtgaagtttgctgtgttgattgactcttcctttcatgaaacatttctctgtaagaagcaatgctgtttgatagcattttactcacagtagatcttctttcaagattgtagtcctctcaaactaccattgctctgtcaatcaaccaagtttttggactattctaaatattttattatcatttcaacaatgtttcacagcatcttcaccaggagcagtttccatcttgagaaaccactttctttgcccatccataagaagcaactcctcatccattcaagttttatcatgagattgcagcaattcagtcatatcttcaggctgcacttctaattctagttctcttgctatttctaccacatytgcagttactttgtctactgaagtcttaaaccattcaaagttggaatcaggttcttccaaacttctgttaatgtagatactttgacctcctcccatgaatcacaaatgttcttaatgacatctagaatgatkaatcctttccaaaaggtttcccacttattttgcccagattcatcagaggaatcacagttttggcagcaatagccctatgaaatgtatttcttcaataataagacttgaaagttgaaattactccttgatttatgggtggcagaatgaatcttgtgtcagcaggtgtaaaaaaagcattaatccccttgagcatttctatcagaactcttgggtgaccaggtgcattgtcaatgagcagtaatattttgaaagcaatctttttttctgagcagtaggtctcaacagtgggcttaaaatattcagcaaaccatgctgtaaacagatgtgctgttatgcaagttttgttgttccatttgtagagcacagtcagagtcaatttagcattattcttaagagcccaaggattttcagaatggtaaatgagcattggctttaatttaaggtaaccagctccattaacctctaacaagagagtcagcctgtgttttgaagctttgaagccaggattaacttctccttaacagctagagaagtcctagatgacattttcttccaatataaggctactggatttaatttgaaaacttttgtttagtataaccatcttcatcaaccatattcataacatacaatgctgtgtgttagctgtaatagatcttctgaataacttcttgcagcttctacatcagcacttatcgcttcaccttgtacttttatgttataaagatggcttctttcctcataagccagcctctgctacctttaaacttccagcctctgctacctttaaacttctgcagcttcctcacctcacctcttctcagatctcgtagaatttaagagagttggggccttgctctggattaggctttggcttaagagaatattggggctggtttgatcttccatccagaccactaaaactttctccatatcatcaataaggctgttttactttcttattagtcgtgtgttcactagagtggcacttttaatttccttcaacaactcaacttcctttacaatcacaacttggctaactggcatgagaggcctagcttttggcctgtctcagcttttaacataccttcctcactaagcttcataatttctagcttctgatttaaagtgagaaatgtacaattcctcctttcacttgaacacttggaggccatggtaggayattaattggcctaatttcaatattgctatgtctccaggaataggtagacccccaggagagggagtgacggaaacaaaccagtcaatggagtagtcagaacacacacacatttattgattaagtttgctgtcttatgtggacgtagtaagtttgaaatactgcaggaattaacaaaaatgtgacacagagatataagcaagcacatgctgttggaagaatggcatcaatagacttgcttgatgcgggtttgctacaaaccttcaatttgtaaaaaaaaaaacagtatctgcaaatcacaataaagcaaagtgcaataaaacaaggtatgcttgtaactgaaaaccagtagtgaagagataatctgaaaagcagtcagaggaaaaatactcattgtatataaaggaacaaagactaggatgacarcggaattcccattagaaacaatgcaggcgtaaaggcataagaatgatataatggacttggggactctgggggaaggttgggaggggggtgaaggataaaagactacacattgggtaacgtgtatacttctcggtgacaggtgcaccaaaatctcagaaataaccactgaagaacttatccatataaccaaaaatcacctgctcccccaaaactattgaaataaagaaaagaaacaatgcaggctgaaaacattgtaatgacaatctttgtaagtgcaaaaaaacaaaaaacaaaaaaacacttgccaacctagaattctgtatccaaagaatatatctttttttttttttttggatggagttttgctcttgtcacacaggctggagtgcagtgatctcggctcactgcaacctccacctcccaggttcaagcagttctcctgtctcacccgagtagctgggattacaggcgcccaccaccacgcccggctaatttttgtattttttagtagagatgaggtttcaccatattggccaggctggtcctgaactcctgacctcaggtaatccacctgtcttggcctcccaaagtgctgggattacaggtgtgagccaccacgcccggctagaatatatctttcaggtctatagtttcttctctgaaacccagagtgccagatgtgttttaaaatttataatttttcatattttgaaagtaaacggagtatgtcaaccatatttcataacacacacacataagtctaagatagcaccctttaatcaaccacattaatatatgtgcagcaaaacctaggaatgttcattctagatgatataaagtctaaaactttcatatcaaatcaggttttactaccaaataagttcaggcactaaattaaaaaagaatacccttggttttcagaactttgggctttcagaattgtaaataagagaccttgtgctagtcagttttctacgttatgcctgccttacctctgatccttacaaatccttaccttgtttgttatcacaaataatatgtgactacagaaggcagcatggatcatgtaaccagaggccagtgggaatatgaccatttcagctctgccagtgccagggaccaagaatctgagactatgttgggatgcttgtacatcctggaagatgccagcacaaaatgctgggtaaatgctcattgtgaatgtcacctaggaagaaagcagtggaaaggaggggatggacctgaatttaactgagttggaatttmaaataattgagaaattactggacttgactgtgtttacccggattatctacttataagaaaatgaagttacatttttacataacagaatttataagtttttaaattatctactaaacattacttaatgtcatacggcctggttcatcatctgttaaataggaagaataataccaactkcacaaaattgtataaggcttcaaggagaagattgagaaagaaaaagaaaacttcatacacttaaaagaaaaatgtaacagacaatgttaggtaagcttgggtttttaaaccaatgagctctctgttgttttggcagaattactctggctccagtgtgtgagatgaatttgagaagggacagctgttagaaggagaccagttaggaggctttgcaatcattcaggcaacagggaatgaggccttttgttaggaaattgcagtgtacatgggttcaagatcctttccagtggtagaaacgtggaaaagagtgaggaactcagaaggagtcaaagatgacctaagattccaaggttggtgattaaagaggacagtgatgacattaactgagttggaaagtaaggatgccagcaggtttgggaaatagataagttcagttcagagtacagtgaatatraggtcaacaaatgccttggaaaagaagagaacagtgaacagtagtataatggtgaagagtggtgtgtggtgtggctctgcaggctgactctttcacaagttatgtaagtgttccgtgcctcagtttcctttctgtagaaatggtaaaggtaaaaagctttttgaaatttgcctttggaaatatttttaatttagaattttagctgtgcctcattatctctacctgtcactataaattttctgtagaatagtggttcaaatattacgtaattcatggacttgttatgaagcttaaatattaggtcatccaggaagagagcatagttgggcaccattattgactatagctattgcaaccatttagtgggaggccgatgctgtggatgtgatggaaagagcactgctccctgccctgggagacagaagacacagctctgaaatataactagctggtggcttttaacaagaggttcagttgggcctcagtttgttcatctgtgaaaacaagggactggrtaattctctataaggcyacttacatcccttaatattatacggttcccttgaggttaaaaacaaaatttgctacagataaaccataatggaaataatgtattcacttgtaatggagcaatagattaagtgctattttagtatctgtgggcctggcctaagacatatttttgcatttaaagcrcattaggaaatttagaaatggtaaaggtaaaaagctttttgaaatttgcctttkgaaatatttttaatttagaattttagctgtgcctcattatctctacctgtcactataagttttctgtagagtttcagataaatgtacagtgtcttctctgccttttcctgttatacttgcttagtgatgtcacaaaacagctgtctggatgcttacttcatttgcaagaatagaatagggcatttcgtttgctaggatttccacttgttaaaaagaatcccagagggccagccatggtggctcatccctataatcccagcacattgggaggccgaggtggatagatsacttgagctcaggaattctagaccagcctgggcaacatggtgaaaacctgtctctacaaaaaatacaaaaattagctggatgtggtggcacatgcttatggtcccagctactagggaggctgaggtgggaagatctcttgaatcccagaggtcaaggctgcagtgtgctgtgattgtgccattgcactccagcctgggtggcaaagcaagaccctgtctcaaaaaaacaataaaaataaaaattaaaaatcccaggttccatagagagggtactcctttactattactttttctgccttctacagcagagcacaatcctctttccattacattactagagatttttattaatgaagacatgctaagcacataaccaaagctaagattttcgttttggcatatttagggagaaactatgaggaggaggagatacaaaatggcctcctcataatagcttacacctgctctatcactttacctttaataggggtgattccattcaccctcattaacttcttttagccctttttggttttccaaatttgataccatttgtgttgaacagaatagtcttttacttatgtccttcataaaatggcaatatgcaaaatatgattgaaataaggaatgaagtccaataagtcacttataaaatattcatgctgaaaactttattcatatgacatgttttatgctcacgttatatatacatttgccmagtgttcagctgtcagaaattagagatcaaatacaaaaattttgttacagtttgtactatatattttccaattctttaggtgggcagccttcaaatattaatgaagaagaagagaggttatcaatttagttgggaagccaaatcttcagtcatcaaatggattactcaaaaattttactgaatgtgtgtgtgtgtctacttgtatgggggtggggggatgagggggagaaggaaagagaaagatgttttgcttcctaaaagaatctgtgaaggaaaatctggcagacattgtaaatcactttgatttttacattttcctcatcaataccaattgaaaaacacctagaccattaactttgaattgtatggaaacgtctaaaaatgtacctgcctgcctaatatcagagtaccatggtcttcactcttgtttttcagtgccaggccacatttattctgtggcctttgggtttggttagatggcagatggctcctcatttgatgccatgaaatgatgaaatcccagccaatatgaaaactttaaatgaaatctgttaatttatgcttggagtctagaagacaatttaaatatatatgtatatataattaataatgtattaatgattctaaaactttaaaagtagaaacagctttctattcatagtcttaacattggcttttcatatcaaaaccatttttagtttatcaggaatcttgttaaaccgtaaacaaggggacttgggttctaatcctgcttctgcctctgtggcaggggagagtcatgccaaccyactgggagttggtcayctgagctgtatgaccacaaatgtctcttgtgagttttacatttcatgattctgtgaactaaatatcctgtgctagtttcttttcatttaattctccagtccagaaatttaccacacatatatctgcatgtagctttgacatacattaggtgatcacttaatatttggtaaagtaacaatgtgttttgctacttcagatggattgtaaaattactgtaattttgcagctttttgtattggggctattacttatttgtgttgaatcacattattgttgctttaacacttactctcggtggctttgtgcatcatttagagttggtttttatgcattctcactaaggtatttcagcagggaagctgcaggaaaaaaaaaaaaacactttattttgcctaatcttgggaactcwaaaaatagacacaaatattttcataatcataaggtaatccagggagtgaatttcacttttctccagcttgattttgctaaaaaaaaaaagaccattctggatacacagacagcttattccaaacaagttaccctgtgaaaagaaaagcttctccaactctgctcactggaaaactgcctggatggaggcaagcgtttagtaccctgaatttggagagacctagactttcttctaaagctctaagatggatatagaatttaaaaattataagaaaataactgctgttygatgaaagaattttaaagttaagacatctgtttcctttatttgttttccattacatattttcagttaatatctaaatgggggataaactactcatcaggcaggtagtgtaaatagtgcactagttatttttaaatgcctaattccatacggtatctattcagctttacatattttcagtagttaacaccctaataggagtggcttaataagccatttacaatagaggcagttaattagttatgctattaaaaagcaaactttaaagcatttaatccattgtacattattgtttgctttgagaggcaaacttaagatttataaggttccaatttgaaccccagaataaatgaaggtaagggaagccaaaacttccctggtgttgaggaaaaacctttgctttctcacttcctatgaatagcagtattgtccaccaccattagtacaggggcaccagggccttgccattccatgcttgggcttgtttttatttttaaggaatgttggaaaattgtggaaatgaatgttttttcttcccttttttccttaatacctcatggatcctgacctttttctttaaactggtttaatacgtgtttcccttaaggttggtcattgacccaaaaatragtttgagtttctttttccatgatctcctctaaagaattctgttaatagcatactaaactggattacaaacttactgaataagtgctttgaattctgggcaaccttggaataaagggcacagaaagagtaatactgcatagaatgaaactgggcaagttggtataaaggaaaggaatgcaactgtatggctgatgtgatcaacaccgtctagtaggtttattagcaatttaatggaatatggctattcaagcacaataatggcttcagttgaaatgtctgttctgctctttttcccatacactttggaatgagtagaatgtgacagttgagctttcaacaagcttcatgaattttaaatcctttttagttataaaatggggtacatggcatgtagtcagtgtggacaaggagctggcagcctcatctastcttatggaatatcaggtgtcttcaagataatgagggctcgagttgaccaggtgcattctgggtttgctctgtatatccacagagaacagagggacctctctctgtgcaacatccaatgattattttgcagttgtaaagttactttctcaacatttgctgcaagaccaacttgatatcatcacagaagaaaacctgtactgatgtctcagaacaacttctttttggcagctaaatatttttattttgttctatctctggttgattcatgcatatttagagaagaaacactctgtgaattgtgatgtagctttttatcctcaaattttaacacctatcctaattgatccttgagtatttctttaaatatttaaatgttttataaagttctcaaattatattaccaccataaaagtctgtatctctgctttgggttaggtcttgaagtactctaaaattcaatacaaggagctttacttattttatttgcagttacctaacaacaaaagactgttttcagaagataatttttttcagaaaatctaatttaaagcaatctcaatttaaatagtatgaatttatttttaaattggtttataatagtaccctgtgttctatttaactatgtttgtgcttatagtataattttataacagtatgagcaaaaaaaaaattctcataaaaatacttaataggaatgtgttgaagtttgtgtgatagattattaacagtaagtgttatctatgcatgggtgttgggattacaaagatttttaatggttctatttgacttatctatactttctaatttctctacattaaatttgtgggatgggatatgttacctttttcacttcaagtccagggagmgtgggctttaaataaacctctcagagagattaaatatatttttgcagtttggaaacaccaaggataggtgtctgggagatacagaggattagcagctggtgactaacaggttaggtaggaagccaagaaagtgctactgtgttggtcatagctgcactgccagagtttgtaaacaaaggatgtgcaagtgtttgcatggactagaaatgggtcatgtaggagaaaaagttggtctggggctgttttgagttcagtctaaaataatagcccagggaagtatggggactccaacagtgagagcctggatggagtagaccacaggtgaaccaggggtggataacccaagcaaaaaagactctggtaatacagcttccagtggtccagtctcccctatctagagtcacgttagtatttggatgtttagagtaatggaaagtacgcactgacaagctgtgccccctgccttgtgaaccagaatgagcaatggttactggaattgtaggtagtagatgaagttttaaatattcaggctttggggtcccaagtatctcttaacttcttccaccagtgtcacatcaaccattttccaccaaccaaccacagctctttgcatttttgcatatttcctttaagtcttaagaggtatacttaacaggcatacttaaaaaaaaatagttgcaatcytagttttttgtgtcttttaactgctaaatttacccacattctttttgttcttagagctgtctcttagtttctccctgggtatttataaggatactgtattagtctattttcacactgctrtaaagatactacccaagactgggtaatttatacaggaaagagatttatttgattcacagttccgcatgactggggaggtctcaggcaatttgaaatcatggcagaaggctaaggagaagcaagtatcttcttcacaaggtaacaggaaagagagagagtgtgtgaaggaggaactgttaaacacttataaaaccatcagatctcgtgagaactcactcattgtcacgagaaaagcatgggggaaaccaccyccatgatccaatcatctccctccctcaatgcttggagataacaggtccctcctttgatatgtgggacatggagattacaatttgagatgagatttggttgggaacacagagccaaaccatatcagatactctttagttcactgcacagattctaaatgacattgagcactaaagtatgttacattgtgccctgaagacctgaaagagttaatttacttttcaaagttcctgtggtactatccaggaggaagtgaagcaacaagaaaaatctagctaactatataacgtcaataagaaatacttcacttatatatttgcataatactgaaatgcatttagttttgacagcataaacagaactgtgttcactagggacttatttcaagatttgaatatcaacttatgtaatattaaatttagttaagatacatcagaaaaattttactaactatacccactattaaactaagtggttttttgccgacagattgtgtgctttgttcaactgtaggctttgtacatttcataacacgcacattcctgttctgaaatggaatgcacccgatctataataaatctgcttgagagacaatggatcctagccagctctgccttggttcaaggaaaaagacagtaaatagggggcaatgacatttatgagaayctaatttcattatactctgcctcataggaagagaatctagatggtgttgaggttatygtactttgagtattactcaaaaccagatatgaagtaccttctgtgttatattcctaatggttattcctccaatgagtgttttacttaaaaattagttaatatttagtgataaattagaagtaaaaaataacttttttaaaaggagaaaaaaactataatggcaagaaaaatatggcttaccatattttttaaagtaatttaggaaaggcaaaactcattagctagatgataattagttttccttggtagaatattgaccggaatgtttctattaggaaaatactattgaactgttccagtcttttccagctgaggatgcccagatttgataatagtgaagaaaaattcactattttttaacacaatgttagaacacggacagttatcaaaacctaggacaatttcttgaaactagccattttgtacaactatggttggaaatgagcctttacttaatatttataagcatccaaatactcagctggtgttttttcactaacatattttaaacaagttcccagagaagcaaatgtatgaacatatgacaaagggtgaatatttacaaaatcatttgccatgcttcagcctggaatcagaaggcagcttctcagaattaattrctatgcactctgcttatcctgactagggcctttcacaaccatctctaatgaaggctttaataacacacaaaaaagctaaggactaggaaggaaaaaaaaagcagcaaaattcccccccagaaatcatcccagtgttccaaaaaccatcttgcatatcatgctcaaacccagggcaatgtagaacagtcaaaaaagcaccaacttgtaccagctgttgagaaagctccacaattggtgaaaaattagcaaatacaatatttttaaaagaaatgcagccttacttatgcagcaatcattgaggatatactaatgaagtgtttctcagttcagatatttaggggacctacttgaataagtgaatatgaatgtgttttaattagcacagcaaactttcatttagtcctatggtgctatacagtgtgaatgtattttggactgactgatctgaaatgtgtttgaaagttgttcttgctatatagccttgcctacactattgatttgcttaatgcacttcagcttgtctccaattcaagtgatcataatttcaaaattgatttctgaaataataaaatcttatgctactggtatggttgttttttgttgttgtttgagrtagagtattactgtgttgcccaggctggagtgcagtggctattcacaggtgtgaacatagtgcactgcagcctcaaactcctggcctcaaaggatctccctacctcagcctcccaagtagtgaggcttcagacatgtgctgctgtgcccagctttactgctatgttttatagcatctacaaaactgaatttaacaagaaaatgtacaagcaagtggcaagaagtagcacttgatgacttcactacctgttacctctggaaagttcattacaatccatttatttgtttccagacctttgatctagatggcattggtgcaatcataatgaatgtacgttaagtagctcttcctgccaaagggggatttttgcatccattgctgcaaacagctaccaaacttcgcaacagtaatgaatgagcaatgtctcctggagtctttttgttagaatagtattgttaatattaatggacaaggcaagtttcctcacatcacttcctgcagatcatggtttgagttagctcttctgatatctcttagatttaagtaactttttgtatcattgactcccaatttttatttctggttctgactactccccttgatctctccatctgaatatctagaagtcatttcaaactcagcatggccacacagttcttcaattttttctctccagccttgctcctctccctggaatttttcatattagaaatmagtacacctatccactcaattgctcaagayaaaaatctaaaagtcaccctgggcccttcctttccttcaccccsacatccaatccaccaacttccgtccaccctccagaacacattccaaattcagcactttctttgtctccactgtcaccacacttgtgctcaccaccattttctttcacctggactactgcagttgctttttaactaagttccctgtttccatttgtgccttccaatccattttccacaaagcagctatccagaatttgtaaattaaattatatcactcccttcctgcagactctccagtgacttccaataatacttaaaattccaattctttatgtgagtttaccaagttcagctaaccccatctggcaaccccagctttatctggtaaaatgccatattagtttgctagtaccactgactggacatcttaaataacagagatatattttctcacaatgctggaggctagcagtctgatatcaaggtattggaagggttggtttcttctgaggcctctgcctggcttgcagatggccatctgtgtcttcacatggcctttcatctatgtctctttatcctagtctgctcttcttataaggacaccagtcataatggattagggcccatcctaatgacctcattttaacctgattatctctctaaagaccccatctctaaaggcagtcacattcttaagccctgggagttttcaacatatgaatcttgaggagacacatagcccataacacttgccctcttcattttagcactgtgctagctgtcttcctgttccttgaacaagttaagcttgttcccaccttagggcctttgcactggctcttgttggaacattcttcctatgggcaacagagttggtccttttggtcactcagatatcagcacaaatgtcacactttcagaaaggctgttcctgaccttccaaactacagtaactaccctagccattttatatcacatctcctgaattaaataactgcatagcacttaccactaatatttttaatgtttattatttattgcctatctctccatatcctcaccagaatatacacagggctcttctctcttcgctgatgtattcttggaacctagaatagtgccaggtatattgaaaatgctgaataaatgtttgttgaatgactaagcaaatgaacagaattactggagatgagtggcggttagtgattattgggacaaataggccaacggtagttttctcacctgcrggtttttagaaataaagatgaatcttcccacccttgaaatgtcgtaagagttgtttaaaagaggtcacagaggttgtatggctcttgccgtggctatgccctgtctaaacaaggtggatatttttgccgtatacttgtttataacatttccagaaattctgtctgacttacaaagttgttcagctgttcattcagtaaacatatacagagagtcaactaggggccagaacttgttaatagaatgccccgagcctgggcagcataagtagaccccatctctacaaaaaaaaaaaaaaaaaaattggccattgggcacacacctgtagtcccagctactcaggaggctgaggtgggaggattgtttgagccagggaggttgaggctgcagtgagccatgatggcaccactgcactccagcctggaggacagagtgagaccctgtctcaaaaaaaaaaaaaaaaaaaaaagaatcccctgggagccatgggagcacacagaaggaatctctgacccagccaggacctacatttgggctgggagcagggatatgctggatggcttttagggcagcttaatgcctgcaatgtataaattgtatactgaacatacaraatatttcccatacattaatctgtttgtgtctggcagcatgcgattcctctgaattcacagaaaattatgaacacttcgagtactatttctggtgcttattttggatcatgtgcacagcaaatttttatgcttctcaacattcaggaaaattagtttagaattttataaacttgtcagttccctggtttttagcctactaaattttgcaggtcttttggcagctgacacttattttaatttggtatttggtgataaatcatatttttatttgccccctgcagacagaacgtcagtggcttttaagtactcaatacatgtattgtatcattatcgtcaacaaggaattgaaccgcttgaattagtacattatatatcaagagagctgacaagaccagcagagctcctgccttgtttttcatttagaaagctaaatgtcacttccagccttcttccgggaaactgtcttgtagtgacatcgttatggagggacctttgaacctctggaactttctcagtgtattctccagataatgaaaagggtctttcctagttttgtccagagtgctttttatttctcctggctccgtgggtttgccttccacatttctgtctaatcttcctagatgctatatgccctttggatctgagcactggttcagagatgaagagtgttgaaatattaattccagctctgatatacagagctgcaacaattgtgctttataaactaacataatcctgggatgcttttagtttgacaatctactgtcttctataggcaggatggtcttagtgttgtaagtggttataaatagcatggtgcattcctataaacagaaaaaaatcctccattaatagttgtttctgtatcagaatttaatcagtttgataaagtggcctgttattactgactctttggatactacttgtcaattttgttgtatacctaaatgagttacttttagctgcagctaacagaaaactcaaattggttaataaaatgaaaaatcttatatattaagaactccagggctctagggttggatttggcagctcaaaatgtcatcaaaggctcaaattgcttccctctctctgccctgccatatttgatgatggatgtgttctcaccagttccaggtacaacatctatacagaacaatgtccaagggaagaagaggaattatgtttctttctatggctccaggaacctctcaacagacaccccctcagtggccaatattgggtcacttgcaccagaccctggcataagagacagaactgccatgcctgatttagactgggaggtaccttaaggaatatggtgataattaaatgacataatccatgcaaaatcacttagcacaatgcttggcacttagaaagagcttaataaattgtatttattattaatgatagtgttatgagtggttaagaggttcctcaaaccttgttgatactgattgtgtgttgaggagataaagataacagggatcacctggggaagcccatctactcaaatcctcagagcgcatagcaggaccctactcataggaagggaatgggataggtaactagaacaggacttcagggaaaagaaccaaagcagcacccaggtatatggtcaggagtaggacaaagcagaaagaatgacttgaccctgtgtctcagagcatcggcctggagcttgttagatccttctttttcaggttaagatcgatcatgggaataaatgagttatttttaggtgcagctaacagaaaactcaactcagattggtttgggaaatgaaaaatctcatatatcaagaactccagggctctagggttggatttaacagctcagtccaacttagggaatgaacccaaagttgatgaaatctactatactgcatgtgaatataaataagaaaacacacaaaggttggcaaataagcagagcctgacgtctctcttataggaaaagcattgtagattctctgtgtcatatacttatctcactactggcaagtaattagcatccttggagaaactgtgtgatgggttcttccaaaaaaataaaatataagtatcataagttagtgttgagttgacacactctttgtttcccactgcattggaatcttctgtttgcctctgaggattcccatctttctggagtttttttaatccacttttaggtttgccctatcttgtctgcattcatatatccagcctcttgcctctgattggatttggttaaacaccagaatactttactcatgagtaaccatctggggtattttcagtaaattctatgggaggaaaataggattacagttagagtcatatttatgaatgccaaaattttttctgagactgcaacttttagaagtctagagccggaaatgacctcatttttaagctttgtgccctccgtttactaatatggaaaccaaaatgctaaatatcttggttaatttttagcagtttccactagaaatraacccatatgtttggaaatccaagaaatcaatgggaaaaaatgaaatgggtatgtaacagtctgtgggaaatgtttcaagagatcttattcatgtaaaagttataacaaaagttcaataagagggaaaatgagctaaatggttataaaactttaacacgtattgaccatttgataaaatcatgagttctctgaataatcacagggttaatatttatttgactttgataacttttaaagattatcgtgattaaataatttccagttctgttgaccatttttgtaggactaaggctcccatttgatttgttggttgttttgttttttttttttttaccagctatcagccgagaattgctctcagttcccagaggccaccctgtaggccctcttcaggcaattcacaacatggatgtttacattcttcaaaacagaagatcagaacatctctctgacttctttgtctctaacctttaaacccacgtttaagggttctccttaggtcaagcccacccagggtaatctccctttgattaactcaagtcatctaagtagatactttacacctgcaaaatttctttacttgtgctatgtaaagtaaccaatcacagatatgatatcttcatcatatttacaggtcctactcacactcaaagggggagagatttatacaggacatgtacatcaagggggcagcaatcatgggcaccattttagaattctacctactatacttcctagtgtggtagaaacccttctcatctctctaaattcatcacttttgtttggagtgtatataatgtcttggtttggagtgtgtctgcatatccatatgctttggtaacctcactatttaaaatacactgttgactacctaaagatttttacacaaataactaactcctcctcatactctgatgagaaagtagtggctcccaaaatttattagccttagtttgtgtatgcttagaaaagcaaaatttagactgtttagaaaccaaatgcaagttcagactgctgcaatttgtagcctctatccttccatttctccagaatgtctgagtccacatttttgttcaataaataaataayagtgaacataatctgttttggagagtactgtagctcctcacagtcactcgatttcattgtagatacctaaatttgttggttagtaacaatattgtgtaggaaagaataacacaaacttaagagcaaagctaagttgaaatctcagctctctgcttacttgctatgagactttgatcaaatttacttactctgccccagttttctcatctgtaaaacaaatcattcttgtacttgcttcatcaggttgtaaaagttaaataaggttaatatgagttcatagtagagtgcctggcacataggaagactatataaatgtttgctgttaccattgctaactaaattccttctgagagctttgtcctaaaattagaatatagaagaggatcccaatrtgtttttatttagaaatttttaagaccggatcattgagtacacaaaatgtctgttcgatccytttttgttggtagttttggctagttttagtagtcaacacatacagccaggcatggtggctcatgcctgtaatcccagcactttgggaggctgagacaggcggaacacctaaggtcaggagttcgagaccagcctggccaacagggtgaaaccccgtctctactaaaaatacaaaattagccgggtgtggtggcacaagcctgtaatccaagctattcgggaggctgaggcagaattgcttgaacctgggaggcgaaggttgcagtgagccaaaatcatgccattgcactccagcctgggcaaaaagagtgaaactctgtctcaaaaaaaaaaagaaagtaatcagcacatatggacaaatttaggaatgaaccactgaacaaacctaaggcatctccaaatcaaagggtagtaatgaatatgcaggtttttcttggtgaaacaggttggtgtggtttatatattctgttcatattacttagtgttcttaatcactctataacttaacatcctaaggccctaatatacagaaatttcatttatctctgatatgaagagatcatggaatacaaagtcaccttggcacaggatcttacaatatccagtggacttaaatgtacagaattggaaggcagaaggcatgggctccaattctgatgtgggctgcactctatgatgagacctcaggagaatcttaatcatacagtgaagtgaaaatgaggatgggctccggaggcttgactcggcaagtcagtcaacctcccttagcctcagtttactcatatataaaatgggtatactaatatctaccctttcttctttttggagttattgtgagcatcacaacaaatattccattttattgtcactatatattcagaaggtgtatctgttccactagattaatttcacagaggcaagcaagggctgtggcttaaaaaaaagaattgtagcctgatttgaaaaaaaaaaaaaaaaaaaagttgacatccaccaaatatttgttgaactgagatgttattcacatgacaaaatatgtgtgaaaatgtgatacaacattaagcaatgtcataaaatcagccaagtgtactagcaagtggccacagtgaccaaagatgtgctgattaacaaagaagtttaaagtagcataaagaaataaaatgtggycttttgaatatgacctcagacaatatagtgattttgatgcatcagcaagttccaagccatctgtgccttgatgtgccaagacagcttcttgaacagcttcctcagcattatctacatgtcacactcaacattaaaaggcaaaacaaaatcagcaaaaagttgggagatgaaaccatctcactaccaacaaagctatgttgctactgttcaactctctggagctagacaagtgtaggggtagaatgattctataattttaaagctcctgtaatgtgatgagttacaaagaaaccasgacaacttaagcaggcattgaaaacatagtggtgacattggtgatagcacagcttctagcacatggcagaactgtggttgactgagacatgtcagccacagacaggccaactttgagggccacatttatttcatagtatstagcagcagaaacagctgaaggaaagcagcttggctaacagattggtgcatattctttaaggagccatagctcagaactgttcaccaggccccacaagcacattcacaacatttagaacgaagatgtgaracattcaaaaggggcwttactgaaaataaacagcaaaagtcaattttggaaagggtcaactggaaaatattgccctgaaataaagagtattaaactaacagtgctataacaagttattatgaatatagcttcctagtaaaactatataaggctttatttttgttttgttttatattagggagagttttgggttttttgggagttcttttagtaktttaggtttgagggagattttgcaagaacaaaaggaaaactgaacttaaaagatgttttatttaatacagaaaattgtattttttatcttttacttgtttttgaaaggtagccaaaatccaaacaaaggactgagttaatttagggcaaaataataatatcatcaactactagttttgagcacaatatgccaggcactgagctaggtgttttacatgtattatcttatttgttactcacataatccctgttagagagaaagcactattcccatttgcaggtcaagaaactgagactcagagaggtgaatttatccaagtcacattgctaataagtgataaagactttattctaatccctggttcttgccactcaccatgaaggtctaaagggagtgaaaagagaagacaggataatcatgaaaacatgataggatggaaatgagagccgtaaaagaaggaaagaagagagtagaaaagggaagggtaaggaaggagaccaggcattgagaaagagaaagaattctttagactgattgggtcccttagagtggtaatattctcagtgaccatgatcattccatatcatcttagctgatgctcttttgagtcctgtggaacatcttaccagacaggcccacttcccaccttatgtagtactttccaagggctatttcaaagcagaggttacacaagaaatttgccacatgtcttgacagcttccaggagctggaaggaaatcagatttggattatctaaatttaaatttaaatgtatcctcaatgtatgttctctaactgtatactggctttgcaaaaaaaaaatctataattttaattcacaggaaagcagatgggatctgtcatggagggataaaacacaagaaacatgtccaaatataagaaaaaacaacagttgttttcttgtgcactaattttatagtacaagtatctgtcactgtgtatacacaagctgttattcataaaaaatacaatatttattcagcaaatactgtgtgacttgtatgtatttaatgaccagaaggagcctaaaaagttgatactataatgaataaatacccactttaaaggtgagaaaactgaggctcagaatactaaataacctgaggacactggctaataagtagcagaactggaagcagcagaggtgatctgyagcagctgtgaccagagaagaaatctatgctgtgataaatagtatgaggagaaaaatggggcaaaaaatgcaagtataacattgttttaaaatgaaatgcaaagtgcatgtagcatgaaaagggagggaagaaaggtcttgtaaatcttttgagtaaagaatgaaaattactgtatatactttatactctaaggcttaaattaagtaggttgtttttctaattttccctttttatttctaattttgtgggctaaaatgacccattcagctcagccgttggaattaatactgtttgtcctgatggtttctctgagtaatgctaagttccacactgcagggttactgtctcaatgaaaggtgggtgtgttatttggtcattttttttcctcttggaagttaataaagtcaacattaaccatggccatgtaaccacagaatgggcagtttcttaaaggctcatggtttggatcttttcctgcaaaaactcccacttctatagttatatttagtgttctaactgcctgaatagctggcttgctatggacccatgtgtcaggcctgtttgcagctgagtttgtctgcttcaacggaacctcaatgccaagagtgtgtggttcccaatggacagcctgccgagttcagcctctcatttcttctccagaaatctccctcagtttagcattgccgatttgatgccatatggccctgcagttctcaaaactgtttacttgatatttacaattttttaaaaatcttgtccatgtgcttaactctgaaagtaatgtagtatcatcaacatgtgtggtatggacctatcctgatgactgtttgtatagatgtgattgaatttttttaagtactgcccctgcacaagagctagtttttttaatgtcagtgcagctgttttaacttgaaaagaaaagaaaagcacaaacattttatcctctaaaactttttaattttcaaagacataggacatttaaagagatgtaatgtttctgaaactggtatatagtagactccctacttctattctcctctaacttttaagaattgaatacagttcctgagttgaaatgttgcatagttacatacaaacttttcaaaccaaaatttatgttattgctcaactcctcctaatctttgaaatgttaagttataatagaagcagtagcattagtaatagaaacaaaaagtaactgtatatctgttctcatgatctctccctaagctcagtgaattttccatggacaaagargcagagatgtcaaaaggaaacagttgtgttttcctgggttcatagtagcccaacaagtcatggtaaatattgtgtttgctccttattttatgctgtagcaacaattccacttcctattacataggaaaacctattctgctgttaaaagaggtcactgaatgtatttactacaacattaagaccattttgtccatggaaatattttttattgttctgagtcactctggtttgtggaatttttacatgagttccaggacaaggatgagatgatatatttattttactttgtatcctctttaaatgttttttgaatgcrtgaatgtcaggcttgttgtcaaagtatttccatatttttattactttagaagtaactctgctctatttgtgtctcttaaactcttcactgacaattcacactgtgtactcagcatgttgtakttttggaagaactacctgctttgcccagtgtgatgtgatctcttgttcccttgtcccctattcgagtcatctcattgtatgtctttactatcctaaaggttttgcagacctttgaaaatatttaaattgttttgttgagctactggaaggacttgaattaaattgtgagcttcaatttgttatgcttcacattcatttcttatattaaagtaagcctcaatagaagtgttccttaattcaacccagaatatctctgtgctttagacatgccctggaatcatasaaattcctgaaatttattttcaaatattcattggtttgattgtaattgttgaacttgttaatcacctctaaggaactaggttttaaaagatgggtaatcatattaactgtttgaatataactaacacagtttacatttacagagaagcaaaggatgttttgacattttacaaaatatttgaatagaaaacagtgattgtcctatgggttgagatttcaaattacgagttattgatattccttccatgtattatactgtgtgtgtgtgtgcaattctgactaaatgactgacataagatttaaaatggaatcttgtatttcytggcaagggtaggataattgggtgctttgcctcccaccttcctttactcatgtgccctaactagtcagcctccaatagtgtgctaactggtcagaattgggtgccttgcctcccaccttcctttactcatgtgccctaactagtcagcctccaacaatgccctaactggttagcctccaatagtgtgctaactggtcagactccagcaatatcctaactagtcaacctctaacaaatgccctaacttgtcagcctccaacagtggccgaactggtcagcttccaatggtgcattaactggtcgtactccaacagtgtcttaactagtcggcctccracagtattgtaactactcagctttctacagaaaaaaatgacactgtattgactcaatcttacactagaagggaacaaaataaacaatttttaacagatcatttcttctcttacaaatgatcatgactggtcatacattatatattcacaaggatgggtgtgtatatgagtgtggatgtgtgtgggtgtgtgcacgagagcttgatttagtgtttagatgttttggatgtttttttcttgttaggaaattgtagcatagtaatctgaatcattttattttcaacaggttgacatgatgaaagaagcattagaaaaacttcagctcaatatagtagagatgaaagatgaaaatgcaactttagatggcggagatgttttattcacaggtatagttgtatttattttttctatccaagaatatttttaatacttggcttgtatttacttgttttattatagttttttgtgtttttttgtttttgtttttgagacagagtctcgctgtcacctaggccggagtgcagtggcgccatcttggcttgctgcaacctccgcctcctgggttcaagcgattctcctgcctcagcctcctgagtagttgggattacaggtgtgtgccaccatgcccagctaatttttgtatttcagtagagatgggatttcactatgttggccaggctggtctcaaactcctgacctcaggtgatctgcacacctcggcctcccaaaatactgggattactatcataagccaccatgcccagcctattgtagtagttttaattaccaaagtaacagatgctaaatggagggaaattggaaaatacaggaaaacacaagaaggaaaaaaaatgaccttctattcaaatataatcactttagtatttagtatatatgtccttttagtacttcgtrtatatacatttgcatatttttacaagaacattattggtatgtacatcaccactttgtatcttgcttctactttattcttctacagcatgaatttataagttgcatcsttttccattgttactgtrtatctggtttgtatttaaaggattcataattcaagattagtgtcatttacaaataactttctttccagatggcaaggtggatttaaataatttctatgcawattgacttggcttaatgccagatggataatagcagaactcaacaaaatatgaacagctaatattattattgatcttactggagtcagtttttacagtgtgtaatgtggctactaaagaaacagtaattttagcatttaaccttttcaactcatttatcgtataattagtgttgtataaaatcatgtgtaaaatctgggtccccaaattcattctggttatactgatgagcaagataatcaatagtaattttaatttatagtgagaatttattttcccagrcatgtcagagaatacatttcaccaatgtagccctgacagcaaaggctggtcctcagggacttgggaatgtggccccaagtggcccactgaaagcgtgaagcttcttggaagtctaatattttggctgatgtgaattttatattgaatctcatatatatgtatagtcaagatatagccatttttgttttaatatcaaaataatgttttgcattacttactttggacataattaatgttcctgaagaaggaatagtgtttattctgtgacatttaagyagttctttgctaagtgtcacatactgtcgctatggktggggccaccacgttgccagctctgggggcgccattcttsttagggattgtgtgaatagtatgccctggagttgtgtactgcacctgtgctgccactgtcwcatgcagtggtccatctctggggtttggtttgcatgcccattgaaccctaagaacacagaacaaggagtcaagaaggcctacgctgcattcttatctctgggtgtgcccaagcagactcaggcattctttgaatctgcctagtaagttccccttagaatattctttgtgtctcccgttgatggcactttcattctttttgacagtacagarcaacagtctgtttatctaacaaaataggcttttgtgaaaagttagatgtgtaaatcacacttccttacaatataactcttttttatcagaacatagccatgcaatgaataacttattgtaagcaggtactgttaacatttgaaatatggcttaaccaagctatgttcacaaccatttattttagcagctgagccagaaagaccccctaaaatctcctcagtgtgaaagtgcaacttacactaggagtctcttcttttggtcaaaggtctttccctagcatctcaagcccagtagttttgacctatcttcaaagtaggtactaagcatttaggcttgcctttgatactacctgtagactttttttatttgttatattcaatacttaagttaatgtgttaatagttactttgttcaaaactgagatgatgttgggatatctttacctccttggcactccattcacacctaatgtgtgttcctgccttctrttttctacttgtcacttttcttcatctcttttattttattgcggttaaacacacataacatttgcaattttaaccattattaagtgtacaattcaagtgacattaattacattcataatgttatacaactattaccactcaatttttggattaggaagagttagataagaaataaggtctgtaacattttctatgtgctctatgtcctcttttctctgtawttcaaagcctcattaataatttatcaggaaatggacagaaggaaagctgctttccaaatccagttcctgctgggaaatctgtcagtcaggcaagcagctactggcaaaaattgtttcaataccatttctcttaaatagacagcaacttacctctacttttatttatttttgtgaaatatagagtacattaaaaaagagttataaaatgtttatgtacagtttaaagatcaataataaaatgaacacctgggtgtccacctcctgacttaagaagtagaacattgccaggaccatagacacccctgtggggtccccagtcaaaaccagcctctcccctgacctcaagtaaccactgtcttgaattttgtgttaattattgctttgttgttctttgagttttgcctccatgcatgtattcctaaagtgtatgttgttttagttttgtttgtcttgtagttttataaagctacaagatacctttattagagtcacattatatgaactcttaggtgatttttctacttttgatctaagttgatgtgtgtagctgtagttcattttcaatgttgtgtagttctctgtgataagaatacaccataatgtatgtattaattttactactgatgtgtttttggatgttttccagtttttgtggattatcttctgtgtttctatgtacattcttgtgtgtgtctcctgggaacatatacaagagtttctctaaagtaaacacctggaaatgaatttcaggtgatagagtaaactctttttcttgtcactgaaatgattatatgattttctttaatctgttgatgtagttaatttcattaattcattttctgatatttgaccagtcttgcaaccccagcatgaaatcaaatttgatcatgatgtattctcyttttaacacagtgttgaatttagttcgataacattttgttatgactattatttttgtggcctataatttatatttcttgttatccttgtctggttttgataaaagagttacattagcctcgtagaatgtattagggaatatttcctctttttctattctctrgaatcaatactatttgaattatatattccttaaactttggaaacaggctcttgtgccttctttatggagaaatttaaaactgatttagttgattaatgattatgtgacaatttagattttcctgagtcagttttgatgcgttccattttctaagattttatctgttttaagttttcaatatgttgggtataaagttacttatatttcctaatatctgtttaagcttcacagcaactatagctatattatcttttcattggtaatgttaatttatgccttctttctttgtttgccagaggtttgttaattttattaatctttcctaaggaccaactattggcttggttgaactctttctyttgaatgtttcttttctgtttctgtatttccttccttcacatttctttctttttactctgttctctttttttctacatctcaagttggaattttatctcattaattttagcctttcatcttctctaatgtaagcttttaatgctatgtaacttggcctccaagtactactttagcagactccttcttatttttatgtggatatttttgttatcatttagtttttttaaatgttttgtaatttccactgtgatttaatctttgattcattcaaaggtaatgaggttttttttaaaaaaacttattggttattattgcaagttggtggaacactaactcataactgtaataatttatatgtaaaagaaagactcaagtatttagcttttctttcctttatgaatttcatttcaagtagaccaaatacttgaggagagattttctttttagggttgcagcgagtaaatgcagattcctaataaaaaaataatggatctgtgcaatgatcaacaaatgatattaaaactgctatatgaaagcttgacaggaaactttataatgagggaatcaggctgatgccacttgaacacacagtagtcctattaaaaaaatatatgaatgagcatctaattaaccatctacatgaaactgcctgcttactgaaaatacaaaggataaaggaaaaaatttaaatgttaagttataagaggaagcaaccagtcaaagcaagaatgtaggacagtcagtaggaaaaatggcctggtttctcctataaatgactgagacaggaaggggaaaaacaaaaattgtgaattggcatagaagaaaatgacacaaaagacatcaaaaaaatttagatgtccatttcagtattttagttgtttccatcaggaagattatttaggagatctcatccaacgtactgccagagacagaagtccaacctactttgaagagataagcagcatccttctctttgtactttcccatcacatcttagcctttttttactttttttcaatcagcccacatcacgctccgaacaccttagtcttttaaaatggaaatggtatgcatgccaccctataaatttgttatatacataaatgtggaaattttcttcctccctttgtttcttggaaaagaattccacatgaaatgtgagaaaacatattcagagagaaatcagtattttttttgcctcagagtattatgtttttcttaaaagattttcttaaaagttataaataaattaatttataaacctrtttttatcttgaaagaattaaagaaacttggtattttttcattgtagctgactatttaataaagtgcataatacttttttcaagtaaaatacctctccttgagttaaattttgatctttatataatgagttttcttaaaggacaacacaatcatgccattacccaaaaaactgtcagtgtgccacaaaagattcctgtgtctgccaacaacataagcccttggatattgtcgtaacatcacctgacctatgtcatttgcccgtttaataaggacattatgaagattaaagttataatatttataaaatctatcaagcacttctgcatggctactcttcttatacttcaccataatactctgaggcaaaaagatactaatttctctttgaatatcttttccacatattatgtggaatttcartaaataaagggaagatgagagttcccacatttatgtattgcctaactccatactataattatttgcctataactaagagaccatttttatctagtgttttgccttctgagtagaaaaactgctgaatttcagaaaagtcaaataagaatgaagtttcatcctgcagaaattttgtactttgtacataggtatcttttgatgttttgatttcaaatatatggaatgtgtagtttcaaagacacggcttttagaggtcagacctgaagaccagtcagcacttaactcactttccccagattgtttcctcaggcctcacgtgatcattttataagaaaagaatccgaatttatcaacaatgtctagtactgttcttttagtgaaaaaaaaaaaggtagtataataaattctcacttaacaatgttgataggttcrtggaaactgtgacttttaagcgaagtgacatataacaaaaccatttttaccataggctaatataaacaagagttaagttyctctggcatatttctagtcacaaaaatatcacccagcttctaaatcaaaacccaaaacacttataatattaagcattgaaataaatgtcagccatatgcacatttttttaaattaataaaaacaagataattgcccaatttttggccaattactgagtaacagcagttgtggtggtgggttaaatcagggaataaatatttgcaaagataaaactgtaaggagcccctcctcccaccatacagctcaaaacaatcacaaatatggtgggctcattgagcactttcctacgacatcatttattgttgtacatttgtatgattattggatgctttattacaatcatttgtatccattcattttctaaggcacttcttccagttcaggrtcatcaagggtggctggaggctatcctggaagctcggggtgcaaggcggcaacccaccctggacaggacaccgtcccatcacagcacactcacccacacacacccacacttgctcagactgggaccctgtaaacatgaaaattcacctgctgtgcacagctctgggatgtgggaggaaacccacgcaggcctagagagaatgtacaaactccctacagaccatggccccagctcagaatcaattttttctttttcctcatcaaagttgagcaaaatgatgttatttgaggaactgttttactgttaaattgtcattgctattacttaatttctgatcagagattatcaatgtgtttattattgcctaaataaaaatttcattcctattgtagtaaaatatacataacataaaatttaccattttaaccatttttaagtgtacagttcagaggcatgaacattcacagtgttaggcaaccatcaccaccaggcatctccagaactttttcatcttcccaaactgaaacttcctatccattaaacaataactccccatttacccttccccatggctcctggaaaccaccatcctgctttctgcccttttgaatttgaaaaagtttattcttaagggcagtagtttgaaatcattttttgtagtctctttagtgaagctgttctctgtggtaagagagaactgtgtgatgctttaaggtcattatttatagataaaagaaatgatgtacagtcactggtgccayctgctcactrtgttccatgacatctattacaggcagagaattttttgtgggcctttccaaaaggacaaatcaacgaggtgctgaaatcttggctgatacttttaaggtaggtaaaaggtagtttatgcctggcacaaagcaattacttaataaataatcatagaaccattgaatcaatgtcatgagtaatggtgtttacgcttcactggctttgtacaataattcgtaatgtttgtacatttactagaagttttagaagctataaaattcaaattcctcaataattcagcttcactgggctaccacaagaacaactaagttagcatgggcatcttctgtcttctcccagtgtataattatacaaccacctggcagatgttcctggaacaatcaacaacttaaaaaaaaatctggaaggccgggcgtgatggctcacacctataatcccagcactttgggaggccaaggcaggaggattgcatgagcccaggagttccaaatgagcctgggcaacatggtgagaccctgtttctaaaaaaaaaaaaaaaaaacttggaaacccaattgactctgttatgaaatacagattttttttagattggaatcaggggtcacctgtgcttgagtgccttctgtgtgctgtaaactgtgctaggtgttgcacgtacatcctcttaaggtccctttactctattgattattaatagattggctctctacactgcataggaagggatataactctcaagatgctccgttccccatgaggatgtgagtctccagctgagccactgtttacacaggatattcaaatacaccctcccagagtagcccactccatagatcaaacagccagcaaagatgttgcagcagtcacacatctggtgactctactgtcttcttagaagcagtcttcgtttaactagcaatatccaaatctgtgggtcccagtttttcttccaaatattcaaggtccctgtcagccttcaagaagtaggtgtatttcagggaggtttttaatcagttttagaattattctgcaatactaaactgcttgtttttctattgtcyacgtaggaytatgcagtctccacagtgccagtggcagatgggttgcatttgaagagtttctgcagcatggctgggcctaacctgatcgcrattgggtctagtgaatctgcacagaaggcccttaaggtaaatacaaaactgtgctccttctaaatgtagtgggggtgcctgccacagggtttttcacattctctctgctgggggagtaacaagcagggttggcagggagagaacaggcaggtatttgagcttctgtgatgtgcactgttgtgacctcacattcattagaagccaggaacacctaagtgtaggaagaactcttcactggtgaactgtttttagttacacaccagatttcctaaaaaaaaggccatgattcaaaataataaacaccaaactcatcaacattatccctcaggggaaaggagggcatgccaccagattgagctccttgtaatgttttctcacttaagttggagagttggtacacagggtttgttatattattcttatccttttgttgcgtctggactatttcataataatcttttagaaagccatggttcagaagtacctaaaaagcttaacttcttcatttgcatttggaataatarcattttaagaccggaaatttcctcattttatagatagtagacttgccagaagaaaattagacttgcccaggtcacacggctaaatcaagagtggaagtcattgmtaaagaagatgaccttctgttgttacaatgcagtgctttccctttccttctctgtaacttcaaccccgtgagatgatctggacacccaataaggataaagactgtgtctgttttgctcatcattatgctcctttgcacttggcccacagtgggcccttcataaatgtctgatgaagggatggataaatgaatgagagaggtggtattatctccattttgcagatgagaaaactagatcaagtgactcaccccaggtcatagtgctaataataaatggtgggtcaggactgcagccccttcctcttagctggtcctgcacacgagcatgcatgacttattaaagggccaaagccagaagttcctcttagtcatagacagcaaatctgtgggccctgaggctctttcaggtctcttctcttctacctcagtgccaagtgtggtggtttggctgggaagcaatcgtttccttgagctaaatttcctctctgtattatctgccactctttgagctagctcacctggcctttcttccrcctcttcccaaacggtatctttgattctgtttctaaggcttttattaattgttgctgaacaatctgtctcagaatttgatttgtatcatggtggcttttgttcgtttactttagagaatgtcttttgttctgctccatctggaagttcatgtcaacttcttgcatataaaaaaagctggtgtcttgaaagaaaacatttgataaatggtgtcactcaggaggtctaggaagattatttttctccttagggactgtggtatctatccgtggtacctaggctggtctgcatatgtctgagatcgattataagatgagagggtttaagctggtctataccatgcatttgtgtgtattagcagaaagaacttcttctgggtggaccaactagaaaaagyggccccttctgccattctgggtagaycaggtccctaactcaaatcatttggtccctacctcaataggtctgtaactcaaatagtctagagagactaacacataacaaaataaaaggtaatcaaatatgactaattagcactacgttatatgatataggccctaactgctcttcaaagttcagaggaaaagggggcgttccctgaggcctagatattcagagaaagctttgtagagaaaaatgagactagatgtgagtcttgaaggatggatggcatttgacagggtagaattcaatgagagaaaattacaggtggggacatggcataagcaaagactgagcaaagtacattgatgagatgtgagcaaaccagctcaactcgtagagtttctagtgggtttccaggggtacaggtggaaggggcaggtgagatctgaagaagtaggaacttaacagtgaggaagacaagattatcaccgtgagggagcaatctgggtctttgaggagaaagccctgcattgtttcagagatgttggaccaacattggaaaaggaagaccctgcagtcagaaaagaggaccactgatgacctaggaaaaaaaccccaagccctaagtcctattgcatggcttggcaactcacccctatttctctcttcatctttcccttcccatggtcaaattctctcagaccacatctgttaagggcatcctatgaagactttatagtcctcctccctgtagagttcattcgagttagtgttaataatgatgttccttttctacttgtcagaacctataaataatcctcactagctagaaaggcattcgttggagattgcattttccatcagcaaatgtactgcctaaaccacaggcctgtggatttggtgaatgcccacctgccatgtttctagcatcaaaaatgtcatgttaccttgtagtgaaaataagaggacaaactgatctggggaataatgagctctcctaaggaaatagtcacaggttcgaaatgggttggtgaaactcaggtttgcatgaactcagctgctttatttatttgagagcagtttggtttctatgttacaaccatcaataaaattaataatggggcaattatttttttctttttttattatactttaagttctagggtacatgtgcacagtatgcaggtttgttatatatgtatacatgtgccatgttggtatgctgcacctattaactcgttatttacattaggtatatctcccaatgctatccctccaccctcccccatcccacgacaggccccggtgtgtgatgttccccatcctgtgtccaagtgttctcattgttcaattcccacctgtgagtgagaacatgcagtgtttggttttttgytcttgtgatagtttgttgagaatgatggtttccagcttcatccatgtccctacaaaggacatgaactcatccttttttatggctgcatagtattccatggtgtatatgtgccacattttcttaatccagtctatcattgatggacatttgggttggttccaagtctttgctattgtgaatagtgccacagtaaacatacgtgtgcatgtgtctttatagcagcatgatttataatcctttgggtatatactcagtaacgggatggctgggtcaaatggtatttctagttctagatccttgaggaatcgccacactgtcttccacaatggttgaactagttgacagtcccaccaacagtgtaaaagtgttcctatttctccacatcctctccagcacctgttgtttcctgactttttaatgattgccattctaactggtgtgagatggtatctcattgtrgttttgatttgcatttctctgatggccagtgatratgagcattttttcatgtgtctgttggctgcataaatgtcttcttytgagaagtgtctgttcatatcctttgcccactttttgatggggttgtttgtttttttcttgtaagtttgtttgagttctttgtagattctggatattaaccctttgtcagatgagtagattgcaaaaattttctcccattctgtaggttgcctgttcactccgatgatagtttcttttgctgtgcagaagctccttcatttaattagatctaatggggcaattattaattgctaactactaacatagaaatataaatactccatgttattatagacaggcaggaagacagatgaatagagacaaatatatcacttataagtgataaaagtggtattggctttgtttttcccattttacagttcaaaatactgagacctgatgaaataatcattttgagtgggatcttacagttccagaaacaagtttcctgggccctgattcccctggccccagttgcccaacctactccatactgaatcttcttttttaattagaaaaccttttctaattattttgccatagattggttctagccgagcttgtctgctccttccgtgtctttccacctatctcctgactttccattttttactggtatccaggatctgagcagtctcaggataggtgtgagtttggtaccagatatttattttttcccttgtaaaccttgatgtctcagttctttcctctgtagagaagtccctggtcacttgggcatctctttaaagggcatattacttaaacagaggtgaattgtgccttcctgtgctacacaccgaaagcttgattacttctcacctctgtcactgctctctgagtacttggttccttcagaatctacttcttacatgtttaggtaaagctgagagccccaagggtttctgggtagttttattgcatttgaaatactttgtaatgggttgcaatctactcttggttaatgaagtggattcttatggagatcatcatcttgccatttgagattatagtagagttaatagtgtgtgcaytgtatatttaaatgaaatcatccatctaggaagagtttagcaattctcagctaaaaagcccagaacacataaattcattcatccactcattcattgattcatttaagatggagtctcactctgttgcccaggctggagagcagtggcttgatcttggctcactgcaatctctgcctcccactttcaagagattctcctgcctcagcctcctgagtaactgggattataggcacccgccaccacgcccagctaatttttgaatttttagtagagatggggtttcaccgtgttggccaggctggtctcgaactcctgacctcaagtgatctgcctgcctcggcctcccaaagtgctgggattacaggcctggccaccacaacacatttaatacagggtaccaatctagggaaagaagaaaggaagacattattactgcattttaccatccatatggcaaaggtactagaagytaggttggtttgaacaaatgctagatatttaacagcaagtctgatcctagaaatactattatttaggccaaattagtttttagagcaacctgcatttcctatagtttttctcccaactttgcatctcaccttcatacccctctacctgtaaaaaaaaaaaaaaataatgtaagacaaattaattagcacacaggcattagacctgtttgtactcttccagaaggaatgtttgccttctctaaaaagatgagtactccagttactccaaagtttgaacaraagaagycaacccccccaaagaataaatattctattctttcmtgcacatagttaaacaagaggcaaagctactctctactgttacctgtcagaataatagttattttaagatgaagggaggcagtcatggtccagagggccactttgtgtgttatactttatatattacactttgtatactttaattttttaaagtttaggaaaaatatatatgttacattgttggaagtaggctatgattgacttacagaaataattctccaataactaagtgtgcctaactcctaaccccctgctttaccattctacatgatgactgtcttttccacagactaccctgtttttaatttttttaattaagggggaaaaagacataagaaagagtaaatctataccacatctcaccttgttctttttctagatccatccctgaaattgccttcttttccaaaaacctggattaattacatgctatcgtcacaggaggacagatagtaatatctgcctcaggagggactcacagtaattctcagtaatgatttttaacttgacctcattggtagcattcactcttccagtcaattggagaaaaaaaaattttcttaaggaaggaaagatgaagggagggagggaagggagggaaggatgaagggagggaagggagagagggagggaggtcaggggaggtggtacctttagctaaaactttcctgaaactattcagaggaggaagctgctgaccccacctgggagggactgcagcactgaccggctacaggactgtgccatctgctggccgggcagcaggaggagcatcctcaccttcctaaccccgtgggagaggaattttttgttgttttgtcttgttttgtttttgttttcatttttttcatatattacatttgtgtatatttrtgggatacagctatagttttctttggtggacttttttaaaattagtaattctgttcttttgtatcacaataaattattacctaaaaatacttttaataaaaatactacaaggacgtggtaagaaaagaattatgagatcaccactccattttttgtgcctttgtcatgtaaatggagcttaaatacagtatgtggtttttcaatagacttgtaattttaaattaaaatgctcacaatgcatctcaatggaaatgtcttttaggtttcttatctacttcctgaaataactaactgaatttctaacattccttgaatgaacacaagagctgctttgtacctcatttaaattgcatagcacacagcctgtttttcttttgaatgactaactatataatagagatcactcagactgtatttcctcttgttttgactcagctgcagcattgcttttatgtccaaaaatgtccatgttattttatagatggtcatataaaaaatgaagatggaaaaacccttaatgtgtttggattttatatgctttttattgcctggaatttcctttaatgacaactagcaaaacccaaaagacagaatgagaactaactagctcatatcaacagggtgattgaaatggaaaaaataaagactttgcatttttagttattgttgtcacagggaattatagtgtgtagccacaagattttccactttgagtctctgctatgaaaggcatactgacaatcccattgtaggtttaattttgtcttactatctggctgttgtattcaccagctccacaaaacartgattttttwaaatctgccatgcgtgtattaagaaattaaaacacaaaaccaaatagcytctgaatttgtaacaactgtttatgctccttttcctggcagcagttgcctcatctgacratattcccagagctgtatgccaacaaggctagggtggccaaaataaaatgttttggcataataagccaataaataatttgaagctatgacaccaaaacagccatgctgaattttagcattagtcccaaggcaggaagaagtcaaaattggccaagtaggagaaagggaataatgtgcttttttttccttttgggctttcaagaaaatgtcaaagggaaaaaggaataaattatatttaaaagtgctgttcatcctgtccagtatatactagaccatcaaaaagtattaaactgactctataggataytgtaggggtaatcatctgttggatggttggccacatagccttataaggggcctttcaacccaagactctaacttctgaaagaaaaagtctataagtgaccttaaattagtggttcctagtgagagtggtttaaaggcatctgagtagctttctgaaaacatactaccctgggtttatctcagaaaattctgatattctgggtctggaatggaacccaggcatctgcattttttaaaagctctgcaggtgattctaatgcacaggccaaggttgagagccactgctttcaaggatatctgcaacttccaaaagtgcccagcttacaatcccgaataatgtgcacctgaagaagccaacgtttttgtcatacaggtgcaaaataacatatcccgattacattagcagtaaaagtaaagaaagtattcaaattaargccatagaaaactagaaacttcttaggtttttcctgcccagaattaaacattgtataaacttgaaatataatacctaactgggtaataatttggatgccatgatttaatccatttgacatgctaaaattcctcattaaaatattccaagttaccaaaatcwctaatgttatcattttctgagaacaggaagcttgcatttgactcatattcccatacctcctcctcacacacacacacacacacacacacactcatagaaaaacctaacaacaggacctgatcttactgtgtgaagatatatgccaaaaagggggaaaaaagttaaacttcacactattactgatattagagaataccttactttttaaaataataatcatatgttgattctactaaagaagcataattgcctacagggccaaaatgcccatgaggacaaagcagagaacttagaatccatttcatggattgtcattcttgctctgcctccagctctccctatgtgacccctatctcctatactcgttctcttcttgaaaaaacaaagttgaattagcctcagtaggaatcgagagtgttgttccttcccattggaaattttataacagccagtcaaggtgaaatgcygtgtcttaaacctaggatggagcaaacaactacttggcaaaaagtagcaaccatataattataaagcactagtggtaaggatcacttcagagtgggctcactgtagaatcttaatgtgatattgtcctttcagtgcctgtaagtgatggaacatctggggtttttttttgtttttgtttttctctttgtttttgtttttgagacagagtctcgctctgtcacccaggctggagtgcagtggcgtgatctcggctctctgcaagctccacctcccgggttcacgccattcttctgcctcagcctcccgagtagctgggactacaggcacccgccacctccccggctgattttttgtatttttagtagagacggggttttaccgtgttagccaggatggtctcaatctcctgacctcgtgatccaccgcctcggcctcccaaagtgctgggattacaggcgtgagccacctcgcccagccggaacatctttatatctgtttgtgcttagcaatgtttttatgcctgtttgaggaaaaccacagaaagattccaacttcattccattttcttagaagaagctttaattacatatataactattcagttggatatctaacaaacatgattttctaattcatacataaaactctgataggaaaagcagctaagattttcaaaacctcttattactgtctcttctgcaaaaagacttttaaaacagcaattgaaaagacatcacagtggtaagatttactgagcagcaactattaatatatgaaagatactatcccaagcacagggatactgagtcggatgagaaatgatctctgcatgatctctgccttcaaggctgctcccatttagctggagaaacaagagagaacattaaaagataaaaactgtcaccgtgcaacacaacataagtggctaataaatggttcagggtcctaggaaaggtggtaggagttctggagagggattgatcaaccagaagcaggactcaaagtctgagtgcacctgaatgaacgtcaggcatagctggcacagaagagtggtggttattacaaacaggacagcctggggaagtgtcagtagtaccatcaagagacaatggctggaatgggggctggatgcagggaaacagagagagaggtgaaagatacaagttggggctgcttcaaattatcttggccaatgaaatcggggtttccttatctgtgggctgtgggggacaacacagatttttttttttagcagaggagtagaagctgaaggtgttttttcagaaagatctgtctggcacggttcccataatgatttaacagggataaggattaggagtaataaaactagctgatgccattgcacagcacagtctatgaataaatgagtggaggatctggactaggaaagtagctgtgaaagtggaaagggcagtgcagaaagtgaggcccacttagagaagtaacagaacatcgtgactgatggactttaaagggagaaaaagggaccagatcaacactttggaagataattacagaactcctgttctgtgcccctggggacaatgatgaacaaaatgacttcagaaataactaccacaatggcgtgcctttggtagaatttttggaaaagagtttaaactctccctgtcaccatgaattcagcattcctcatccacaaaggaacaraccatcaaaaattggtgggcaaatgttgctggatttcactgacctagattcacattttaggaatagagcagtactcagatatgacagcagctctggtaggcatccgatgcctaagcttgcaagacactaacggggttggcttccatttcagtttccattggcagcagtggaatcagtgctcactcaagtctggagtctctgtcctttacccttttccatttattttcatctgttactctctctcaaggcccaccaaaaaaatcatcttaaaaacatttgcatgccttccatctctagcagtgttagattgtttattggctgaattgatttggcaaaagatttwaaaaaaaaggatgatttctgtctcatgggctgagatcgtacatcacagcatgacctatgtgatagtctcagccatgccaacaccagtaccttcggtcttgaagggattaggaaacgttgtcagttgagctggaaggaggagggttttgagttttgggttactgtttctctgtggaaatcacatgtattaaatgccrtaggtgttgataagtatcctattgcttggctgaaggttaataaagcatagggtgaaacatagacactaaattagaagtgacattttgaccatgaattattctgcagcctcyggggaaaacttccccactacatgacacaatactagaatttggatcatccttagaaatactgacatgcaaaagaaacacattaaattttctaccaccctcctgcaaaaccatcccactaccattgccctgctcttaatcacttactatttttccttgttttcatctttcaaaatgttgtatttgtccaataatctttaagaatatttctaaatctcattttctcagctatggttctgttgctgctgttgggtccccatattactcatcacactatctgtttgcaaatgttaaaggtagctttggagatagattacaacagccattccctttatctcttcccgaagtgggaccaagtttaaacctgtgaccacatactsagaggtgactcatcgttatagggttccaaaaacaacaacaatgaaaarcaattaggagctaaatgaaaagygctgaatctattagagtttttgtatgttttctaatcacttatttcttttttacccacaccctggcaaacgataagaactccataaagttcggctactaccagtcatattatcagtagcagtaacaatacctgttaggtgtgaagatcatatatatatatattwtttttttttttttttgagacggagtcttgctctgtctcccaggctggagtacaatggcacgatcttagctcacggcaacctccgcctcccaggttcaagcaattctccttcttcagcctcctgagtagctgggattacagacatatacaaccacgcccagctaatttttgtattttttttttttttagtagagatggggtttaccatgttggccaggctgttcttgaactcctgacctcaaatgatcccccatctctgcctcccaaagtgctggaattacaggcatgagccatcacacccagccagatcatattaatttgaatagtgtaagttagtggtcctcaaactttaatgtacccaagaatcacacacagtacacacttaaaatgtacatcccattcctggggttcaccgctagaaattctgattcagcaagactgggaaccatggcgtgattctgatgcaggtaatccatacgctgtgagaacactggctgygtctggagttcaccagatgtcagttcctacatgaaggcagggagagaaaatctattcctaaagtaaattgttatgtccttgaacagaaaatgtcacctaaaatcattcagaataatgtcatattgagtaaaatacctggcactttagagaaatagctctcayatgaaggaaaatcaagcataactcccctagattactgaaatacaagtgcttatgaaatgctaacttttctctaaaatgctgtctttttagaaagaaatgcctacagaatgaaagattttcatttatcacattttccatatagtgcctttctctgttgataacatatgtatattaaaatacaatgtatctgcagtgagtttttattatgctcattctcattaggcacacagtccctcagacatagagaaaagtctgccttccttcccagctaagaagtcctgtggtatgatactaaatacatgatactaaattctacaagaaggaatagtggcaagaggaaggaaacccagatctctgtttgggggagaagtttgtctggtcccatccctgaagcttgttagagagaatttgagaaagatctctggagagcaaccaaagctgatgaaagatggaagttcrgtgactggtgtggattgcacagaaggataatgcaaaagtgtggactggcagctcttttctcttcattgaaggcaggctctgagtgagtgtgtcttttaaaggaaattgcatcaggagactttaggagggttttcagagttattaaaatggatagactatggaggaaaggggactttaactttttgaaaaaattaattttattggccgggtgtggtggctcatgccaggactttgggaggccaaggcgggtggatcacgaggtcaggagtttgagaccagcctggccaatatggtgaaaccccatctttactaaaaatacaaaaattagctggtcatggtggtgtgtgcctgtagtcccagctactcgggaggctgaggcaggagaattgcttgaacccaggaggcagaagttgcagtgagccaagatagtgccactgcactccagcctgggtgacagagtgagactacatctcaaaaaaaaaaaaaaattagttttattgtgacataatttccttacaataaaattacagttttaaatggataattcaatgagttttgacaagtgtatgcagttaagtccaacagaactttaacttttcatatttgaattttttacgagatgcacttgtaatagtgtgataatttaaaaacatgtttttagaagaactgtttgacattgtataatcacacctcacctcataaaagcagcttacaaagacacctaagtacagcaaaataacataactaaaaatagaagggaaagatgatataaaacaagaaacaagaatgaggattttaattggagctgagttagagaatacacaccatctattaatcatatggtttttgtccttcattctgttgatgcaatatatcatgtttattaatttatgtatgttgaaccatcccttgcatccttgcacctttgggataaatcccacttgatcatggtgtaatatctttttgatttgctgttggattttgtttgctagtattttgttgaggagttttgtgtctatattcatcagggatattgacctgtagttttttttgttgtgtccttgtctagttttggtatcagggtaatcccggcctcatgaaatgagttaggaagaattccctcctcttatttggatccattctcttttcttcttggttagtctagcagtttatcaattttctttattttttcaaaaaaaaacttttagtttcattgatccttagtattattttttaactctatttcatttaattctgttttgatctttattatttctttccttctactagttttgtgtttggttcttgcttttctagttccttgaggtgcaacattaggttgtttttttgaaatctttctacttttttaatgttggcatttgttggtataaatttcccttgtaacaatgctttttctttatcccacaggttttggtaagttgtttccattttcacttgtttctggaatttttttttctttctttcttaatttcttcattgaccttgtagtcattcaggagcatgttgtttaatttccatgtatttgtagttttcaacatttctcttattgctgatttcttgttttattccattatggtctatgaagagaattgtcatgattttgattttttaatatttgttgatacttgtttggggcctaattttgattttttaacatttgttgatacttgtttggggcctaatatctatcctgaagaatgttcttgatgtgctaataagaagaatgtgtattstgcagctattggatgaaatgttccatatatttttggtacatttggtctaaagtgcagtttaaatctaacgtgtctttgttcactttctgtcttttgctgagagtggagtgttgaagtccctagctattattgtattggagtctgtctctccctttagatctaatgacatttgttttttattttattttattttattttattttattttattttattttatttcattttagagacagggtctcactttgtcacccaggctggagtacagtgatacaatcttggtgcactgcaacctctgcctcccaggcttaagccatcctcccacctcagccttccaagcagctgaaactacaagcatgcaccaccatgcccagctaatttttgtattttttatagagacagggtttcaccatgttgcctaggctggtcttgaactactgagctcaagtgatccacccacctcaacctcccaaagtgctggctgggattacagatgtgagccaccatgcccagccaacatttgctttttatatctgggtgcttcagtgttgggtgcatatgtatttagaactgttatattctcttgcttaattgatccatttatcattacataataaccttctttgtttctttttactgtttttcattaaaaatctgttttatctgatataaatatatctactcctgcttgcttttggtttgtgtggaatattttttctgtccctttactttcagcccatatttgtctttttataggtgaagtgagtttcactaggcagcatatagttaggtcatgggttttaaaaaaatattttttaataaccttcattactttggataggtcacaggttttttaatccactcagccactctatatctttaagttaaaaatttaagccatttacattcaaggttattattgatatgtgaggacttattcctgttatttagtggttttctggatgttttatatatcctttgttcttttctttctctcttactgtttatcattgtggtttggtggttttctgtagtggtaacatctgaatgctttctcttcctcattcgtgtgtttgctcttccagtaagttttatacttttgtgtgttttcatgatggaaggtattgttctttcacttccaggcgtaggacttcctcaagcatttcttggagggctggtctcttggtgatgaattccctcagtttttggttgtttgggaaactctgaatttgtccttcatttatgaaggataattttactggatggatatagtacccttaattggcagtttttttctttcagcactttgaatatatcatcccattttcttctggactgtaaagtttcagattagaaatgtgctgttagtctgatggagacttctttgtgtctagatgctatagtaatccattctcactgctataaagaactacctgagagtaggtagtttataaagaaaagaggtttaattgactcacaattctgcmggttgtacaagaggcatggctgggaggcctcaggaaacctaatcatggtggaagggtaaggaagcaccttgcttcacaaggagcaagaggaaaagagagtgaagggggaaatgccacacacttttaaaccatcagatcttgtgagaaatcactatcatgagaacagtaagggggaaatctgcccccatgaccaatcatctccctccgggtcmctcccccaacattgggaattacaattcaacatgagatttgggtggggacacagagccaaaccatatcagatgtttttctcttgctgtttytagaattatttgtctttgactttttacactgtattagtccgttttcatactgctttaaagaactgtctaagactgggtaatttataaaggaaagaggtttaattgacttacagtcctgaaaggctggggaggcctcaggaaacttagaatcatggtggaaggcaaaggggaagcaaagcaccttcttcacaaggcagcaggaaggagaatgaatgcaggaggaactaccaaacacttatcaaaccatcagatctcatgagaactcactcactatcatgagaacagcatgtgcggaaccgtccccgtgatccaattacttccctctggtctctccctagacacctgggggttatggggattataattcacgatgagaattgggtggggacataaagactatattagactgtttgattataatatgctggggaaaagatttttttggggttgtatctattttggaatctttgagcttcctgtttctaaatctcttgctagacttagggagttttaaggtattattttgttaaattgtttttctatgccattaaacttctctcaccctttggaacacccaaaattcaaatattttgttgctttatggtggcccataggtcacattggctttcttctttcttgtttttttttcttctttttaaagttctgaaattcttcttgatttagtatcctgttgaagttctcattgcattttttatttcattcattgaattcttcagtttcaggatttctctttggttcttttttatatgtctatctccttggtgaatttctcattcataycctgagttgtttttttaatttctttttattgtttatctgtgttctcttctatatcatggaacttccttaatgttgttattttgaattctttttcaggcacttcataaatttagtttttattggaatctgtctctggagaattattatgttcctttggaagtgtcatatttccttgcttttttgtatttctgtgtcctttcattgatatctgtgcatctggtgtaacagtcacttcctccaattttttagattggttttcataggggaagacattttcctgtagatagatctatggtgttggttggttagggtacttttcttttattctgggcatatatrgtggtgyagtctccataggatttctttggctatacaccatcagtggtgtctgtgatttcctcagtggcgtaggctgcmgttgttagtrgagattatgctgaggttttcctggggataggacgccaggtgggccagtcctcaggccctgctgttggcagcggcagaccaagcatgcctrttcttgggtcccggggtggcatatgtgggcgccagtgttagcaagtccagacgggctgattttggggcctccaggcagctttcttgggtgctggttatggcagcagtgtgccagatgactggatgagtcctcaggctccccatgggcactcactgatattagcggtggctgcaatgggctgggcagcccagtccccaatcctccaggtagtgcatgcagaagattgccagcagtggtggtggtggcaggctgggcaggcctattctcaagttccaggagkaytgcccagatgccagctgttgtagacaaggtgaggcaatcccccagcctccagacagcatgcttgggtttcagcagtaggttttctggtcctgttaggccccctgatggcatgcatatgcacctgggtcaaccaatggggaggggcaatccctaggcccccaggcartgtgcttgggcactgatggaggacaggggtggtgccaggccaggcaggcctattctcaggccccccatggggcccatgggcccaggctgtggtgaacaaggcagagcaatttccaagccccagacggtttgctcaggtggctatgacaatggtggcagcctgacctcaggacacatgctagtgtgaagcagcccttctactgtgggaacagggttttatttcattgacagtggccccaggaartcaggtttcatgctctgggaaacacatgcttcagctycctttgtcccaggatcaccctccccagtgtgcagtacaatgtgtgggmtagagttctggagaccctgccactctactgtgtccaacctgcattgcaccctgcagccctctgttagtggggctccagggatgtgaagatacaggggttgctgggtcccagggcacaatgcagtctggtgggaaatgggctttctaactggctctctatctgtccagaactaagtgggtacatgggacccgagtgggctccatctctggagcaatgctgccacacggaccccgggaataccagtttcagggtccttggggtttgagagactcttatgactaggatttcagcagtcaacatgggaacatgtaccactgggaatctctcacttaccctttcctctcactagggaccctctctgggctcccagctgattccagccaggctgtctaccttgcctccctctccttcagtatctcaggtgttttctgtcacttctctgctgaattccagcattctctcttagatgtctattcaaagtatgattatctacttgctattttggctcttctttgctggggaaacaggtgtccagtacctctagtcagtcatcttaaagcccctctcaggcagtgttcattttgaactagtctgtggaaagactataaaacatgaaaatatgctatcagttttagaatgttatccatagctatattggctcagccttaaaaagacctccagggcttgatgcyggtatgttgtcaggctctcaatacactcttgatggatggataaataaataaatgattttagatatgcagtagcaatgaagagtgtacttgggcatcatatattgtatcaatagaccatagtcagttgtttttaatactggtttagctttgatatgttaagatgggtacattatgwtatatatatatatatatatacatatayatacatatatgaatataaagatcaattatgagtgacccaaaaatgtgctttgaatattccctaaacatctctaactaccttttatatacctttgcttcagagtttgaccaataagttctaaattgttccatgaaacaacatagcccaggattttttaaaacataattaccattatacaaagaaagcatgagtaagaagcaagagaatggagtgggctttcagtcgtttggatgagaaaattcccagaaatgttgggaactgccggaaatgcctggttgttaatgcaacttgccatgcagattctcttgggctgaaagccagacagttcccactctattttgtgacagctccaccctggggaacaaggccaattcctccaaccagcagctgcataacagaccatgacagtgtggccacaatgattctcagagctatttcctccctacagctgcgtgccttcttcgttaaggagttgcctatgataaaagtgaggttgactgtctttttactgctagcatactcttcatgtgcttgtcctgccttaaatgatagmttttcatctccygaaggcatctctttccctttcccacctcacactgccattgtgctgagcccgaagggggcgtaccataaaagattgttgaacagagctgaccaccaattgatctaatccccataataaycaytcaaattagtttccataaagtggaatcattcctttggcaaaattcagaaagggcattcggaacagcaacttgacttctcagatctttcccccaaatcctgtagaactcatttgtatcattcagagttgagtctggggcctctcaggatatcaagtaatctgctcttagggaaaggaatttgtggtgacgtgtggagggtttaggtgtgtctcctttccattctggcttgagacacagtgagaagcaggaagtacagtccctggggttggaaaaacactacatacagcactggagcagtaccacctcctccatgcttttttaggaaaaaatgttggaacagaactaaacggcccaacagctgcattctcgggatatttgaaatggtgctcatcttttaacaaagcctctgtgcatccacaaaggggaaacagaacctgttccttggcctcactgttgctcagtcctcaggagcytgagctctttgaggtgataccctaccagacaggatgtgttaacacatcctcacagtgcccattagggtgtaaaaagggaaagatgttcaagagcaacacagccttcctgcatctttctctgcatgttccctgctgaatggccagcaccctgtcttgtgtacatacatgtgtctcctaaacccagctacaaataaatggtaagcttattcagacaataacaacatacaagagaaaggaaaataattactccaacaggaaaggagaaatctgttctttgcctcgaaagacaaaatctctttgtgtttataataagcacctttagcattttcaagggggaaaagcatatttcttgtttgttatctacagttaccacttcatacatcccttttatttagaaaggctacacctgacataacttttgtaatttttttcagttaagcagaactactcactgctccaaatggggcctgttcattattaaaagtcatttctttgggcatattcttaaatctgtcttaaaatgataaccgtggagtcttgataaattaattgaaaagcttctcctaaggtagctttgttggggttttgttaagacatttattttaagagtaactctcagtagaatttatcaatgaattacttcatatattctcagcattaaattatttccccactaaagatattataattcytttcctcccagtaatgaaaaattgaaactgtcctcaaataattctaaagtaggtactggcctttatgttagtaagtataggaatgtccccaccagaagctttaaatgataaaaaataaggctcagaaaaggaagaagcattaaagartgaagagtgattacaatttcaaatacatgccagtaactgaagaacaattcaaataggaaccaagtaggggagaggattgttcactcaaggaggtgaggttgggggatagggcagagcatggaaacagctgaagtcaactggacaggccctgtcacttcagtgacacgtggtrctttctgagatgggcacaaccttggagattttagtttgtttcctcactggtaaacaagaagtcagcactgataacaatccctgagaacacttcctctggaatgtatgacattccatgcttytgctttgtagtcacctccggacatgcatgagtcacactgagaggtggggaatttgcccagaccgctagatccagtgaataaagtcaggcctaagagatgtagtcttgccatgtttctttctctttcaattcatctggtactaagagacatgggtgatttatttatctgtgggtaaagagtacaatgaagcttctgcagatcacaaattaaaatggaaagccaactggcagttatctggtgattatgagtggtgggagcacttagcctgaatgtgtgggccaaaatatgccacacacagttttcccaattgcttagaaaagtaagtcaatgtgagtaatagattttctagattttgttttgtttgtgtctaggttgaccaggtagcagtggttgtgtatacatgttstaaggatctctctgaggtcctcaaaccactggggtcctacttagtaaacctctggctcagagaactgcctccccagttgtctggaagaaattctgaacttcttgggtaaactaggtccaattcatgtgacaggatgaccgtccagttctgactgcaaacatgagcagactggccatcttggtccaccctcaacagcacataataaacagagatttagacatagtggaatcccattccctgcacctggaaaaaagcacgtttgtgagactgaccaaaagctattgtctagaagtttcacaaatcctaactgccaccttgcatatcgaggcagccccactctactatgaagaagtcaatctgcccattgggtttatggactattttactaaattggggtcacaacctgacagaggcttatgtgttcggtttgatatacacaaaagtttttcttttctttctttctgtgaatgcccttaggtgccacatactctgcaggtaattccagatccaaccccctgttgtcttactttgtcatccagagtcatttgagttaggaccacagagtatagtgcccttctgtatggctttgaaaaacagacaaaccttggcctygttgattttagccatgttttttcacattaaaaataatgagttgtatttctgtttytggacatagaccataccttgtttctctgagggaattcaattgtttacccatgtgattgaccacacagttcatcacagtgccctcctgaggttctctgtagcgtttaaaaaggtgaaaggaatgaagaaatgaaccagttagtgcaaacatattttggtcacctgctatatktcaagtgacttgcaagaaacaaagagggaagtgaaccgacttttattacacatttaatatctgctagaagcttgtgctaagcattttatgtacattatctgttttggggttttttttaaawaatcttcagagttaccctgtggaggataggtatagcattcccatcccattttactgctgagggaattgaggctcacagggcatatgtgactttcccaaagtcacacaattagtgtgtggctgagcaaggcttcagacccagacctttctgactctgaagcccatgctctgtccacctcattatgcctggacctgcattcaaggaggtagcagtctggttgaagagagcaaaactgcacaaaaactcatagtaaaatttgtccttattccaaaaactttgggaactttgtagcaattatctctctaggggatctaggtagaagggatgctaagcctgcaacactactagttacatgttaacgtaggccttagaaagaaggaagctgaagaagtaattgtgagaatatggtaggtctagtcttttatggtttttaagactaaggattagactccaagacagattatctgtggctcaggctggagtgcagtggcactatctcggctggtggcaacctctatgatcttcccacctcagcctcctgaggaggtgactacaggtgtgtgccaccacacccagctaatttttttgtagagacagggtttcgccatgttgcccaggctggtctcaaactcccgggctcaggcggtcttcatttgttcccttgcacacaataataaatggaagctgctattattgtgttttggaagcagccaaaaagaaaatctgcataagaagaactaaattgcaattcgtaacaaaagagctacttgggtctgtttttttattctctcaagcgtcttcatattatttctgggcatatccattttataaagagggctaaattgaatatgttgttaattttcttagaaaagttaatctttaggagtgtctttaacttcttaattgcccacatgttggattagatctaaggtttctaatcagggctgtaaagaaagacccactccataggtgagcccctctatgggcctatcccttcaagaacaatttaaattcaaaagtgcaagagagatgtccagttaagtcctttacctataccagacggtagcarrtcataacaggattacatacaagaaaagaattaatggtactgccagagaatgaataataagtatcaagtgaatgtgaaaaagtaggtgttatgtagtttgtaggaggtagtttcctgctgcagaagttgagaaagagcaaagtgagatgattaagaaacgttttgagttgcacagatctgggtttgaatctacctatgtgacctaaagcaagttatttgacctctctcagtgcagtttcttcatctgtaaaatagaagtttgagattagataataaatgtaaaatgtttggcatggtgccctgctagttcttattgtaatataattayctatttttctgtcagtttcctccactaaactgtaatcttggaaaactgggtctgtgacctgttcatctgtatgtctcagcctttcatacagtgcataagctcatccccattcctgatgtttcattccatgtgaagggtattccattatgggattgctcttggcctctctccacccttgacatattccacactagaagtgaatgatttacctgactggtgagtcaggaagggcttactatgtgccactcttaggaatgaattttctacaggaagcatgctgtctctcttctgcttttcataccataaatcttactatccagtgcccccatgactgagtgggcatgtctgcctagtaatatgaagcacatttccatacaaacactgaaaagtaaaagtaratgggaccataaaggtagattagaaccagattgtggaaaagatcatgttataccttcctagcatgatatttcagcagattccttaaaactgtatggatattgataaagagtagaaagagtctacatgactaaaccccaaataatatttgtttttgtgggtttttaatttggatattcttgttgttagggggaggagtgttgttttttgatagttttgattatgttgaggaggtaaggatgaggtatcaatattttaaattttgtgcagagttcatttttgtgttgtttttaaagttattttatgctaggatactaataagttcatcatttgaagaacagacctgccaagtaggtttttttttttttctctccagttgtggtccagggaacctctgcctcaraattatctgtagggcttcaaaatgcaaaattcctatgcctcacccaaaatctgccaaaccagctttccctaagggtgaggcctgggaatatgatkttcttattctccccaggtggcttttatgctcattgtattaaggccatcacctgccaatgaacaggtgaattcagtttaaaagtatgtggaagagcaaagcgtgtgtgtgtgcgcgcgcgcgcgcacgcacgtgcatgcacacacgtgtggtgttactgattaatcagattcacattattgactattctgattactggtatggcccttctttcctatagaggaggcagccctgcttactcagccaaagatatcaaaacccctgctgggccttacatgtggccattttgcatcttactgataagtcttacgaacaaagactagaaaaataatagacggttttaaaaccttaaaagaaaagagagacaaacacatacttttaaagagcaacaaaaacccttgcaattcttccaaagactcatagcttaatcaagttttccttttctggttctaagtgactggaggtaatagatgggaatttgaacagaggaacagcctaaagtgtcagttccaagcttgtatcctaccacaytgccttccttctgtttgaaagtgtggggagttactcttcttaggcctgctttgtttctctttatagatcatgcaacagatgagtgaccaccgctacgacaaactcactgtgcctgatgacatagcagcaaactgtatatatctaaatatccccaacaaagggcacgtcttgctgcaccgaaccccggaagagtatccagaaagtgcaaaggtaaaaaaatatcccttctgaccactgcagctgggtcagcctccctggggattttttcataaaggagtgaccaataggagcctccttttcctgtatacatatcaaacaattaagaaaagaaaggataatacaatttagggcacaaggaaaatgtgtttcacttttctcattcatgtcattgctcactaatgcatgcatagtaattgagatgatcatgccgggtattcaaggcttttcaaataaatactcagattttcaaataagtagtcacccaagtctatgccccagctctgattaaatgtactttcccaccctcagatactcattaagcataaagacctacaattagatggtcaacggtatcrctgttttctgacagatctgagctgtccctcagaaaagggcagcttttctttttatttctttttatttttattattttattattattattattattattattatttttgagacagggtctcactctgttacccaggctggagtgctgyggcacgatcttggctcactgcaaccccacctcccgggctcaagagatcctcccacctcagcctcctgagtagctgggactacatgcatataccaccacaacctggctaatttttgtatttttaatagagatggggtttcattatattgcccaggccggtatcaaattcgtgagctcaagcagtctgcccgcctgggcctcctaaagtgctggaatgacaggcatgagccaccatgcccagtccttttttttttttttttttgagacaggatcttgctctgttgccaagtctggagtgcagtggcataatcatgtctcactgcagcctcaaattcctgggctgagcaatcctcctacctcagcctcccgagtagctgggactacaagcatgcaccattatacctggctaattttttattttttgtagagacggggtctccttatgttgcccaagctagtctcaaactcctgggcttaaaggatcctcccacttcagcctcccaaagtgcacaggcatgagccaccacacctggccatttgtttctttaggtagaggagtatgaatgacccagagtggtgggtgttcattgtcagggctgcagaaagaagaaactgcccgtgctaggtagcaaaaagctcttcattgaaaagatagagcaggtagtaatatggtacactcgaaatcagccaactggtcgctccaggagtctctgtgtttgtgttccaataagggagctctctctggatctggaatgcttttcctggtctaagaaaatctcccttgtttttcagcatactctgccagtctcatctatatactttagtaatttcgattttaccctaccaagcaaacataacagtgctcgtccatagattcttcaagtgtccatatcttctaggcactcagcatctcatctctgcccggaggaacaagatatttatactatgcattacagaagagcctttagtaatcattgatcttttttttttgtcttaagcttcgcaaatattagaaaatattttatactaccttttaaatatgcaatatgatataattactaggttcactctctaatcacagcctcttyctgagcagataaaaagaaaaaggtgagggaatacatagataattttttctatttccatggctgaaagtgtgaacctgaggaaaatagagtactcctgacccagaactggggcttacccagctcttagatgagtaatggatctcatactttaatgcacatcagggttgctaaaaatgcaagttcctggacccccaccctagaatctgcaatatcaacaagcacccagtcacagaactcactttgagaaatacaggtctgaatcattcatccctctttagccacattgatcatctgacctaccagatgattattcactgcccccctgattcagccgtktgtctctcaaaaataacaatagtattaataatatccctgtttactgagggcttccccggtgccaggcagggtgccaggcatcccaggtgtattatcttattcagtccttgtaacagccctatgggggcaacattactattccaatattacagagaagtaaaccgaggctcagagggaatgtcacttcactgaaataattctttaagtagtaggttgacagaactgggtttgggaccctactctggctccaacactcttaattaaccactgtgctgaattttaagaaacgcagtgcttcctaaagaagcacaggagattgttattaggcagtacactttcaagtgattctgtttttaaaaatatgctttgtttgatcatcacagaacaatctatgaactgttaattgaagttttgacatatgctttctattagtgtcaraagatgctaataaaattcatacctgtaatttaaaagcagtttaacctgaaatacttaagttatatcttgtcaaatttttccagcrgtgttggtaagaaaataaacctaaagtatagttgagagggttttaaactgtgaagagaaggcctagtgtggtggcttatgcctgtttaataccagcactttggaaggccaaggcaggatgatcacttgagcccaggaacccaagaccagccctggcaaaatagtgagaccctgtctccacagaaaataaaaaataaaaattagccagggatagtggtgtgtatctgttgtttgtcccaggtacttaggaggctgaggtgggaggatcacttgagcctgggaagtygaggctgcagtgagccatggtcgcgccactgtacaccaacctggacgacagagcaagaccctgtctccaaaaatatataaataaataaaaataaagtgtgaagagaaagtaatattcagactgacacatggtcaccaacttccatgtaccacttaatctagcaatgacaatggcagagtaaaggcatctctagcaaaaccacatttctgacacatctttggccttgaggttaaagcacagggctagtggttaaccagttcccaccagctctatagggatgactgtgggcatgtgtgtggttgagactgcctgtgtgtcttgggattaaatgaatgaaaagcctagatntacraatcaawttgattctccacwtctgaggatggtaaaacataatccttcttttcttccttttccttgattcccactgtaggtttatgagaaactgaaggaccatatgctgatccccgtgagcatgtctgaactggaaaaggtggatgggctgctcacctgctgctcagttttaattaacaagaaagtagactcctgagctgcagagtccccccsggtwgccggcaagaccgcacaggcaaggccgatgactctgtgcccactcctgttgttttccttgacaatctactgtgccactgtgctactaactcttgtttacaaaatttgattctaagttgaattgcttcattcaacacycccaccctccctcccctcgmggtggtacctaagctgtggatttgctaaatgaattaagcaacctagaagatacagagctaatgaattatcaaaatgtgattaatcccagtaaggaaacactcatttagtgtctgtatttttggtgtgaaaattatttagttgccagtatattctgaagaatgtcttcttgatcagtcagataarcttgctttttttttttttttttttcatgaatcatgtttggttcctgtgaaagtccctggtccagggatcctcctcctttctcttttacttctgaattctgaaattcagttagttacttttgcctttcgctcttctatcacagccaccttgaccttgggtaaaacccaaggtctttccttctggctaccttcctgcaggtccaccctgtctgccattggtctcctctgcctctgactacatctgccaccaacaaccctcccctcacccctgccaggggcagacaggcttctcagcagaactgtgactgaaatcagagctgctgtctggggcagtgttaactacacagaggcacatcctgacagggtttgccccagagatctaaattccagaaggagggcaccacacctaggaaggtaaatccagtatcagaaggttgctaaaagattaaagatcaagaagcttggaaacatcccwtgggtacaatgtcttagaaagtctttaagtcacataccatgaatttttgcttcattactgaccatatatgaccttggaggaactcttttttttttttccttctactcatttctgtttccacctaccctgactcaccgtatttccagtcttctacccctgcagttatcctagtccagcaaagtcatttctttcaaaagagacatcatgtctgaaaataattactggtagtctaatatgagccagagtaaacagctcctcatggtcaatgaacatgttcaggaagcgatcaccttgatgcttgaacccaaccccagacagtggacaattctactttgaaatatccgtgaatatttactgtgggatccaatttaaacttctttcttctctagcctttaaattacacaactttgaactgacacggatctcttacaaagaacaatgcggcactgaaggaagagatgattcctttactcaaacctgcaggaatcagcctattaacaggcaggggaaacggtactttccaatgaatggtaactgatccaggcacrttatcacacttcctagtcatctccacctttcctgtattgcctgtggcttgttgtttaagattaagaatcaaagagattaagaagtatcacttcaartcttgctctgctcacttctatgtttgcagtcaaattattccttatgttggtgacctaaagagaattactttcattcatttcatttcccccgtagcagatggaagtgagaaacctctgagaaaatgaaaacatccttaaccactatctttcccttttatttgattattttatgtcagaaatttgcaaaagtttttttctcctccttctcttccttgttgcttaactttttaattcatgccatatgcagatatccaattatgtgcatcctgtgaataaaccacgtcttggtcactgtcatattttgaaccatctcatcagagatgaataatatctttttaccagagagagaacgaatgttagccacatgcccaagttaacaaagaaaaaatgttctcaaggttgtccttttgggttaaatctggcccttccttggcaaaagcaaaaattctccctgtgagagctcaacatctcaaatacaaccacaggaaaaatggcccaatctgccagtttaggcttaccagcatataatttttaatatctttacttctrtcatcccaaatcaaagaactcttctctattatgtttaatcaattgcaagcaaatagatttttctttgtaacaatttgttctgcagaaggctgtttttcacttttcctttcttttgcttctttctgtctttccttctcttttgtctggagaaatcacttagactctgtgtgcctcttctacattgcattctgctctgctatgttacctgctaggctggcttctttggactccctatatgattgatgatgtgaaaacctaaattacttgcagcatagtattacttctttgatgttctcattagcataatgttatttttgaaaaggaaagatactatcacataagttttcctcatctgttgtgatatacaccaatggataaactaacggaaactgctttttgacattaaaagacaggagaaattatatttaactaagtaaaagttaagtcagaattacttgggtgatgtgattcaatttagttaaaggatgatatagagaaaatacattatttagcattatttcttcagctataatgaattgctatagaaatcaggcagatctttctaatgtgtattgattggtcttttcagctactctgaacagattactaaggccatctcctcatctctaagggagaaaaatagtctgtagatgaataatgtaaggtaaagagttgcatgtcagtctttgtaattatttacactttaactttctccagaactcagacatgatttcaacatggtgttagatttgtgcattttattttcctgaccacctcattccagccaatgtwtggttatccactctgtgtgccaaaaccaatcatgcctttcacggccmtttagttcagagaagttctgcactgatttttagtctcttgatgtctcaatcttacatgtataccaatcacaatggaataaagtgttgagttgtactgtgatcaacagtgtatgtctcttttctttgcaacagaaactgccatggggaatgaagtcatcatttctttgctgtcagtcatgggatattttctctcttgtcccttaggctatgaacttagaaaaataccatacctgtaaatcaattgccatcaaagcttgggttaaaataatatttgaagtgatacttcatacttcaggcacttaaaaagtgtgcatagtatgtacaccaggtcaggagagcttgagttcccctgtgcctctcctcaaaacggcgtcccttcatccctttcactgttaaccatattcagcacatagtcagttatgtggttcagttatggaggcaggtaaatgatttttttatttgctcattcatacaagagtttgtttttgttatatagtaagcatcttttagcaaatttgaaggtttttttaaatgaggcttttttcaacaagttttttcaatctgtattgttttctttcaatgattgtaaaaataactgcttactgttaaaatccaagcaacacaaaaaactaagtaaatttaaaaactaccccacaattttatcacccagagataactattattaacatttcagagaataatcacagatctgtaaatagatagcagtataaatatgcaataattttacataatcatgctgttctgtagtctgcttccttcgacttagcaatattgttggccgctttccatctcaacaaatgtagatctacatcatcagttttaacagccctgaatattctacaacacggttattcaagcagctcgttctaaattatacatagtgttatgtcacagatagtcaatatgcccacattgctattagccaggggtcttcagtctatcaaaaatgcaccgcttctaagctttcacccagccccagagctagttcatgtggcatatttttatcataactgaatgagctgtgtgaatgctcatcagatgcaaagaccagttctaaaattccttggggatgtcattgatttaatcacaccttctcagttggtgttgcattgattatctctgcattatttagattgtcactggcagtgatgctaaaaaatgccaaatgccaccttgcaaacctactgtgggtcccagtcggaaatggagccctccacctcagtgccagatatactgctcctccagaggagaaagggagatacttcttaaaggaagagttggcaggggttccctgactgaccttcctccccacctctgaaagaataaggggagaggaaacagaaaaataccctccgtagcaagctatagattctggaagtgggaattctgctcactgaagaatgctggtcatcaacgattttagacgagtgagcacgtgtttaacaagtgcccgtactctgccaggctctggagtacagctccgatctttccagaactgatggtttgggagaggcagggaaggacgactacacaattacacaaatgattatgatacagcagaatgtacgaactacaaaagaacaatgccgtgtctgttcccaagtcagggagaccagacataggaattggggtttaatctgggcttggaaggacagctctggcttcaataggttgagatgggactacaggttgtctaggctgagggagccgcagaagcaaaggcatggaggtgggagagcatcgtgttcacttcagaagcaagtatttgagcccctgttacatgccagttaactttgctaggccctgaggatacagtggtgacagtccctaccctcctggaatgtacatgcaacagggaagactgacattgaacaagttagggcaaggggaatgaacattattaaaggagaatggggtgcttagagcagaccatagggtcaagcaagcggatttatttggctgaaacacagggtaagtgtaagagcatggtgagacaacattggttggaacattgagggccttgcctgctgagttaggatatttggactgaaattggcagtctgccaggatcccctgaagacttttcagtcaagaagtgatattattggagcttgatctggcagcattatataggatgactgggaactgagaaagactggtgtttcgccaagcttaatttctccaagtttaatttgttatttaaatatctcttcttaccaccaaaatggagcctgaaagcctggcaattaagtctctttatattttctttcctgaagaacagattaataacaccttcccctcccaactccgaagggacattttcaaggcaaatgcgataaaagaactgaagggttctttggatgaaagagataatgtaaatatcattatcatcatcattatacttattaactccgatcacagcaagcttagatcccattaaaatgtcatcttctatttgaaacgtcaatcacctactccagaaataactcgggattttcatcacggatgcctctaagctggcctgacggcttccgtggtgaattcacaggtttccctggtagctgacatggctgtgccacagacatacttgcattaggaaactgttggctaatcggaatgttccctgtctcccttccccctccaaaccctcatttctaagttagtgaaagctaggccacttatagcacaagataactggggttatcaggcttttaggaggacgggtaagtgccaaatatattactgtcactataaataaataaaagattcaaacaagtatgaacttggtaaaatattgcctgagctggcgtgtgacatgaatgcctaaaagcaatgatgggtctctaggtcttgggaggccccctctatttataaatggaaagtttagtcattttggctatgaatactgagaaagagcttgagtgaattaacacaggcctaaggaggtagcttgctgccccaactttattgaagtctaattgacaaataaaaatggtatatatttaaggtgtacaacttgatgcttagaaagacattgtgaaataatcacagtcaagtcaattaacatagccttcacctaacagagttatcactttctttttttttctttttttttggtgataaatatttaaaatctttccttttagcaaatttcaagtatgtaatagaatattgttaactataatcacattgcaatacatttgatctccagcatttttctatcttgaaaactgaaactttctgccctttggcatctccccatttctcactttaaaagcactttaaaagcaggaactttaaattcctgctcatggacaagaaagcttatttattagctaaggctttgaggtaagaactcagaggatgaccattcaaaattaaactaggaccctatatgctataggttgaatgtgcctctatcccaccagggtacaaagactgcatatttcacattgatggaggaaaagctcaggaaccaaacaagttctgatttcaagcaacagtctagctgtgtaaaaggagctagtggaataaatactgattcacagggccacagaggcttaaaattccagggaaggatgtgagcaaagtcatcattttgtttacaggggacccagatgagggtatgaggtcccctagagttaatgctaagacagtaacatggggtttgcttctttccaggcttgataataattgggagagacagaaggaatgttgttagcagggcaagatataatagtatcaaggagtctgttaggaaatataattcattcccacttggttcaaataaagagatgaccttaatgaaggtctgtttcagaagtatgggtgttaagggtaaaaacaaggggtggtaagacacccggaaaacagatgtcagcagcactcctaggcccagcaggacaaggacagaaaattgtgctgcaaaatataagacagagaaggcagggccacagacccagccagagagcagagaagaagtaccttaacctctttctctcctaactctgatctgctggtgctccccattggctgaacacaaccacaagatgcagttgggggctcaggggatgcctccagcctaggaggtcagcgttctagggcagagaactggcagagaagggcagaggatggatctggagagtcagaggatatcagcacaaggccactgtgaaaatgagctcttagcctatcagacagtggtcataaccaactctgtaaatttacaagtctctgtaaatttaaataatttattatttcagttatcatttaataactcttggcagattccttaggcacatgccagttctgtggtctggtcctccctccctcaacatcagaaaataattggagcagaatcaacaccagaacatgagtatgcacggcctgagggtggaagaacgttgcattccagacccatgagtcctggacctctttagtaagcactgtgttatttctaaaattagagcagtctcttgggcacctggtatcccaaaacagctagttgcctttttgtagcatgcccatgaccttctggtaacataaagttgtttaggatcctgaagtacctcttttctgtttccttttgtttgtacatcctgctcatcttggcaggcacagctgttttggttttacttggtcatattgcttatggggataatagtcagtctaaactaatagtagtgaattcccctttcctggggtgttcaagtagcatttgaaggaccatgtgcaggagtggtccttctatccactaacatctgatatacttaacatccataccaaggtattcctttcccaccctggaatcttttagtaggcctttgtactatattctgattctgggtgactttcgtttcccctctactacccctagtctcccaaatagatgaacattgccctcatctagtgttttagttcattttctgtggcttataacagaataccacacactgggtaaatgataaacaatagaagtttatttggctcatgattctggatctgggaagtcctagagcatggtaccagcatctaacaaggttcatcccatggtggaaggcggaagcaagtgcacaagacagaggcactagggatcaggcttaccttataactacccattcccatgataactaacccactcccatgacaatgacattaatgcatttgtgaaggcaccaccctcatgacccaatcacttcttcttaggcctcacttccaaacactgttgttttaatgattaagtttccaatgcttaaacctttggggaacacattcaaatcacagcatctactaaatgacagtagtaagggttacagcttcaatatggtagcatgaagaggtctatggattcactcccaagtgaaactggcaattcctcaaggatctagaactagaaataccatttgacccagccatcccattactgggtatatacccaaagaattataaatcattctactataaagacacatgcacacatatgcttatcgcggcactattcacaatagcaaagacttggaaccaacccaaatgcccatcaatgatagactagataaagaaaatgtggcacatacacaccatggaatactatgtggccataaaacaggatgaattcatgtcctttgcagggacatggatgaagctggaaaccatcattctcaacaaactaacacaaaaacagaaaaccaaacaccacatgttctcacacataagtggaagttgaacaatgaaaacacatggacacagggaggggaacatcacataccagggcctgttgggtcggggggtgggggaaggacagcattaggagaaagacccaatgtagatgacaggttgatgggtgcagcaaaccaccatggcacacgtatacctatgtaacaaacctgcacattctgcacatgtaccccagaacttaaagtataataataaaaataaataaatatttaaagtctctggaaatggtcataaatgtacatagcaaatgaagaaacatttattcaagaaaatctattaaaacttggtaagatcagtgaatcagtgattttgacccaagacccacacccttcctccccgctcacag

SEQ ID NO: 94850 - DNA, 158719 bp, Homo sapiens
  misc_feature (1)...(158719): n = A,T,C or G
ctacaaccatgaaaaagcaggaagggagccagagaaataaataccccaatctctgtcccctcttgtcctccagtctcctgtaagtatatcccattcaccaaaaccaacaaaaatgggatcgcaggtgatgaagtccatgaagatcagtcctccacagcttcaagcaagacagaaaatggtgaaacacgggtcttgggtacactaaggtgatacagccagaatgtaggagggccaggaatcaaattcaggcttgtctgaatctaaaacccatgccttatccactgcttttatgtattcctctaccatacatactgtagatgcttagtaaatgtttcttcaatgaacgaaaccccagatgaaagttggagaaactgagattaggaggctatgtgtcttgactttaggaaccagagtcctggttaccgtggaaccatctctgggtctgtaactcactgcctgcccattcaaccaaacaccactcactctttggatataacaggcaatctgcagcaatgggtttctttcacggtaaacatttatgtaataattatgttaaaacactcaggacttactgtcaaattgcagatttatggtacttactttatccgatatttctagcacttaggttggacaaggacatccttgagccctccttctctttgagaattcccaccctgatatggtttggttctgtccccacccaaatctcatcttgaattgtagctcccataattcccacatgttgtgggagggacccagtgggagataattgaatcatgtggggtagtttccctcatattgttcttgtggtactgaataagtcttacaaggtctgagggttttataaggggaaacccctttcacttgattctcattttctctcttgccttgtggccatgtaagacgtgcatttttgccttccaccatgattgtaaggcctccccagtcacatggaactgtgagtccataaaatctctttttctttataaattacccagtctcgggtatgtctttatcagcagtgtgaaaacagactaatacacacccccatctcaaaacacctgtctcctatgaaagtaaatcttgtatctgctaaaatggagtaagaaaagagtaagacaggaatgcctgttttaatcttcagatacttgctatctaaaattgacttcaaataaggcaagataccagcaatattatcaatggaaaagaaaacttgcccctgtgttaatcaacatccaaccagaacagaaatagctttaggtatgtcaaacagagggaatttaaaggaaattgcttataaaggtcttgaaatgtccagaagaggaaaaggaacaatttgaccataagccataattatcattcataattaccattcataattacatccccatttcctagcacaatacctggcatatggcaagggttcaataaatatttattgaatctatgattacacttgtgggtgagatttggtctgtcaacctaggaaggccacaaattctcctggaaagcataccttcaagcagctatatgactctggtaattcagtgaatgtgtacgtgtgttttggcattcggtaggaaatcatgtgcaaagccttctgttcaaaacctctcaatggataatatttactgagcatctattaggctctagttactttctatgcactttttaagcactttgcaatattaacatttataataactctatgataacgtgttcattgctccgcatttatagatgatgatgaaactgaggcaaagagtttttaagtaacatgtctaaaatcataaaacaaggaaatagtggagccaagctttcattacacagtctggctctagaagctatgctcttaatttccacaccatatgcctccccacagctgatgtgatgaaggcttagcccacttttccacctttgttttccattttccccactgttctctggaggcagacaccagctagctgtttccccaacctcatgttttcttttctttctgggcccacagcagaatgtattttccagcccttgctcgtggttattgtagctgggtggcagaattttagccagaagaatgggagcagaggtgatatgcatcccttctgggcctgacccattaagcctttcacatgtggtggctgtatgttctttcttgttctttcagtttgaggaaggtgagtgatatggtttgactgtgtccccacccaaatctcatcttgaactgtagctccgataattcccatgtattgtaggagggaccaggtgggaggtaattgaatcatggtaacgagtctttcctgtactgttctcgtggtagtgaataagtctcatgagatctgatggtttaataaaggagagttcccggctaggcgcggttgctcacgcctgtaatcccagcactttgggaggccgaggcgggtggatcacaaggtcaggagatcgagaccttcctggctaacacagtgaaaccctgtctctactaaaaatacaaaaattagctgggtgtggtggcgggtgcctgtagtcccagctactcaggaggctgaggcaggagaatggtgtgaacgcgggaggcagagcttgcagtgagccgagattgcgccactgcactccagcctgggcaacagagcgagactccgtctcaaaaaaaaaaaaaaaaggagagttcccctacacaagctgtcttgcctgccgccatgtaagacatccctttgctcttctttcgtcttctgccataattatgaggcctccccagctatgtggaatcgtaagtccattaaacctctttcctttataaattacccaggcttgggtgtgtctttattaacagcatgagaactgactaatacagtgagcatggaaaacttggatgccacatgtagaagagttggagccacaaaatagaagaaggctggatccctgaatattgcttggaaaaaagagttgagaatcaatcaggaacatctgtgctagactttgagtgaacaagagataagcttctgtcaattttgtgccattatatgtgttggagttgttttgttacagcagctatagatatgtaaatagatctacctactgtcctttgaaaatgcctttcccttagaattctcattctcyccttcagttactcacatccaaaaattatttaaggcctaaaccaagtccaatcatcttcaagcagctttcttccactcccacccaccatagagatagatctctctttcctttaccttcctgtagcactttgttatctatacctctcatgtgcacttaccccagctccaattctggatgtcttgttctcctagtgagattgtgagctcttcaaggtaaggatcatgtctttgtgcttccttcttttgtgactctgaagtgcataacatggtgatgtgccttgggaattttcaataaatattcatgggaaaaatgaacatatcaatgtattaagctcaataaagtccgttttcctaaaaacagtccttcattgctgaagtgtgaaagcatgtaaactataatctactggatttggtatttttattattcttttttactaatatatacattctaacactttttgaccactgcttagagaaaatagaaggcatgcttatcaaatttcagatggcacgaattagaagtaataagtaatgcacgagataacagaatcaaaactagacaaattagaaataagtaaataacatttaacagggataactacaaaattagattttaaaagaacaggtacccaatttcagtatggaaagacatggctaacatcaggttttaattggctgctagactgacatgagcccagagtggtacacagaaccctgttcatagttagactcagggcactgagtggtaggtgaaatattcaggctccaacaaggcacaggcatgaatgaagattgctagatggtggccagctagagacagatggagcctcaatgtctggtaaagtctgcagtaaagagcagaatgaagtcctatactttatttaacccgggagctaaacaaataaacaatatataataagaataaataggctgggtgcagtggctcacgcctgtaatcccagcacgttgggaggccgaggcaggcggatcacctcagttgaggagtttgagactagcctgaccaacatggagaaactccgtctctactaaaaatacaaaattagccaggcgtggtggcacatgcctataatcccagctactcgggaggccgaggcaggagaatcacttgaaccccggttgcagaggttgcagtgagctgagatcgcgccattgcactccagcctgggaaacaagagcgaaactccatctcaaaaaaaaaaaaaaaaaaaaaagaataaataatgaactaatttaaaaataaataaattttatatttaaccagggcaagcttaaggtaaaagatcaactttcacctgtaactttgatggaaatcctccatctgaggacaccattaagtgatttctgacgctaaactggggctaatggggctgcctggatcccctaagaattttgctttagaagtactacctagtcggtcttaaaggtttgttattttacttttggtcccacttcccaatgtcagtgtcagagctgtccttgagactcctcaaatttgggcagggcgtggtagctcacgcctgtaatcccagcactttgggaggtggaggcgggtggatcacctgaggtcaggagttcgagaccagcctagccaacatggtgaaaccctgtctctgctaaaaatacaaattagccgcgagtggtggcgtgcacctgtagtcccagctactcaggaggctgaggcaggagaattgcttgaactggggaggcagcagttgaagtaagccgagatcgtgccactgcactccagcctgggcaacaagagtgaaactccgtcaaaacaaaacaacaacaaaaaacaaaaaaaactcctcaaatgtgaagctgagaattttgaagctcatttataaattcacaccacccttgtgggaggggagagaaggcagatcacatctctgggctcagttggggcaaccattctaggatgctcagagagacctgctcctagaaatccagagtttcctaaaagctgggatcagagttctggcaagaaggctgtagcctgggccttggccctagaccaccaaaaaagtgaatacaggcttaggcagtgttcatagaggcccagcatctggaacaagggtgctgctgtagtctgtgctggtcagaccacacaggaagaattgtttattttccggatactatgattttaaaaggatacaagcaaattggtgtgtatcaaaaggaagctgaccagaatgttgaagggacttggaaaccaaatcactagttacttttcagtggtttgggctccaggactggagggggtttagggtggggggtagaggatggtgttaggcagcatagataattagaactgttttcagatatgcaaatgctgttttgtgaaaacacacacacacgcgaacacacacaaaacaagaaaaacttgtactttaggtaaggccagaaaacagaactgggacccgtgggatttaagctcaacatgaagaatctgtaaaccattatagctcttcaaaagtgggctagactttgtaagcacgcaaggtttaaactgttcaggtaaagaccaggaagccctccagctgctctgtccagaccgaggccggctctccaagtccgcgctggggacgatgggaggtgtgcacctgcgacagaacacaggtaccgccaggtccgggtagcggtggcttttcgccgaggtcccccgcctccgcatacttcttgccctcgctgcttccccggccgcctctcctggccccactcctcgcccggcgctcgccgctacaactcccgcctgggctggcgcgagacccgcgagcgccggagtgggcgcgcgggatgcgcgcgggccggcgcccggagctctgggcatgctcagtcgcgcgggcagggctccgggcgcgagctgggctccttctgcaccacattcagcggctgccaagaggagccgacgggcgctcgcaggctcagcgcgcgctgcccgcggcaggacccggccgcctccgccgccgccgccgcccctaagcctcccgaagccatggccgggctcggccaccccgccgccttcggccgggccacccacgccgtggtgcgggcgctacccgagtcgctcggccagcacgcgctgagaagcgccaagggcgaggaggtggacgtcgcccgcgcggaacggcagcaccagctctacgtgggcgtgctgggcagcaagctggggctgcaggtggtggagctgccggccgacgagagccttccggactgcgtcttcgtggaggacgtggccgtggtgtgcgaggagacggccctcatcacccgacccggggcgccgagccggaggaaggaggtaactgccgactcgaggggcgcggccggggsgcgcgccaggccctcccccgccgccggccgccgtgttgcctggggagtcgcgccattggccctcgggctagtagttcacaacttcccgtcggggggcgagtktgtgtgtgtgtgtgtgtgtcagagagtcagagagaagttcattgttcacacctcccggctgccggcagccttctggaggatccgattcaatgtggttgtacggtctcgggcaggtgggtgggcgggggattccgtctcacgggcatttttatttgtgaaaattaaacggcagcgacgacagtgcaactctgagtgtttcccagggagcgagggccgcgaggggtgccgctccggtagggcgggtggaggctgggcgtccctccagggggcagcgccagtcgtgacaccgaagcccccaagtcctgcctggcgctcggagcaggacaagctggatgaattaacggggtgtcggtgcccacagacctggggcttctcaagttagttttcagtggtggcgagtgagtcccaaagaacgggactagtaagtgaatgaatggaaggaaaagtgttttgttggtgagctgtgctaaatgtgtgcatgaatgggctaggtttgaaaagctgtactctgtgcggtgttgggtgtgtgtgctagcgagcgtgtttaattagagatggttgtttcacaaattccataatttttattctctatatttttaaactcacagcaattaagagagtttttctgttctcaagggttgtaactactttgaaatactgcagcttgtgaaatggctgattgctttaagtgcaatgtaggttagtggggagagacaaatagagtgagattggattttaaaatgccatctggcctgggattcttctcattgccagttaagagcccaggctcaagactccgttgctattggcatccagtggcattgcaagaagctagtggtttctttcatttctggagatttaagaattttttttctattttgtctgtattcacttcacattggaaatgcctcatagagcttatgataaaatatgcttattcctcacctgctccactacttggttgatggaatgccacatggtctgagaaaataagcatattctactaatttctcatcgagataatcagcttttatttcaccctccattaacagaaaaccaaaagagtaacagatctctkctagccctttgatgtctttgccacacctctccatctttgagtctgtgagatgtcccactcttttaaactgataaggaatgtaatcccatttgaatactttctaatgcgttctaggccaaatggcagagctatggtttgaacttaaaagagcaaaatcgatttcaaaaccctttcaaaatggcactcttttgatgagagtagtccartttcttctcaagagactgtcaccatatttattcacccatttcattttattcctataataaaagcttccaagctttggcctccctgatacctaagtgagcagtgatctttttcccctgcctagattttgaagcatacattttaaattggtttaattctgatatcagcctggtggcccactgccagaagtcacatggtgtagtggataaaaacattagactgaatctcagctctaccactttctaattctgtgacctttagggagtgtctcttgcctcagttttcgcatctatacagtggacataataatacctgtttcacaaagttgttgtaatagatgtattaatctacctgaaattcacaggacaggacatttgatgaatgttgactattattattcacttaactatggatcagggaagatttactcckttaataagaagtcrgctatacactgatgtagttagtgacatctctctactatgtgatactgcctctgggtttgggtctcctgctggtgcctgcctttgcattgcacatgatctgggtcaccagggtaacaggcctcccaggcagggagaggaatatgggcagtcagtgttggatgggatgcttctggagggcagagtcatgtagggcaatgcttgtagaaatctctcacggcaccagctcaccgccttggtaggtgttaatgcttgttgagtgagtggatgaatgaatgaatgaatgaaygaaatgctaatacaagaagatagttacttcaagaccctctakggattgctgtatatttttttcatgtgatgtctgcattcccaactgtgaaaatccacagtagccaaggaattattttaaaattattgtcactgatctctgcctctagtcttgtcaattttccattccattcccacactgtagccaagctggtcttttaaaaactcagatctgatcctgtcccttctctgactaaaattctcaaggggcccccactgagcttagataaacccattgagctgggctgtgcttgcctttccagcttcagcttcacctctgatcccaccccaagcatcccctgatccatggatcgagcgaggttctttcactgaagctcaccagactattgcttttattttgyccgggtactcttcctctttcctctcttcccttttatctgtcttaagttctcagcttactgttatcactattattagctaatatttattgggtacttgccacttgccatacaccataccagatttatgatgtgcatttcattaatactcacatcaactctttgaactcaatactatcataattcctattttaaagttggtgaaactgaggcctggagagattaaataaattggccagggttatagagtgtaacctgtaaaaccaggatttgaactcgggtttagagaactccaaagctctagtcccacttagacatcacttttccaagcatggaattggttctccttttatgagctcctaaaacgctataaacttccttttatatatatcataccacrtgataattgcctgtttacygttctgtatctcccactattatgtaacctgtcagggctaggatcatgtctgtattggtcaacattttgtcaccaaggccttgtatacaataggcatgtagcaaatattttgttgaacaagtgttctcattattttagattaaccttaattctccctccttatgacatatttggtgtttcacaagcattcccaatcagtaaggtcccaaaagttctattatgaacgtaggtggtttatagctgtttcttcttctccctttccctgtccctgcctctttctattgttattgttgttttgtttgtttttataaaaatcttgagaaattccttcttaatcaaaacatcgtgtttcatttaatgacttttcttccttggaattcaagaaagtattcctgtgaaagcccagtgtttgcctgaatggggcctcaaagattaataaaacacaggccctgtgtgcaggaagcctaagttttagtgaaggaaactgtatttacagaaagtcagtaaataatgttaattgtctaataatgttgtatctttagattttgagtattttttawgtttaatactttaaagaaaaatmagccgttagaggcctatcaaattttacatgactccaacttactttttagggaaaaaatgcaacttctctgtttgtttgtttttagagacagggtctcactctgtcacctaggctgaagtgcagtggcatgatcatagctcactgcagccttgaacttctgggctcaacaatcctcctgcttcagcctcccaaagggctgggattacaggcacgagccactgtgcctggccaaaagtcaatgtttaaatgtcaaataatgtaaacaaataatctaaaagatgatgtargagaaataacagggtgtgaggattgaattttttaaattaaaacttttgtgtagataattaatgcctacagtgccaaaatcaaaaggtacaaaaggatatgcagtgaaagtgggtgttgcccttctacgcccactcttgcacctgcctaaccagttctcctccttagaggcaactactaatgccaatttcttgagtttctgtccaaaggttcttagtacctaatgaatgattaactgacaaaacttaacttaagcaaaattgcaaaatatatcctgttttgcaaaaggcccttttgcccctttactttttttttaaatttatttgtcatgtaccctgttgactaggattgctcctttttaacagctattttatcctttcccaggtaccaagtgttagtatgtggggtaattttgtcttggagaaaaccacacaaatgcattcttacaaagtgataatagctttaattattgtttccttgagcttttgcatttgtaggggcctcttcaggaagaagtcaatgcttagcaccaggtaataaatcccaaaagtggaattaggcatcaaatgggggaatggggacataaatggaagggatggggaatataatttggatagmtgttccccttttattagggtacttagtaggacctatatattttggttctgggtttattctctggttaggaaaaagcctaaatatgttcatcctggaggcaagtgaacatcaagataatgtctaatagctatagctaacaaatgccaagtttttgaatgtgtgtgaatcctaaaaggtggtattattaaccctattcaaaagataaggaaactgaggctcaggtaactgaggttaagtgacttgtccaaagtcatacacagtaataagttgcagaaatgaggtttttatgaaaatctgaaggtcattttttgcatgaagtgcttgttgccagttgcggttaatcctaacataacattaaatctatgtagaataactacttaaatcccattttacacattagtgatatgcaatctaactcgaacactaagtgaattattttacttcccttctctcgtaaatgagaatatgttgttttcactttagtttaaaaataacaattcagtcatttatataaccccctaaatggcctaggcacagtttgtgcgtaattgtatcttatttaccagcatagtggatgattgcatttttaaatgcataaatttcctcaaacttctgtttagtttcaagtgagaaagctgccccaaaccataattagaaattattctgacaccaagatggaaagtgaatgtgctggaggctcttcacatggcagcagattaacagttcttgataaatcatcaccgccaactagttagaacaactgctccttttcaggattttttttttattgttttgactcttctacatggccttggcagtaacgtttggaaattgatgtgtcccagagactgggatgcatccaataatgtmgtctcttcctgtgcagctgatcttgaaagccttgaaaataaggaacaaaatgactagggagtgacttctattagatactrttagctgaaaatgagctttctgcagagattcttagactcattagagaaccattataagactaagaaggcagggctagatcccttgtaattcagatatgctggaaaattgcctttgcatgtatttgaattcttattaagctcagatttcttcaaaattagtttttattataataatggtaggtatccatccattaatataaaccacaaaaacagaaaaatctacttacaacttttcaacaaacagatttaccttccactgcctttgtgtcataagtaaattgtttgtggcatcttatgattctcaatataaatttggaggtgcatgttttaaaaatgagtgctagttattaattttatgggcttttgctactaaaatctgtaaccatttcagaaagcctcattttttgactggagatctggatatgtgtagtgttccttcctgcttatcaagggagtaccataattaaagagaaaatgactaaaaccttaataagagagaaaaaagtttcatttatatcttatacagaacatagtgcagtatttatttcaggttgtccataaatatttacttacataactgaatcctctgaacttccatcaaaatattcccctgacctttgaagttagcttccatcacttcccctaaactgatattagatattaaatctgtcagacatctcaggctcatttcataagcaggggcttttcatctgaatggacaagcaggcataatctcaagcaacaaatcccattttaaaatgtgtgtgtggtgyctgtagtcccagctactcaggaggctgaggcaggagaatcacttgaacccaggaggtggaggttgcagtgagatgagatagcrccactgcactccagcctagcaacagagcaagactctgtctaaaaaaaaaaaaaaaaaaaaaaaagtgtgtgtgtaatgtcatcctagttcactttgtcattatcaagtaatttaataatgtacatcattttcctgaagctgatgctgctgaaggagcagtagcatcacatagraaggaataaatcaccagactttagacttttgttgctaaatgtttagattatccaagcaactatgacaagaggaatcagyatgaaaaagtacaaagaaaagtacaaactaatacagggttggtttaattttgtccaacaaatcagtgtggacaagaacccgacttagtttaggttagcaaattaaaaggactatatcatttaagctgcttttgcagctggatgggcttataggggtaagttatcattccagtgaagatacatacatcagcattttcctctgtttgaatatgtgtaagtaaacctttgcctttattaaaagacgttttgggctgggtgtggtggctcacgccwgtaatcccagcactttgggaggccaaggtgggcggatcatgaggtcaggagttcaaaaccagcctggccaacatggtgaaacccccatctctactaaaaatacaaaaattagctgggcgtgctggcaggcgcctgtagtcccagctactcgggaggctgaggcaggacactcactygaaacgagaaggcagaggttgcagtgagccaagatcacgccacagcactccggcctgggcaacaagagcgaaactccgtcttcatccttttgccttgattctgtcgtcattattttgcttaagaaatattaaagttttccagtttttgtgtggcattaattatgagtgccatgattgcgtgaaaaatgactgcttttgatagtaaagggataatagttgtgttactcatatctgttagtacattcaataactgtctattatgtccaggctgaatgtttggtgctggggagatacagatgaattagacacttccactgcccctgaggaygtcacagtccagagagggaggcagatcagtgacagacacttgcagaacacgggggcagattttatgacagacctcagcccagtgccatggaagctcaagaagatgtgtctcacccacaccaaggcttcccagaaggagcgattattgagtgagaattaaccaggggaaggcagagaagagcaaccttccagatacagagaacaggatgagataagatgggggtaatagtccagtgaagattaattttattaatgttgagaagatgtagaattgagaaaaactcacccgtgccctctcagatcttttgaaatttcagatccaattccaagttcaccaaaagaaacaggtacagaactgtattactttgttttgggtctagagggatttggccactttgcacacttcatttctaagtgtacttccctcttactcttatccacatgctccataatggtctggaaccccttctaggattcctgactrgcacagtttgggaacaatgtagcccactctggagttgactaaagtctactttaagtctgaaacttaaacatttcctgagtttgccatttagattctggtaaggcacttttttggtggtggagggtgggggggtcctgtaagttatcagtatattctttgctgggggttttcccccttgacccataatttgttacatgagggtgtatcaggaaaacctgtcatcttgtagtatgtagttatatacagatgctcctcaacttataatggaattacatccggataaacgtatcttaagttggcaatatcataaattgaaaatacacttaatacttgtaacctaccgcacgttgtagctcacgctacactaccttaaacatgctcagaacatttacattagcctatagttagacaaaatcatctaacacaaagcctactttaaaataaagtattgaatatctcatgtaatttattgaatactgtactgaaagtgaaaaacagaatggttgtatgagtactcaaagtatggtttctactgaattcatatcacttttgcaccattgtaaagtcaaaaaattgaaagttgaaccatcataaattagggaccatctgtacattacccatgtcaatgacaaataagacaaaactaatttctatttgctgttgaaattatttttattcacaaatctctccatcttgacattagtcaccattgaatctcaagtgcagcgtaaactgagaatgcatctataattatgggttgaattttgcatgagctacaggaggcagccaggtggggatacccactgtcctgggggcaggagacactggttttgatttttgcagtgatattaagatcaaatagctgagggatttttttyttttctttttggaacccgggttgtaggggagagaaagtgtagggtgggaaagagataagaagatgggagaaagtggatggggagctgatgataacttacatttgtgaaatggaattgsagtttgataaataaaaaatactgattttattcraccaaagacattatactttttctgcttaattaactaatcatatgaactcatgccttgttaatgataatccattaygagatgcagttgaatttgctaaatctatttcaaaagctctgcttactcaaccatttatagcacatttgacaagtaattttttctatagaagactttaaataaaaaccattgaaatagtgtaagatcctagacccacatactgtctgccatcacacatcactttcctcagtgtctgtcagttgatgtttttgtgtggtgaatgtgaaccagtggcctgaagaaatggagagtaaatggtgatgaggtattgctgtaagttgtgttttctgttataactaagtcttgacttacccatggtaattctttcttacaaaccttccatatatgtgtgctggtttctattcctgatgctgaactgttagttttctaatatttaacttttggcttccaaaactacatgaagttatttttctaaagaaagacaaaaaaaaagaaaaagatacctacttaaaagtagccttcctataattagctgtgtacacatgttagccaaatraggtatagatgtagtcatttttagcctgaaatgattgaaaaaggtgaaattaatgaattaatcttggtgcagtttcaaaatagtaatggaagaaaaacatagccattttattcttttaattatttttttcagtcataagggaaccatcatttcaggaagaaagattattattactacagtttggctttaggtcatattttaggccatttatgatgtaatcatattttccagctcaagagttttgtgtgaagagatttagatctagtactttattttgaaatacccaaaccattttttaaatcttgtttttggaattttctaactttctgcatgccatcctagttctctgtcagggaccctggttttccagctcccttttctctgaaaaatacacagttgggatgttgaagggccctagtcgaaaggttattgatttcttcactttcgtcttttgttactctcaaactaaacatcattaaggcttcggcctccctaatctctgagtcttcccaagtcaccccaaatgtagaaacagtccaattatgactagagcacagcttcaagacaaggtttttgtaccattttttccccaattgctgctctctacccactagtgggtcatgaaatcaatttagtgggtcatgaccagatctttcatttttattgtaatagaatcagtagaaaatgtcagagtgtactgcaacatagcgtcataagggtaagtattgtttcataaaacttgtttcatttttacacactatgtttgtgtatactgattaggtaaataaatttcttacactaggtcatggtaaaaaataaatgtgaaaaatcgaccgcatcccctttcaactggattgcaccattcagcctctttatagaaattctgcagggccattcctgttggccagttgggtcctgggaatcatggccaaaatctcagcattactttctatccagtcatgttttatttcctctcacttgtgttgactccttacggtgatggtttcctgactgtttggacccctgtccattcagcaaactagtgatgagtccatagttctatgtggcctggtaggtgtgatcggggaacatgaagagggggaagattgtcagcttcaccatttgctagaagctgattctacctttccttctttggtgacaaattttaacctggttaagggaaggttatgttaagacaggaaagcatagttttccttctgaacttgcatcttttgcatttttcagaggcggggaggggaaaatttggtggcagcagcattccctgaatcccttgccaggggktgtacccagtaggaagcagtagcatccaggtgggggctgagacctacasagacactgggaggcatcaggatccaacatcaggatttgaccacagacactcttggggtagggaccgaaactcagcacacttactttaaccccagcatgtgttcaaatacagaatgtgctaaaatgtgattataatgttcatgtcattctcagatcactggctaaaggcctaaaagagatcttggaaataactagtttcactctctttccttcacacttatgcaacactagataagtggaaatcctgccttatgtaagaatccaaagaaaatttagttttctctgccaagtaatccatttcagcaatatttgttggtaatggtgcctattaagtatgagacatctggactggcatataaattggggttcattctgacaaagtatatatggatgtttagtaatgggtcaatctgggattgcagggaaatgaagcacccagttttcagtggtgatccctttctcctagctgagcagcctagtactaagagtggaatgtattcccttatatatgctcttctatgccccaaaaatgagtgccttgaagattctgatgagagacattaatgatagaggcaaacagtgtgtggctgtgactggaaaaattgtgtgtttgtaggaaaagggcttggaattgtgagacttggagctgtaattacatgagaaaaaatggggagtgcagttgtcatgtccatgtctgcatttttctttgtgagcactgagctggataactgaagcctctgagtggtttgcagaaaagcaggattaatactgcttctaaactgtccagtcctcagaaggaagtttcttggtgagtggatgggataatatggatttaagttagaacattttcttgaaagtaaatgccaaaaaacacacaagatatagcttgttggcctcaatacagctgagggctcaattatgatttagaacacgctccctgaaacactcgcctgccctgaggtcaacctaatgactggaaattctgcaaatgtaacagctactatcacttggtctgtttttataacatacacacacacacatacacaggtttggataaaatcagttttctaacagtgctctgcttgtgaatgcttggtggtattgtggattatcaaaaatgtttacagggattcttgagttacattatttcagtgatcgtttagccaggagaaagtttttgttgttgttggtttgctttaatgaattgtgccttttttactgggctctttcagcctgtgatcacctccatgcaggtcgtcttgatttcatcattgggatgggcttttatggtgctatctgtggaggagaaagcatatatgcagttcctagaacttccctacccttctttaccttycttttttaggggagctcctataacactrtgagtttgttcttttactctaggtctagatggtgattttcaaattttaagttcaactcgtaagtggatcgtaaaattactctagtaggtcactccagttttttttttgtttgtttgtaaaggaactgaaatagaatagaaaatatcagagtgtattcgcaacccataatatagctaggtaatgtttcatgtaacctttgtttcatttatacacatgcacgcatctacrtgttccctcttatgctataggttgcaacataaagtgtacttcttagtgtaggtcattgtcaagaggctttatttatttatttatttatgtcgttgttgttgtcaacaggttttaaatctacttatctaggagaccaaaaaataccttaaataaatgctgtcattttagcttttgttgccattctttgttgtttgcagcaacagaattttggcatgtgtcaaaggcacttgacttccattgagcaaatgggctgtttgatctcagggcactgggtttttcattgcctattaggaaggtaaagccattcatccaaaggcagcaaaatgcaggggatggcgaggaagagaaggaaaacaaacagtgtaggtggaaagtctcaggctcttcccagtaaacaggcattttcaaatatcaaagactcccctgcattaatgctacagagtatttctgtacactttgaagtgatacactcatttgtaaaccaaattataatgttgtgatattatagcccaggatggcaggtgttcagaaagcataycacttattaaaatggccatatgaaagcctagtacattttctgttctattgattccagtctcatttctactgcttctactttcctctgctcctcactgaactgcccacctgctcccagacccacaatcactcgagatatcaaatcagcacaagattcagtcttcatcacccctctagcatgcatacctctcactcaacccaggtatctagagacacatgcttctaagctgactcaggaggcagacttgcttgactcctggggcacttttgagagggggcgttctcttcctttccatgtgccctgaggactggcaggggacagctataaattcaaattgtggttccagtgcttattagctgtgtggccttgagcaagtacagcatcactttcatcatctgtagtgttgaggtggttttgactaccctatagcattgttatggtgaataaatgcaataatacaggtaaggtactgagcagtaccatgcacagagtagctcttccatcagtgatcagtccctcttctttctgcctttatatgctttttgtctttctaaagggctgctattcaagcccctaaggattgaggctgtgcccttctcctgctatcttctcttcctggaaactggagacctccatccattgggctgtggccagaccacctgtggcctgcccagactgagattctgtccagcagttggcattcattgctcttgtattttggacccctatgctgactccacctgaaacatgccaggaggatggtaagaccattagagatatgcacttgatcctcagctggcagccgggccagtcacccagcgcctgtgccactctacaggcaggtctcttgtgggcactggcctctctccagctcatggttttaggagtaggtcatcagactcaactgagtcaaaaggtactaccctttttataatttctcttcatcctctgatcttctaagtgaatgaatacttagagatatttctgccattaagcttatcatctgatcttgaactagtcatatattagcatttgaattcacattttaagtatctttacacattcgatatattttccattttaagtacttaaaaaattcctcttacattgcaggtgaaattccacctggaattgagtctcagttccacttctcagttacatcatctcaggcaactcaaaagtttcagtttcctgtaaaatacctttatgccttcttcccaaggatgcatgaagatcaaagttttttgaatgctgtgatgctttatacaacagtgattacagtggcaatgttatgatgagtgaaggattgtacgtatggtaatagtaacattattatttatggactggcgataactagcctattcttgatgatatatcggattgactagatttgaccaatatcctttgcacaataactgtgacaccaagctgtgacaaccttagagagaggtcctgatagaaagagactactcttagaaagcttcggtcacctgtaaagacccagacctaccacttattagcaaggtgaasttggccaaaaaaacttttgatacaggtttgtcacctgtaagaaagggtgacactacttttatttattcaacaggcaattgttgtttagtgcctactacatgcaaaacataaagtaaacaaatatgatgcctgccctcatggagcctgtagtttaattggagagataagcatgaaataaataatcgcaaatatatgtgtaattaaaaataccagtaagtgtcctaaagaaaaaacgcaacttgtctcataaagttgtaaaatgtcaataagagaccttacttgcaaaagacctgagtatcagcttttagatgagaccggtgttacctgtgttgcagaggaattagtggattacccatgctgttgctcctgtttgtatacctctgattttattcttaggaatattccctctctctgctggaagggacaagaatcctgcccctgtactccagcaccatgggcacctgcttctggccagctctgacttcttgaccctgtagtctacctctctctccagtacaaacacacctcttctccacctcccaacttcatctgccacctgttcctgctgccatgctttccagagatccagccccacctgcttggactttcacccaccacacatgcatctccrttgtgcttcatgtagttttcaggttcagagaccccttccagtgttatacaccttctcccagctaatccttcacccgcaataaacaacagcagtatcgtttatcctgtatttactgggtgccagcactttaaatccatcattctctctagctgtcttggcccccttccaagccctggaagccatctggctattagaagaaataaagtgtcccttgttcaataggtctgttggtcagcctcatcattctgctgayggccctaccccaccrtgactcttattcatttcatatgctcaggtagtgccttggttccattaactgggtttacatcttgaccccttttgttkgtttcctacctagattccctgcaaaagaccccaaggctgacctctagtcctcatatgagagaatctctcaaacatactgctatgtcctcttggtgccatgttctgccaaccttctcatatgtctgcattgggccagacaccaacctgccttatgctggcctgtgccctcagcctagccccttctgtgggggcccctgatgccagctgccattctgagtcttctttgttttgcccagagtcggaaccatccctggtcactggccttgtgctattgggccattttactgacgggactcagaaccaatgtgtgcttttatattttaaagtatttactagatttagcctcttaggaagtttgaggtacgataacttgactgaggcacacccttaactttgtctctttccccttctcctgtagtaactagctatatagcttatcaattaaatgctacttttctgtctcagtttaacaaacttgttcttggaatgctcactaaactgaatctagtccaattttgtaaaatttgtaaaattctttgctggcagaaaagaaatttcactgtgtttaattaaacagattaaaatgtgattttctcaattgtcaaaactgtttttgatagatttcctgtgtttcgtggggtttttttataaaagaaaaattattcacattattgtaattccatattatgtagaacaggaacaaaggaagtgatgcagatcctttggcagaaaggtcatttgagtcactggagtgtcctgaaccataggggaattagagctcctattgatgggatgcagagcacatttcttcagattaagacaccgctcatttatgtggatgtttttcatctgaatatttgtgccaaaggagagcaacagagggatactcacttgtaaacaaaggggggtggtacaaggaggaaatgaatacttcatagaactctaaaataaaccaaccagattttcagaacctctcactcttaataattcctgccattccttatctcttagagcagagatgattgagagaattaaagagtaggcttagtaatggtgaaaacacaaattctgattggtaatccaggataacaacttcaaagtaatagaccttggtgttctaacataggggtgtccgatctttcggcttccctgggccacattggaagaagaagaattgtcttgggccacacataaaatactctaacacaatagctgatgagcttaaaaaaatcacaaaaaaatctcctaatgttttaagaaactttacaaatttgtgttgggccgcattcaaagccgtcctaggccacatgtggcccrtgggccatgggttggacaagtttgttctaacaagaaaggatgatgaagatgctggctcctgactacaatgggtggatatttactgctgaacacacagcactgtatagggtctccaaggcctccatgtcatccttgggttaattaaaataagggatgaatttagggatgcagccggctcctctttctgatgattcagcgtgaaggaagagggtagttttgcagagaagaaatmcttccagtgtttctgtcaaggattagcctgttgatgaggaaattcagacatcaaaggtcagtgtagcttttggttaacattttgcataattcagactgactaaacttacaattcctggtaactccatttgaatctttggcaagccttggaagtaaacgggagctacctccaggctcagactagcaatcatattactaggtcaatgattttacattctagtcagattcctttaggttgcaaataactgaaacatattcctgcaagaaggaggaggaagattgtaaggatagactcaaatagaaaccacagaatcattagggacatgaagtctctctttctactcatgccatctcttctcactgtccacttgcttcattcaattctctggtttatcttaagcttccttgtggcccactcgagtttacttcatattcctgtaacttagctgctgtggctttctgactcagatttccagtttctcaacttaaaatgtttaaatggagagcctcatgggcccatgctaattttttgatgcaggcaaccaagtgatatatagctggccagcctataaatagactgaattcagttcaggtgcccagctctggttcaaccagatgtagcttcagaggccaagatcagagtgggtttgcttagagcagcaggcatatttttgcatataaataggcaggcagtgattggtgtctcctgtgtagctgacctcctcatgctaataaatgaatccaaacactgacctgtcatgaaagaaagagtgccttgtgtggggaagccacattctgatcttttattccattgagttttaaaattcaatgatgaccacctttctttcttcctgttgaaaggtggcctgtcctatatcctttcagtgagacacacgtctctcctatcctaggtgaaatttaagtrtaatgtaaaatgctgttgctgcaggaatagtgtacatcaggaagaaaaggggcaaataggaagagagaaggagaagaagaaaggaggaggaactaactggaaatgaaatcctcagtttctacccagaaacttgatacatctccatgacactaagccatatgctagaggattgggggaggggtggcaggagaattgagggagagggagaggaagggaggtgggattgaaacaagggggcaaataacaggaaggaaaggattttggatattaggcctcaaaaggtagaaattccaccttgatgtctttggcgtgatgttgccaaaggataggacttggaatggacatgatcaagtgggccaggtgggttttccattttcctttttcctgaaagcccaccagtagacaattgatatggttaggccttatgtccctaccaaaatmtcatcttaaattgtaatcctcataatccccacatggcaagggagagaccaggtagaggtaattgaatcacgggggtggttttccccatgctgttctcatgatagtcagtgagttctcatgagatctgatggtttataaggggctcttccccctttactcggcacttttcctgccttcttgtgaagaagttgcctggcttccctttcagcttctgccatgatcgtaagtttcctgaggcctccctagccatgttgaacagtgagtcaattaaacctcttacttttataaattacccaatctcaggcaattcatagcagtatgaaagcagactaatacaacaagtccatgagcaattgctggggcggtacagctcacagcatgaatgtctcaacttctgacatgccacagtcagacatgcaccagaaaataagtgtctggctgttcctgatgtccttactggactgtaatattttgaatttgccattctaacaagtggtcagaattgcagatggcatttaactattgggattgcttcatttggctttaaaatgtaacatgaagtcaagtgtgatggcttatgtctataatcccagtattttgggaggccaaggagggagaatagcttgaggccaggtgattgagaccagcctaggcaacatgaagagaccctgtctcttaaaaaaaaattatctgggaattgtggtacacacttatggtcccagctattcaggaggctgaggcaggatgattgggcttaggagatcaaggcttcaatgagccatgtttgcaccactgcactgcagcctgggcaacagagcaagaccctgtctcaaaaataaataagtaggtaagyaaattaatccaatgtaacatgatattttcattgagcatataccctttaggaaggacagaaggacctcattattctttcacatatcttcacttgctttttacgttaaccgtctgtcctaaattgatgccatatagtctggcgtgcagattcacatttgtcaagatttctaaatatttgatcttaaggcactgtctagtattgcacaaatcactaatcttttatgcttttttcttgataattaaaaaagagtatgcttaaaactcctgaattcatcctcgtaacctagttcagatgcccctcctccttgaagcaccccacactcctagagctatcatgtcyccctgtgatgcttaatactgagtgtcaacttgcttggattgaaggatacaaagtattkatcctgggtgtttctatgagggtgttgtcaaaggagattaacatttaagtcagtgggctggggaagacagattcacccttaatctgggtgggcacagtctaatcagctgccagcayggctagaatataaacaggctgaaaaatgtgaaaagagagactggcctaggctcccagcctacatctttctcctgtgcgcgatgcttcctgccctagaacattggactccaagttcttcagttttggaacttggacaggatctccttgctcctcagcctaccaatggcctattgtgggaccttgtgattgtgtgagttaatacttaataaactcctttttatttatatatctattccattagttctgttcctctagagaaccctgactaatccccctactttggtcagcacatagcgctccatattgtccttacttatttgcatggttactcacacatctatgaactcctttcccacagcacctgtgaccttttcacttctgagcctccagcacagagcacagtgaggagcacacagtaggcgctcagtgaatgtcttgaattgagtagactatattcagtacagtttagcactcacaacattctcaggacctaccctgtggggccacattgtaggtggaactttgacacaggacttgaggtcaggatgcctgtggttaagcctagccttgttcttaagagtatgtggctttgcctgggagagacacaacaaaaaaagagaattttagaccaatatcctggatgaacatcaatgcaaaagtcctcaataaaatactggcaaaccaaatccagcagcacatcaaaaaagcttatccaccatgatcaagtgggcttcatcactgggatgtaaggctggttctacaaatgcaaatcaataaacgtaatccatcctgtaaacagaaccaaagacaaaagccacatgattatctcaatagatgcagaaaagaccttcgacaaaattcaacagcccttcatgctaaaaactctcaataaattaggtattgatgggatatatttcaaaataataagaggtatttatgacaaaaccacagccaatatcatactgaatgggcaaaaactggaagcatttcctttgaaaactggcacaaggcagggatgctctctctcactactcctgttcaacatagtgttggaagttctggccaggayaatcaggcaggagaaagaaataaagggtattcaattaggaaaaaaggaagtcaaattgtccctgtttgcagatgacatgattctatatttagaaaaccccgtcgtctcagcccaaaatctccttaagctgataggcaacttcagcaaagtctcaggatacaaaatcaatgtgcaaaaatcacaagcattcttatacaccaataacagacaaacagagaaccaaataatgagtgaactccccttcacaattgcttcaaagagagtaaaatacctaggaatccaacttacaagggatgtgaaggacctcttcaaggagaactacaaaccactgctcaacgaataaacaaatggaagaacattccatgctcatggataggaagaatcaatattgtgaaaatgactatactgcccaaggtaatttatagattcaatrccatccccatcaagctaccaatgactttcttcagagaattggaaaaaactactttaaagttcatrtggaaccaacaaagagcccccattgccaagacaatcctaagccaaaagaacaaagctggaggcatcatgctacctgacttcaaactatactacaaggctacagtaaccaaaacagcatggtactggtaccaaaacagakatatagaccaatggaacagaacagagccctcagaaataataccacacatctacaaccatctgatctttgacaaacctaacaaacataagaaatggggaaagggttacctatttaataaatggtgctgggaaaactgactagccatatgtagaaagctgaaactggatcccttccttacacctcatacaaaaattaattcaagatggattaaagacttaaatgttagacctaaaaccataaaaatcctagagaaaaacccagacaataccattcaggacataggcataggcaaggacttcatgtctaaaacaccaaaagcaatggcaacaaaagccaaaattgacaaatgggatctaattaaactaaagagcttctgcatgacaaaagaaactaccatcacagtgaacaggcagcctacagamtgggagaaaatttttgcaatctacccatctgacaaagggctaatatccagaatctacaaagaacttaaacaaatttacaagaaaaaaatcaaccccatcaaaaagtgggcaaaggatatgagcagattcttctcaaaagaagacatttatgcagccaacagacatatgaaaaaatgctcatcatcactggccatcagagaaatgcaaatcaaaaccacaatgagataccatctcacaccagttagaatggcaatcattaaaaagtcaggaaacaacaggtgctggagaggatgtggagaaataggaacacttttacactgttggtgggactataaactagttcaatcattgtggaagatagtgtggygattcctcaaggatctagaactagaaataccatttgacccagccrtccctttactgggtatatacccaaaggattataaatcatgctgctataaagacatttgcacacttatgtttattgcagcactattcacaatagcaaaaacttggaaccaacccagatgtccatcaaygatagactggattaagaaaatgtggcacatatacaccatggaatactatgcagccataaaaaaggatgagttcatgtcctttgtagggacatggatgaagctggaaaccatcattctcagcaaactatcacaaggacagaaaaccaaacactgcatgttctcactcataggtgggaattgaacagtgagaacacttggacataggatggagaacatcacacactggggcctgtcgtggggtggcgggaggagggagggwtagcattaggagatatacctaatgtaaatgatgagtgaatgggtgcagcacaccaacatggcacatgtatacatatgtaacaaacctgcatgttgtgcacatgtaccctagaacttaaagcattaaaaaaaaaaagtttgtggctttggtcaccatctttctgggcctagttttctcatagatgaaatatgggtaatgattcctaccactcaagactttcacggcgatgaaatgaaaaaatatatatgaaaagtctttataaagtgcagtttataaggaagatatcatcaaaactattctttcggaatttctgaaactaatcttctttagatgtgatataagacagatctttcttctgctgaatcctgctgtatggcaaacataaagttgaaaggtatactgttgtgagaataataaatatgaaacattggtgtagtgcctagcacatagtagtcacttgctgatagctgtcattactattattactactgctattattaggataaagtagtgtttattcagctggcttggagtaaagcaattgagtgatctgagaggggtaacaaattttcaatccttgtgtagtctgccactttctatccctgaacaagcaactgatttcttttttgagatggggtcttactctgtcgccaggctggagtgcagtggcatgatctcggctcactgcaacctctacctcctgggttctggtgattttcctacctcagcctcccgagtagctgagactacaggcgcatgccaccacgcccagctaagtttttgtattttggtagagacggggtttcaccatgttagccaggatggtctcgacctcctgacctcgtgacctgcctgccttgtcctcccgaagtgctgggattacaggcgtgagccaccacacccagccagcaactgatttcttacctcctttctcaatactgtatgtaatctttccttccttgtgtgctgtgaggatgactttgagctcagagaagtgctgtaaaaatccaggtgagtattgctatcctattgagygtgtgctttaattctgttattatctgcatctgtcagacatggagccttcaccgaggatagtgaggctctaaaaatttcagcatttatctgcagggctgacatgccactttatttagaagttggggtggagatggaaactttccaagtggttgatgccattgagccttgtgaatttgtgagttttgtacttgccctctttctctcttaaccattcttaattttccaatcctgctttttgttggcttcaaatgtgctcaccagaatcctgccagctttagttggaagaaatacatttccgagcttagttggacatcagttttttttgggccctgcccagacttttgacagagaaggtagtgttaagggggttgatggtgtctagacagtaaaatcagaaactttgtaatttatgttgtattacagacgtccacttcccggattggaaaaaggaaactgacttttatctaaggaagttacattaaaaaccaaagcccctgggtatttctgacccatgaaaagttaaagcttgagtaattttacataacattctccagccccttcaaagactggaattattgagagtagtcctgtatagggtcagggatgaaaaataaacttccaagtctcagaagataattcatagacccatataacagtctttcccggctactcacctctgattagacccctgtgagctcacaatgtgagtgggtcttgcacatcagtttcagagggattttggaaagttgtagaggagagaggctaatagcaaaagagcatggaggtgtttggaattccaaagaagattgaagatctgactcagggctcaccccgctaaaaaaatcagacttttccttaagggaaaaagcatgttgttgatttggaaaaagtataacaaaaattaaaagtaccttaattatgcaatgatattttgtttttctttttatgctgtttaatgctcataaatatcagatacatcctcaatattcattattgtggaaaataatagaaaaaaatcttaataagctaggcaaaatttatgtaaaactaaaggcttttaaagcccatgtcagcttttgttttgttttgacctggatcatcatccaggttyccaagtagaattctgagttcctttcagaaaagtatgaacttctttatgtagaactatgacacatcatatcaaaggctactatctgaactgttttagaacacatgtatttaaaatgctgtagtcttattagcattatgaattaattctttgcttttctatcagtctgaaaaattttaaatatcttaaagtaggaaaattagtaaaaactccattcattacggaaaaattgtcttgttattcttacaagatgctaggtcactctccctgagttaaatttcactttgacagtttccagctgattgtgcctgggtcctaayagacacacaataagtgttagctgaactgtatgttgaattctttctaaattttacatcgaaagcacttttcaatgtgtagtaactagatgattaaaatttgtcttgaagagcagatagtttaagaaaacagatataagaaacaagagaagagtgtcatgtatagtgtattgactactaaatactgatgatacgtataatgtgcaggaatctctgtagcagccagggatgtaatggaagcctttttcacagctytgtagccccctggcagagagctgagagatcagaactgtgtcagacacttgggaagctgcagtcctatgacatttactcgcatgttactcagtttaggatgtttaagttgttggcttcccagggtgatatttgatgtttttctttagcttccacagttctagcagaatgcagaaaaggtaaagggtacagtgggaaattcctgattagttggcgaattgtctttacagaaggatgcttggtaatcagcctaagctggaacattcatattccacccctgctaattaatggcagaatgcaaagatagtaaaactgcagaaataacaatgactgattataatagtcaccattaattaagcatttttatcagctcacttaatttttacaactctatgaatttgatattatcacagttttcaaatgagctagttggagttcaaagaagttaaataccgtgactaagatcacagacttagtgaagacgagttatttcaaatcagatttggtctgttttgagttcaatacccatccttttaattaccatcctgttataaagctttttattcaccttcactactaatttctcataagaagttatattttggcttaccctagtctgctcaacaaaagtatctaggtatcagtatatcatacctaaaaatctaagagccctttaaaaatagatcttcctccaggatcatcttgatccctgttctggttatttaatgctgcacaacaaattattccaaaacgtagtgggttaaagcaatggcagcatttaatttgctcgtgaatttgcartttaagcaggacttggtggtataacatgtctctgctttgcttggtgtcagctggggttgctcaaagaggactagaatacagttgacccttgaacagcacaggggtcagtgcatcaactttcacacagtcagaagtctgcagtcatttcctgtcattaggctcatcttccaaaaagtggaagaactacagaatgttctcagatggcaaatagattttaaacctctacattcttgagcaaatttcacccttaaatagaaattcagccaattattttaatctcataaagagccattttaaggagccctaaaatttttttcttctagtttttrttttaggttcagggggtccatgttcaggttggttacagggtaaattgcatgttgctgtagtttggtgtacaaatgagttcatcacccaggtactgagcataaagttagttgtttgatcctcatcctcctccaccaaccctccaccctctagtaagccccagtgtctgttgttgccctttttgcatccctgtgcacacaatgtttagctcccacatataagtgagaagatgctggtatttggttttctgtttctgcattaattcacttaggataatggcctccagctgcatccatgttgcggcgaaggacatgatttcattcttttttatggctgcatagtagtacatagtgtatatgtaccacattttctttatccagttcaccattgatgggcatttgggttgattccgtgtctttgctattgtgagaagttccaaattgccgtctgttagatttgttgtgagaaataaggagttaatgagaacaaattacatgaaacaaatagaagtcctaacattaatggttaatctgtatttagtggtaaactatgcttatgtgtttattaaaattttataactttacattgaacatttaagagattaaatacattggcacaaaaaaactgcatataacttttgactcccccaaaacttaactacaaatagcctactgttgcctggaagccttaccaataacataaagtgcattaacacatattttgtattgtatgtcttatctattttaatcttataataaagtaagttagagaaagaaaatgttattaagcaaatcataaggaaaatatatttactgttcattaagtggaagtggattatcataaagatcttatccatgtcttcagattgggtaggctgaggaggagaaggaagaggaggggtcgatcttgctgtctcaggggtggcagaagcagaagaagatctgcatataaatggacccccctcagttcaaacccatgttgttcaagggtcaactataattatttaaatatccggcagttgatactgggaagactcggataactaactagaggctggcacagtgaggctccacaggcctctctcttcatcactgtgtggacatgccatgtggtctctccagtatggcagaatcagagttgccaggcttcctccatgttcatgttggctcaggttgcccagtgtgtgtggaggggctggtggcaggcagcgagagagggagaaccaggtggaagctgcattgtctttttcaagctagcctcgaagtcactcagcatcacttccatcacaggtttttttttggttagaagtgagccactaaaactggcccatattcaagggaaaggaaattagtcttcccattcctgggaagaatgtcttaagaatttgtgaacttgttttaaaaccatggaggcacctgtgaaccttgcttgagtagtgtctcccatgacacctgtttcaacttaaagtgatagggttggccctggacagaaatgtgcaagaactgagagttgtcaaaaatgtctaccgcttcacaactgtgaccctcacctcccttcagggcctcccttcccaccagtaatggcctgtgtggccatagagctgctctcttctcccacttcacacctcttctcacccccaccataatactcatctgattgattagttagcccaggatactgaagcccagagataagctgagcaccattaccagcatagccagcagagcttctgcagcatcagcaacactttgtgcctgagccagctctgactgaggttcatagtgtcccagattgctatagcatatatgttttcacatcagcagtacatgctttctcatctcttctaacacattcgtattaatgatatgcaacagctttccctggggttttggccaaaagctatattgtccattttagtatattttatgcccatgttctctttgtcttgttaatgtgaattcacatrtagctttaaaatatgataaatattaatcaatgatcaatacaaaagcatgaaagtatttctattaaaaatcatcacaagtttcttccagaggttaaaaataaagttaaaataaagggaaaaaaaaawttttwaaattatcacaagaatattagccaccwtgcctggcctaatattctgttaaggagaccttttttcacctttatttttagtattgttcttgaatttatggccaatgcaataaaatataaaacagatataagtggctgggcgcggtggctcgagcctgcaattcctgcactttgggaggccgatgtgggcagatcacttgaggtcaggagttcgagaccagtctggacaacatagtgaaactccatctctacacacacacacacamamamamaaaattagccgggcattgtggcacacgccagtagtcccagctactcrggaggctgaggcacgagaattgcttgaacccaggaggcagaggttgcagtgagatgagattgtgccactgtattccaacctgggcaacagagagagagaaagagagactgtctcaaaaaaataaaaataaaaaagatataagtggtccagcacaatcatatgtcccttttatttcacttactcttctgttctaggctaactcccatttagccacttggctctctcacttcyttcaagcctttgcttagggaggcctatacagaccactttattatttaaaatttcacarctctccacctcctgcatttctgttccccttactcttcactacttttccgtaggacttactaccttctcacatactacatttacttgttgtacttatttattttttatcccccactagcatgtaagctccactaggatggggattttgtatgtattgctcacccatttattttcattatttagtagtatgcccaacatatagtagatgctcaatgaatatttagtgaatgaaagaataactgttggaaaagaagagaacaaaatcatgttatttgccttattaaatcatttaattagaaatctcaaggcaatcaaatagaataatattgaaactaatgggcaggctagtccaaaggtactgagttttctcagttgattacagtcagttacaggtcgaactctttgttctacccttcccctgccttctcactattgcacttgactagtctttaataatacaataactaatgggcaaattaagtggaaaaatccatttttattttatatagcatcaataatctgttagcaaatatattttttaaatcttatgcaaatataaaatgccttggaaaaatttttattraaacagttataggaacaacacaaggaaaatagtaaaacttagagacataaaacaagataaaagggtatgtaatctgggtaatcattacttattatatactgtcaagatttctattttttctaaatttatatatttaatactctttcatattatatactaattattaatttcaatatcctgtatttaatattgttccaatcaaattctaaaaggattttttgcttgggaagtaagttaaagtttgcctagattcaagaatatgtagatgaaaatagccaagaacactttgaaaaagaagggatagtgtttggtcagagaatgtcacttattgtaacattaaaacagaatattaggccaggcatggtggctaattcctgtaatcccaccactttgggaggctgaggcaggaggattacttgaggtcaggagttcaagaccagcctgggcagcatagcaaaaccctgactctactaaaaatataaaacttagctgggcatggtggcacatgcctgtagtcccagctaccctggacctgggaggcagaggttgcagtgagccaagatcatgccactgcactccagcctgggtgacagagagagacaccctgtctcaaaaaaaaaacaaaacacacatacaatatgatactttaataattaaagtggtactagtgtaagaatagacataaaaattaaagaaatgtcatagtcatggaacagactcaagtgtacataaaaatctggtaaggaggcatcacaagtcaatggggctaggcaactgattaatcatttttaaaaattggggcatcatgtgacacatcaaaattcaagatggatcaaaatgttaaatgtaataactaaaatataataactataaagtaataataaaacaatgagaaacaggtgattttaagatgtgctgttaggatagggggtgagggaaacagtgtaagtggaacaaggaaatcacaataggaaaaatcaatcactttgattacattttacatcctgatatggtatcttaaatgtattttaatttttaattaataaatactgtacaaaaaatgttaaattatttttttgaatcctacatttgatctaagtaacataaataattacctgaagatttaaatgtgtttcttttctacaaaatcaaatatcaagaacatttaacatatgtagattttgaatgagctaaatcagaaataatacaatattttatttgtatcttaagtttaaagtttccttagtattactcttcatagttaacatagcttaggctacaaataacataactagattrtgttgcatggctgttagcttgttgttgacattattgtttttatgaaagaacatgactattttaatgatgtccttatgaaggaatagaaaaatacacaagcttgagatttttaaaaagttgctcaatttttttccagcttaagaatttagtacaagttttatgcatgttgtttgcctagttgttggattgacgataatacctgtaaaattcctkacaatttastgtattaattagccttcctcagaaaatcctgaggatgtttccagactgtgtgccgcttgtacgttattgcagttgtcrttgttttgcattaaggacaggaatctctacagatggcaaccacatacttgatgcattttccagaaatcactgaagagaggtagatttcatgtgcgaaggtggagaagaaagccctgtctcctcgcccctgccaagctcaaacccctgctgctcctctgctgccctcttcctaggtctgccagcctgagtcccttgccaggtcctgggtgttttacctcctaattacaactctgcttggcacctcagcctttctttccatgaaaaatcactagtggcacatagaggaccttaaaaacaaaaacaacaaaaaaagattaaattatatatgtatgtatgtatgtatatgtatgcatgtacgtatgcatatatatgtatagtctggccaaaaaccagttttgttacatggattggtatcacacagtgtaaatatcatggtcatagagtagattcccccatctgtagttatcttctctgaactaatatatttaagccaaaactaaaatggagaattataaggtctagggtattgttttgtttattttgttttgtgggagttagtccaggtcttgatcagttcatgcccctaatttgctttcaccatgctatgccttcaagatgcygaaataccagaattaaaagtagaaagttcctgttgatttttagatgycttaaatattaaacatttaaattaactaatggaaggtgaagtagataaaccaaatcatcaagtaaactgagattcatttctgtttcgttctgcagtaagtcatgtgatattttcctgggaaaattcatatycttaattatctttggtttgcaataatattaaaataactgcatttcctgagtacaattcaattgtgccattaagggatgtggtgttctttcatcattccaggcacgatggaatctactgaaaaaagctgaccattccaggaaaggtggaatctactggaaattggtcagamacaatacacacgaaaataaaatagatttgatgatatttagaagcatgcataatgacagaagttgcattatctctgttctagtgttgcttagacatctcagaatcatagctttgggagrgatgggtggaagttgtgtcattgatttatcactagctagctgagggcctgcttaaccatgtacctgttagcctgtggaaaaagaaaaatgggagatgaagaggccacactttsaaggagttccggtgtggtgatgttyaatcttgctatcttgagcctttattcatttcttcatgctctaggactgccaaacaggaggtcacagtctagggagaggcacagaaggacatgggcctaaagagggagtacattctacatagcsctttcacaactttctaactctgcaaagttaccacgtgtttcctgaggttcttttagaaatcccttttattgtatttaggagttaacaaaatatttaactgtaaagctcatcatgtttgtgttaacattagattgtactcatttggtatgttagcatagatcaggtgcctgaggttgtgggaaattatcatgctctgagatcctgcctcttgtattaatttcaaagcaacttcatgtgtgagaaatggcgggacactttaagatcattcacctcacctagcttgacccttctgtctattttatgaagctgtaaataaatatatgtaaggaatattgcttatatctccaagcattagcattgtcaggatggaggtgctgattactgagtaacagatcaagagcctcctaatagggtcagatgcattactgcacaagggaaggcatgtggaagtgtttctaacactatcgtagagctttctgagaggaaggaaagaagggagggaaggagggagggagagaggagggggtagaggtgaggaaggagggaagaaggaaagaaggagagagggaccataggttttctggttattagacaaaggaggaggattctagcttaaggaacagcctagtccccttcagtccctgaaacttttgttttctcactgtcagacaaagaaggtgaagtgtttgtcaggtgccctgcacaactgtcctagctatccttagcaggactaaaatgcctcctatcaatttcaggccaatacccctgatgaacatcaatgcgaaaatcctcaataaaatactggcaaaccgaatccagcagtacatcaaaaagcttatccaccacaatcaagtcggcttcatccctgggatgcaaggctggttcaacatacacaaatcagtaaacataatccatcacataaacagaaccaatgacaaaaaccacatgattatctcaatacatgcagaaagggccttggataaaattcaacaccccttcatgctaaaaactctcgataaactaggtattgatggaacatacctcaaaataataagagctatttatgacagacccacagccaatatcacactgaacgggtaaaagctggaagcattccctttgaaaatcggcagaggacaaggatgccctctgtcaccactcctattcaacatagtattggtagttctggccagggaaatcaggcaagagaaagaaataaagggtattcarataggaagagaggaagtcaaattgtctctgtttgcagatgacatgattgtatatttagaaaaccccatcatctcagcccaatatctccctaagctgataagcaacctcagcaaagtctcaggatacaaaatcaacatgcaaaaatcacaagcactcctatacaccaataatagagagccaaatcatgagtgaattcccattcacaattgctacaaagagaataaaatacttaggaatccaacttacaagggatgtgacgaacctcttcaaggagaactacaaaccactgctcaaggaaataagagaggacacaaacaaatggaaaaacattccatgatcatgaataggaagaatcgatatcgtcaaaatggccatactgcccaaagtaatttatagattcaatgctatccacatctagctaccactgactttcttcacagaattagaaaaaactacttaaaatttcatatggaaccaaaacagagcccatatagccaagacaattctaagcaaaaagaacaaagctggaggcatcacactacctgacttcaaactataccacaaggctacagtaaccaaaacagcatggtactagtaccaaaacagagatatagaccaatggaacagaacagagccctcagaaataacaccacacatctacaaccatctgatctttgacaaacctgacaaaaacaagcaatgaggaaaggattccctatttaataaatggygttgggaaaactggctagccatatgcagaaaactgaaactgggtcccttccttacaccttatacaaaaattaagatagattaaagacttaaatgtgacaaatttgccaaaattgacaaatgagatatatttaactaaagagctctgcacagcaaaagaaactaccatcaaagtgaacaggcaacctacaggatgggagaaaatttttgcartctatccatctgacaaagggctaatatccagaatctacaaggaacttaaacagatttacaggaaaaaaacaaacccatcaaaaagtgggtaaaagatatgaacagacagttctcaaaataagacatttatgtgaccaacacacatatgaaaaattcatcactggtcattagagaaatgcaaatcaaaaccacagtgagataccatctcacaccagttagaatggcaatcactaaaaagtcaagaaacaacagtgctggagaggatgtggagaaacaggaacacttttacactgttggtgtgactgtaaactagttcaaccattgtggaagtcagtgtggcaattcctcaaggatctagaaccagaaataccatttgacccagcaatcccattactgggtatatacccaaaggattataaatcattctactataaagacacatgcacacatatgtttattgcagcgctattcacaatagcaaagacttggaaccaagccaaatgcccatgaatgatagactggataaagaaaatgtggcacatatacaccatggaatactatgcaaccataagaaagaatgaattcatgtcctttgcagggacatggatgaagctggaaaccctcattctcagcaaactaacacaggaacagaaaaccatacactgcatgttctcatwcataagtgggagttgaacaatgagaacacatggacacagggaggggaacatcacacacaggggcctgytggggggtgggaggctaggggagggatagcattaggagaaatacctaatgtagatgacgggttgwtgggtgcagcaaaccaccatggcatgtgtatacctatgtaacaaacctgcacatactatacatgtatcccagaacttaaagtatataataaaaaaataaaaaataaataaaaagcctcctatccccacagccatccccagtttcctagccttccagtctatagctctagacttccaacaattgccaccttggcttgtttcacttcctcatgttgcttcctctggccatatggccacagattcttatcttttatcatacatattcaatagaagaaggctgcaccagaaaattttaatccagcagcgttcttatcctctagctaaaatgcttgatcttcctgaataaagcacagcattctttgtcttccaagcaagcaggagtaaacaggcatgctgctggctatttatgttgtctggagttacttctcttgagtctttgctgcaggaagttgatgaggaacaagaccatttccactgccttctcagatatcagttctctgaccttggcaacaaccttacccttgttaagtagtgtttgtctctgatatggtttggctgtgtccccacccaaatctcatcttgaatttgtagctcccataattcccacgtgccatgggagggaccaggtgggaggtaattgaatcatgggggcgaatctttcccatgctgttctcatgataatgaataagtcttatgagttctgatggttttataaaaggcagttcccctacacacacactcttgcctgccaccatgtaagacatgactttgcyttttctttgccttctgccatgattgtgaggcctccccagccatgtggaactgtgagtccattaaacctctttcctttgtaaattacccagtctcaagtatgtctttattagcagcgtgagagaagactaatgccgtctccaatcaaacctctacacatacaataatatccttcttctgagtcttggttctgagaagtctgaaaaggcagatggataactggaaggatcttgggtcacacaaactacttgggttcttacttaggtagaccacttcatggcagttagctgtgactcagctggttaacaccacagcttcctcttcccttctataaccaataagactgggatgtgggtgccatgaatgtaagggttgggtctccctatcttggattatacttctctcacctgtgttcagccacactattagaggagacatttgacacctgacagactggagcctttcctatcccctccctcacctgtgatatttgcggagctagttcattaggaaacacataacatgtttatgaggtgggaggggtacaaaaagaaaaaaaaatgtatgctcaaatatcaggggctcctaatgcaagtttttctatccctctttctttctctctttctttgttacatccttagagagaaacaaaatatttacactgtgtttgtttgttttcccagagcaattgacaacagacagtcatgtaaacatacccagtttaatgatcatgtaagaagatgatgactatttcagtctgtccctttgagctggctctgcatagactggcaagacacaagcgttttgtacttgctatttctagataaagatctcactgctgtaaaagtcttgcttgaatccaagttaccatatgaaccagttggaataaaaatcctaaacaaagttccttaactagctgcttccttctgagcaggctttttgacagttagagatctgatgttttgcattaaaaaatttcagaaaatgaacagattttcagacatgctgtagtacagaatgccctcttctccagtttgttttccattgtctcccacttttttttttttttttagctcacttggaaaaaaacaaaaacaaaaacagagccacaagcatgatgagttcttaacacattgtggaacttagtagcgtttaaatgagaatcagagacctgtattctcttttatatgtgaaggcacctgatgtgtgcttgtcttggtttaaaggtgaaatggaaattggcactaactatgatcctgtggaagtcacttaacttttctgagacttatttgccttcgtataaaataaggaaattgaactaacatcatccttaagataatgaggtttagaagttttagcccaagtgggtagtcaaggaaaatgtaatttatttttctttttccttttttttttttttttttgktttttttaagaatcagagtctcactctgttgcccaggctggaatgcagtggcacattatggctcactgcagcctcaaactcctggggttaagcaatgctcctgcctcagcctcccaagtagctaggactacaggtgcacaccaccatgcctagctaagttttttaaaactttctgtagagatgggggtctcactatgttgcccaggctggtctcgaactsttggactcaagccatcctcccacctcgacctcccaaactgttgggattacaggcatgagcctccacactgggcttgtttttcaactcctttgagatgtcaggtaatttattgataggcaatattaaattagcagaagttgttttgagtagcttgttacctacttataataggttagtgtcttgggtctcaagtatttcagaactgctcaaatagtagctatgcaattgcttaggccataaattaattcaattaacgtgtattgaaggacttctgagtgcaaggacttaagccaaggcacttgctacataatgacatatttagtctgtggagctcttgatagtttacaaagcactttcatttaaattgtttcattttatttttataccaacactgtagagggggatatcaccattttataggtaaggaaattgaggcctagtgatactacattaacactattattttataacttaaatctattatttctaagttccaaggaaacaaggaatgggaaaacataaaggaaaactttttatgaaaattaaatatttgattatggtgatgatggcttttactgagctctcattttgtgacactgttataagtgttacgtatgtattcatcaatttaattcttgcaacaatcctatgagagaggcactgaaattatccckgttagtaatgaacgtaatgtgaggtccaccaggacaggatattttaaaatctgttttgtaaatgtatatccccggtagctagactagtgcttatcacaaaatgaatacttcataaatattattttagtgaatgaatctgtttttcaaagagagaaactgaggcccaggataattaagtaactgtccttaaccaaagtcactcagctaatacaaggtgggtacaagatttgaactcagacagcttattcaagaattcttttaagaccacaagctatccttgttttaaaaatgaaacaaaataacctaccagccaaaactaaataygtgtgttttggagggaaattttaaactaccttggaaaaacgtaataacttctcttatcctcggatttaagttcttgcaaagaaacatttacttgatgtaaaacttcagactggagatataatcgttacgtattgatggtgatcagacttggaaaacagttgttaagtattctggtgtttctgcttaagaatgcattctctaagtgtgtttgatattttatgtttgtattggcaaaagtattccttatagatgaggaaagtctagctctgatttatccatcgaagaaatataaatgtctgagagatggcatggctagctctagaagcagggagtgggagttgtggggaaaggaatacaaattcggatcaataaaaaaaaatatttgaagaaaactgagtaaaattactagcttgcagagatgaacaagtgaaaatctagaaagaaaaataaaaaaagaagtgatggattgtctttgaaaagtgcaagtctaaaactacagtcctgaagtgagattttggtttcaacatgaaagaactgcagtgtgaaatgtaatgcctaacttcatctggtagttaatgtgacatgacagctcacatgaaaatgaactgcaaataaatgcttaattttaaaagatactgtatgatctcaataattgaaayattgaaggcttcttaacagagcataagtaaatgtttcaataaaaaaaagggatactcttttctacagacagccaacgacaatagactggatgactgtgatcattctcattattgtttatataactaattcttatctcttcctatgtgtttatatttgcttcctttttttacactgatacattagaaaggaaagccaaaggtcattttctctttattgtataacttttttatkattatagaactaataaatatatactcattggagagaatttggaaaattaaaaaaaattaaatttaataacacagcacttagaaatttcattaaggtggtatatatgcctatgataaatccttagggaactcaggaaaattgactggtgtttttctaattatatagccctgtgaactaaaaaggaaggagataatggtatctatttttacatttgagaaaatggagatactagttaagggggaaaaatagttttttaaaaagcatgctcaccagactatctctgtatctacaaagatcttcttttctttacttatatagtgtgtggacagatatcaccttagttcatatttgtgctgaaaaatataggtatttgaagataatcaggttgcataattcattctgtatgttagtctcacattccctatactgccttgatctcagtgcaattaataacttaaaaagagaagaataccaggctcaagtttaccttattgctaaattataccaaagacttaagaaataacaccaattctccttaatctcttccagaaaacagaagcagagagagcacttcctaactcattctgtgtggccagtattatcttaacaccaaagccagataaagatattacaagaaaggcctataggccaatagttctcatggacatagatacaaaatcttcaatgaaatattaggaaattgaatctaataatatataaaaaaattatacacaatgaacaagtgacatttatgccaggtatgcaaggctgattcggcatttgaaaaccagtgtaatccaccacatcaacaggctaaagaagaaaagatatgtgatgatattaatgtgtagagaaaaaaacatttgacagaatctaacacccgttcatgataaaaatygcaacacatacttaagggtgacaaactcaatgcttgccctctaatattgggaacaaagcaaggatttcctctctgaccactgctgttcaaaactacagaaagtcctagctagtgtaataagaaaagaaaagtaaataaaaggagcacaggctgagaagaaagaaattaagctattttttgcatgattgtctccataagaaaatcccaaagaactgacaaaaaagaaaacacaacttctagaactaataaggaagtatagcaagatttcagggcacaatgttaatatacaaaagttgattgctttcttacataccagcaatgaacaattggaatttaaaatttaaaaacaatacatttacagtagcaccaaaaaagcaagaagggagggagggaggaagcaaggggggaaaaggaagggaaggaggaaaaatgcmtacatataaatctgacaaaataagtacaagatctatgtggaaaaccataaaacttggatgaaagaaatccagttccttgttaatgaattggaagactcaaattgttaagatgttaattattctcttcttcacctatagatttgatttattcccaattaaaattctagcaaaagctktcctgtagataatggcaaactgattctaaagcatatatggaaaggtgagaaacctagaatagctaacataatactgaagaagaatgagtggaagactcacactacctgatctccagatttcctataaagtcacggtaatcagtacagtgtatattggtgataaaataggcacatagatcaatgaaacagaatagagagcccagaaatagacccacacaagtataggcaatttatctttgacaaggattaaaagccatttctcctaatctgctcagcctgccataacaaaatgccatagattgggtggcttaaacaacagaaatttttattttctcataggtctggaggctggacatcttgagattagggtggcagcatggttggattctctcttcctagctttcagacagctgccttcttgctgcgcgctcatatggcctttccttgctttgtgcacatagacagggagaacaagcaagccgtttggagtctcttcactaatctcatcatgagggccccaccctcgttacctcatctaaccttaattatctcccaaagatcccatttctaaatatcaccacactggggttagggcatcaacattttagggggactcaattcagtccatagcaccactcagtggcaaaaggatcttttcaacaattgttgctggaacaataggatgtccataagaaaaaagtgaatctaggcacagaccttatacctttcataagtattaatgcaaaatggatcatacaccaaaacgtaaaatgcaaaactaaaatttcttgaagaaaacaggataaaatataggtggccttgggtttggcaataaatttttatatacaacaccaaaagtatgatttatgacagaaaaattttataatctacactttattaaaattaaaaacttctgctctatgaaagaaactgttaaattaataaaagacaagccacaggatgggagaaaatacttgcaaaacacatatctgatagaggagttgtatccaaaatatacgaagaactcttaaaacacagcaataagaaaacaggctaattaaaaagtaggaaaaaggcctgaacagactcttcaccaaagaagatatgcagatggaaaaaaatttgaaaagatgcttaacataatttgttgttaaggagttgcaaattaaaatgagatatcactacccacctattcaaatggctaaaatttwaaaaaactgacaatatcaatcrcttggcaaggatacagaacaataggtactctttttattgctagtaagaacagccattttggtagtttctttcaaagctaaacatgatcttaccatacaatccagcaatcatgctcctaagtatttacccaaatgcattgaaaaagcatgtccacacaaaaacctgcatgtgaatgtttatagcagctttattcataatcaccaaaaactggaagtaaccaagatgtccttctatatgtgaatggataaacaaactatggtacatgaatataaaggaatatttttcatcataagaaataagtaatctttaaaagacacagatgaatcttaaatgcatattgctaaatgaaagcagccaatccaaaaaggctacatactgtatgattccaattatatgacatctagaaaagacaaaactttagcaatagtgaaaagatcaggggctcagggagagagaaggagggttaaacaggtaaagcacaggggattttgtgggcagcaaaactattctrtatgatactataattacagatatgtaatttgtcaaaacccattaacttcacagcacaaagaataaacctcaatgtatgcaaacttaaaaaaaaaatcattcaggaggttgggagtcccagaatggaaagtagaatgtgataaaaccaatctaactgtgttacaatgtgtgaagcaacctcactgaagcgggtggaggagaaagctgctgacctcagtaactttggaaatgagtggaatttgtaagattaaaaacaaaagatacaacacaaaaagaatgtacagtattctcattgataaagttatttcttttgtgatatggtttggatctgtgtccccattcaagtctcatgttgaattataatccccagtgttggaggtggggcctgatgggaggtgattggatcatggggtcaattttcccatgaatggtttagcaccatctccttggtgctgtcctcacaatagtgagtgagttctcacaagatatggttgtttaaaaatgtgtagcacctccccctccctctcttttgctccttctctcttgtgaagcaccagttcccgcttcaccttccgccatgattggaagcttcccaaggcctccctagaagcagatgctactgagctttctgtacagcctgcagaaccctgagccaattaaacctcttttctttataaattacccagtttcagatatttctttatagcaatgtgggaatggtctaacacagaaaatcagtactgaggagtgggacattgctataaagacacttgaaaatgtggaattaggtaacaggcagaggttggaagagtgtggaaggctgagaagaagacaggaagataagggaaagtttggaacttcttagagactggttaaatgactgtgaccaaaatgctgacagtggtatgcacagtgaagtccaggctaccaaggtctcagatggaaatgagcttattgggaactggagtaaaggtcacttttgttataccttagcaaagaccttggctgcattgtgtccrtgccctagggatctatggaagtttgaactttagagtgatgacctagggtatctatctggcagaagaaatttctaagcagcaaagtgctccagatgtgccctggttgcttctaacagcctatgctcatatgcaggagcaaataaatgacttaaagctggaacttatatttaaaagggaagcagagagtaagagtttggaaaatttgcaacctggccatgtggctgctgagcaaccacttgctagagaaatttgcataactaaaaataaggcaagtgctggtagccaagacagtggggaaaagtcctcaaaggcatttcagagaccttcatggcagcccctcccatcacaggccctgaggcctaggaggcttccctcctaggtttcctgrgacagacccagggagtgtgctgccctgcacagcctcgggacactgctccctgcatcccagtcgaaccccatctagccatagctcagaggagcccaggtcgaaccscagctcagaccacagctccagagggttgatagtttgcaaccttgataaaatgtgatgaaaatggcactttacccctgtgattctctccaaaaaatgataagcccagactaattgttatttttaaaaaatcaaggaaatgcaacttgagggacattctacaaaaataaaataaaataaaatcagctctcctgaaaactctcaaggtcttaaaaaataagtctgaaaaattgttatagccaagagaagcctagggaggcatgaggattcaaatgcaatgttggatcctagatgggatcccaatataggaaaaggacattaggtgaaccaatatatggtaacaaatgcatcatactaacgtaagaaggcaataataggggaatgcatttgcaggtccatataggaactttttgtactagtttcacaatttttctttaaatctaaaactgtcccaaagagaaagtttatttttaaaatatgttacccagacttttttttttttttttttttaagatggagtttcactcttgtcgtccaggctggaatgcaatggtgygatcttggctaactgcaacctctgtctcccggtttcaagtgattctcctgtctcagcctcccgaatagctggggttacaggcacatgccaccatgcctggctaattttttgtgtttttagtagagacagggcttcatcatattggtcagggtggtctcgaactcctgacctcaggtgatctgcccacctcggcctcccaaagtgctgcgattacagatgtgagccacacttctggccacattacccaaactttcttattgctactgtttgaaggagcacttcatcgcacaattccaggagacaccattcatataatggtatctcctggagttgttcaaggctttaacacttttacaattttaatggctttttcctaggaaaagcaatcacatctgtcatgcatcaacttgtttttcctgtaaaacttagcatacgttgattacagatcctacttaactgatttgtccagctaggaaaagttgggcagaaccagtcttttataggcaaaggcatggaaggctctttccctcttgtaatgcagacatcaacccaactacgatatgagcagagggcatagagggagccaagttggagagatatgactggcttctcctgtcctgacctataatctgtactccactcctttatccaccactaacattgattatgggataggacccatagcatggcaagatagtgttcctgttgcaccaggaaccaattcaaatggatgggaaagcagggatatgggtactgtgttaaaaggagaagtgacagcattcctgaacactgaaaaggacatttccarcatccgaagagatgctacattttccagcttgctagagagaaaggctgaaagataaaaacttttgttgacttcctctgcaaacgagcatttaactgaaaagtgtaaatgaaattttaaataccaatgaaatgtgatgccttctcctggtatttggtccataaattatgttgcaccagagtttagatcatagttcgcccatttcagaccaaattcatggtcttttaccttctgttcctataaattataaaccccagatgtgtcaaattgtataataaacacataaaaagaaatttgttttttaaggaatttcataaatttcttgttttaccgagttttattggtctcattttagtgggacaaaaaacaaattaacctttcatgttttcacttgttacattgtagagagaccctgaattgttgggacgaaaaagggaaatgcttttcttggaccaattttttgattggtccacttgctgagataagcctcctgctgaatcaaatgtatgtttttgtgtttggtcttggatcttatctgcctgcagcagcagcaagcttaatagcaaatgaggttcaaaaagatgaagcagctatttcagcctcttatcctaatgttttcaaagagctctgtagatttggtcattatgcccatcctaatcaaactgtctgaaagcttatcttctgccaccatttcctacagactttccgcaaagcaactatgatttgtaatcgttagtagaatggtatgtggtatgtaaatatatgtaataattatatttctaaaacagtctttgtgaccatcttttaaaggatctcagcttgacaatgaattgcctatttttagttttcaaatcagggtatttttcaattatcttgcagttgattttctaaattcactcttcaattcatgagagaartggcttttatagggcaaatacatactatttgggcattagagaggacagagattattttattctttttgtattgaataattttgcaggaagctgctgctgattacaaggagagttatatgtattaagattgataaasagaaatatttttaaggcttttagatttccctataaggagataggatttacattccaactttgattttcttcaaagggatcctgtttgcttaaattctcagaaaatatgattggacttctcagtcaactgagctgtaagagtggtgaagaacctgccctcaggaagggacctgtcaacatttagagggtgtgggggtggtgatattggggatggagactggcatgatggaagggatgaggcctagaacacaagcatatcgaacccacttgcctctctgtgaatggggctcttgcacacagccaggcctgacttccctccccgctgttcccactcacccagcacagtagactgatccagccctgccaggaggtggctgtccttcaccagcgccaactcctggctgcacgctgtgctycacagagccttccagcccagccagcttggctgtyggggtctcagatttcaactcaaggtgccagcagagtcccttcactaaaatcatattttttcacctgataatttgatcattttacagttggtgggtttcatccacaaaaaatggttttctaaaaagtaaaatctagtgttgtcttcatgatgttatatgtaggaccactacccggtaaaagccactgagagaaccttggttagaaaaaacactagttcatccaggtgcagtagtggctcatgcttgtaatcccacctatttgggaggccaatgcagacagattgcttgagcctgggagttcgagaccagcctgggcaacatggcgaaaccccgtctctacaaaaaaaacaaaaattagctggatgtagtgatgtgcacctgtggtcacagctactcagaagactgagatgagaggattgcttgagcccacgaggcaaaggttacagtgagccatgatcatgcagctacactccagcctgggcaacagagcaagaccctgtttcaaaaaaagaaaaaaagaaaagaaggcaccagttcagttgtctgatccactccaggtctgaccacactattctaaattctttcttttccagaaactagagacaactgtttttaaaataactatctttgggaatattatgaactttatgaacatttccctgcagataatcaaactagtcaaatactgtttgtaggctgggcatggtggctcatgcctgtaatcccaacactttgggaggccaaggtggctggatcacctgaggtcagaagtttgataccagcctggccaacatgttgaaaccctgtctctactaaaaatacaaaatttagccggtgtcatggtggatgcctgtagtcccagctactcaggaggctgaggcaggagaatcgcttgaacccgggagtgagactccgtctcaaaaaaaaacccaaaaaaacaaaaaccaaatactatatatagaaggaaaccaaaatcacagtcacacaaagactgtgataagactttgttagagtgaaagattcaaaaaatttatattcttttttcatacctcgaagtaaattatatgcaaatatgtcctaacataagcaaactcaaaactaaaagtatgagcatcagtattaataaattaaggggttattttatttgcttttctttctttaatattatttgcttttctaaagctttcatgatataatttatataagtagataattcctatggtaggattcaggaagaatttgattcattttaaaatgtagctgacatataattttttaattattgaaaagtatacattcagaacagtgttttaaaacaactgaaaagtttaaagaaaataaaatgaatacctgtatacttattacacagatttaaaaaatcaaaatttagaaggcatctgtgaacctctcctcaatcacaatcctccccacagaggtaactactcgtctgagttttatgtcaacctattcccttgtttttcttcattatttcattacttgtctatttccccccaaataatatagtgtttcatttttttctgtttttgaactttgcataaatagaatcatactttttatgtttttgtgtgacttattttacttaacattactgtatgatgtatttcaatgtatgaatatattcagttttttctgctgatttatatttggattgtttcttgctattaatactatgagcaaccctgcaattaataaactgaaatgtatctcctaggttacacgtgctagaaattctctcagatttctagaagtagagctggcttgtaaagtgtacaagattttaagctatagtaagtactgctgaaatagctttcaagcatttatgttctcacaagcaatgggtaaaagtgccgcttggccaggtgcagtggtttcacacctgtaatcccaagactttgggaggccaaggtgggtggatcacgaggtcaggagtttgagaccattctggccaacatagtgaaaccctgtctctactaaaattacaaaaaattagccgggcgtggtgtcaggcacctgtaatcccagctactcaggaggctgaggcaggagaatcacgtgaacttgggaggcggaggttgcagtgagccgagatagcaccattgcactccagcctgggtgacagtgcgagactccatctcaaaaaaaaaaaaaaaaaaaaaaaaaaagcaacacttgaaatatttgattttcrttaaagtcacaggggccttccaaattttgattttaaaattttccttctattttttaaaaaacaaaaccattgtggttttcatttttctttccctgattaccaatgagcttgggtatcttttcatatgtttatgggccatttgtgtttttgttcattcatcaaatgttgtttgagtacatcccatctgccaggcastctttgagtctctcctccactttcaaagaacaataaaatagaaggaataacctagaaacaactccacacatatgtacagggccataactcagacaaagagagcattgtaggttagtgggtaaaggagaatctctctcctccatttcttagaaagtggaagagaaacactgtacctatcgatcaattgtccatttttctattgagttgtttctctttttcagaggaattctttatatgttctggaaacatcctttgttgattgtgtgtgttgcaaagattgtctccaagtttgtggcttgcctttttactctgtggtactttttgatgatgaaccagagctcttaattttaacgtggtcagatcctttctttatattgtcttctaaaagctttagcattttgcctttcatgtttaagaccttacttccatttggaatgtattcttatatattgtgtgaggatgggatccaatttccttctttttcttgttacccacaccgtatatggagaactaactctcctggcaccattattgaatggtctgtccttttcctgctgatctacaatgctctctttgttgtgagctatagccctatatatgtgtggatctgtttctgggttctaatccttctattttattgttctatttgtctctctctatgccagttctaccataccactgtattaattactcatcacaagaagaaaaggataacaattattttgaaagttaaatgtacagtgcctgacctgatacatgttaagcatacaataaatgtcatctgttattattttagtaggaaacacattttcatatgttgttttaaacaatatctaaaatctgtagagaattagkcaacattcaatagatataaccacttctgtttttgcatttgatatgagttactgtagctacccaaagacttaagaaattcatacattcasttactgtttttgtcttcttctgaagtatgttggaaaagatgaaagatgaactctataatttctttactcatcctcactctgcagtctcttagaaaggttaaatgaagaaggcttgacttcgattgtttttcggatttgaattttggaaaagaaaatgatgctggaagaataaagcagcatatttaggaaagactttcagtgataaatatctggagtatcctgttttctataccttgcttctatgccatattttacttattataaactacctcaggatctttgttaaataaacccatttatttgatgaaggagaaggaagtgccacattttaactgttactgaaagaaatgttctttgccctgttggtcttggacttccacaaaatacttgattccagatgttaaattgttttttcagaagccttgttaaagggccagagcattagatttttgaaggcatttccaaaccccagctgattatcacaacacacaggaatccaaactttcaaagcttagctttggctcttcagtgtatcagcagctgcaaaaaatacgtkctaaggcacaggtkcataggactgggatccagtgtccttaaatggtaaaactttaagtaaatttcctttactttccacttatcatagatgcagttcagttgtttaaagtgcactaaatttccttgattccatcaaaagtagtgagaacttgataatggtaatagtcatgtagcagcctggtgtgtaggtattcatggtaatagatttattttacgtttttctctggctatatatttctagaatatattaacaaagtaatccttcctcagaaaaatttattttttgagagagggtcttgctctgtcacccaggctggagtacagtggcaccatcacagctcactgatacctcgacctgctaggctcaatcagtcctcccacctcagtctcccaagtagatgggtctaaaggtgtgtgccaccatgcccagctaattttttagttttctgtagagacaaggtcttgccatgttactcaggctggtctcgaactcctgggctcaagcaatgtgcctgtcttggcctctgtaagtgctgggattacaggtgcaggccaccatgcctggccctcaaaatattttatacatgccatttgcactgttctttagaccagttctcatcattctctaaggaactaccttgatgcttttccaaggatgaggggtacaaatgtcctctcaacagatgccttcaacatgatgaagccaaaaagaggtgggattagggggaaataaaggggaagttttgggccatactacaccgattggtagtaaagaagaggggaagatgttctcagtgaaagaaataaccgagcaaaggcttagagccagtaatgaccaagagacttcagtcacaggaagatcgtcttgtgttgagtgaaggggtcattgtggtttgccatgagggactagctagaagaggcagatgaacaattgttagaagaccctgaaagatgaaattcagtgtgttctaacagtagactgattatttctgtgttcatttgtgtcacttaacaaatagcgttagagcctctagcatgacatagtagactccgactcaagaaattcctgtagtcacatggagttgaattataaagacagtttatagtaaacaagagactattgcaggccttaaaacaaaacctttcacatgttttaagttaattttttaaaaaaatattcttttctctgccattggcactatgtctggaatttggtacatgtaggaattttaaaaatcagtccaatgcctctcttaaattccacaagtacattctatatcagtgggataatttagacggaagttctaatgatatcagtggagaaaattcctgcaggccttggtagattggaggttctgcttttattcctttctataccctcttccagctattgattgacctccacagtgctgaggctgaggtgtcggctgacctttctctggtttctcaagattcctccctttcagagcagaagccagcatgatcagaatacttctaaggaatctgcagcagcagcagtccccatggggagcctcagaatcatagtgaaacacagcgtttaccttcaaatggctcagcagttgccatcatggcagctatcaggaactgcagatgtctctttcatagtctttatatttaggacccaatagaattaattgtctgttgtcctgatctatatctagacagatgtatacaggacagccattttgctaagagctagggagtctagaaatgaaagacagtccctgcccccagatgagctcatgcaatttggtgtagaagacagaaggacagcacagcatggtagtgaacacagcatcagtcccctcatcagggtcaaaatttactttgtcaagcaaatgagcatcctrattaaggcaggcctgttacctttctaattgtttctctagttatgtgaattcctctgtttgacctacttgaccttaacacttgtcgtttgttttttaaatattactctaagctacttactgcaattgttccaaatgtttaatttattaattccaggcaattcataacaatttattgctatttcttagactcctgcctcactgtcwactgttattggtctgtttcatggatgacagtggttaaatgttttcatatgcactgcagtgttttttgtgatgctgtgataacttgtgggctagactaagatagctggtcaggatccccgccaagacactcagtcagtggacctatgaagaatatgcttgggtagagttgggtctcaagacatcatctcagctccatggatgaacagtgctatctacaacagcctacgagttctttgatggttgactctacccttttatactgtctccctccctctttcccacacctgtcatcagaatgcctgcttcttataggttcatattccaccagaagcagggggatatttctcattggcttgtatactttggcattctagcagggaagcaaagaattatttatgatacaaacttaggtaaaattgagaatcaaagtattcttaggactaggtcaagccaactactacaaagtcatctttaaaaatttattcaaattatgtgttttaaactcaattatactcagtacctgaaccccagaatattcaatgttaacctcatttccattttttttttttttttgaggcagagcttcgctcttattgcaggctggagtgcaatggtgccatctcggctcaccacaacctccacctcccaggttcaagtgattctcctgcctcagccccctgaatagctgggattacaggcatgtgccaccatgcccagctaattttgtatttttagtagagatggggtttcttcatgttggtcaggctggtctcaaactcccaaactcaggtgatccacccgcctcagcctcccaaagtgctgggattacaggcatgggccaccatgcccggcctcatttcctttttctcaaaaagagataaacattattacattttaaggaaatttctgtagatctattttttttcccttgagaaagggtctcactctgttgctgaggctggagtataggggcatgatcacagctcactgcagtctccacctcccaggctcaggcgattatcccacctcggcctcccgtgtagctgggactacaggtgtttggcagtgtgcctggctaatttttgtattttttgtagagatggggttgtgccatgttgcccaggctggtcttgaactcctgggctcaagtgatcctcccgcctcagcctcccaaagtgctgggattacaggcctgagccactgtgctcagctaatctataatttcataatctctgttgatatatacataaggagaattgttatgattacaaytggctttggatcttcccaattaacttgcagtccaacaactcaagtagggctgaggactagtatagcaatgagttatgactgataacttaagatttgacaaaaactttagcataggtaggtgcttcacaattgayttttaactaatatgtacaatttcttataaataaagttgaaaacttatatatgcattacaaataatgctgaaacagcwtgaaatgccattatagaggtgaatgcaacctgctttgggagcacagaaraagtaaatccctgctgtggaagtcaggtagccctttaccaaagaggcaatgttgaagccggtgtagagcaacaagcaggagatccaggtggaaaaaggtaaacaacgttttaggcagtatgtgaaaaagcatagaagtgtgacgtagaatctccacagaccagtaggaagtttgatgtgactagaacttaaagtaacaggagaaaaattgggaagttagactgtgaatgtcaggttgagatgattacactttgtcctgtattgtcatttaagggaaaataatgaaggtgtttcatttgggcagtgacatgatyagatctttctctttgggaatatctctgctgtggattagcagttcaagacactagactcaagaaaaccacataggggttcctgcaatagttcacaccagaaatgtggaaagtctggaccaggggtgtccaatcttttggcttccctggggcacactggaagaagaaaaattgtcttgggccacacatgtaatgtaccaagactaacaatagctggtgagctaaaaaaaaatcatcaaaaaaatctcataatgttttaagaaagtttgtgaatttgtgttcggctgcattcaaagccatcctgggctgcatgtggcatgcaggttgtgggttggacaagtttggtctagactatcagttactgtgggaatggaaaggaggggtgaagttggaaggtctttaagagttagactgttacccccatgagggcaggaaccrtgtgtgttctattcagctttgacccataaagctctctactcctctgctccaagtgacaaggcccctttctggcaagatccccatcatattcgtcttactacttggattttagcatccartgtaacaagcccattcattgcctctggtgctattggatacatataattgtcaagagtgaagtaagttaaaaaaaataggctaaatttcttcactcatttgtacttttccatatgctgttttgttctatatgaccatctaggttattctggaagaacagctgtatttttagtggatgtgtataacttgccccatttcagaaagtaagctaacactgtgacatactttttagcaattttaaaaatgaaatggattcaaatgtacaggtatgaaaagatttccaagaagtactttttttgtaaagtaagttatagaacaatatgtgataatatattaaacagggaaaacatgtaaatcaaaatgatatacctttatgtgttcatttaatcatggaaatgctccacaaaacaatatgaaaaggagtacttcaaattgataaacatggttacctctggggtggagcagagaattgttcagttaatcctgaatattttaccacaaaaagataaaaaaaaaaaaaggaagaaggagaaaaaggtaaggggaaagatgaggaagaagaagtaaagcagacaaaagcacagctctttcaaggcagaacgttccatgctctatgcttacatttgtgaagggcaaaagaaaccaggaagtatatctttgttcaccactgggaaacaaggatttggtttcatggattatttttattatagctgctgaagttgtgagtgataaagtagtgcaatgcgtctaatactcaattttaaactagaatatccatttgtaagcccgggcctgcacttgatttgaatacctatgaatgcaagccaacaatttaaaattccacatgcgtggtcttccagttctaaagcaggagaaataatacttgcccctaaaaaggatgttgaggagacaaatgatagatgtaaccaaaagagccgagctttttgaattttatataaatataagctaggatgtcctggtatatataatctttacatgtatgcataaacttagagacatgggatatctgttacataatgtttaccaattttaaatgcacaaattattgtttagggtaatgtttcataacccttgggtcaatattaccaaaaaccaacaatcagttctttcagtttgggatttcaaaaagcctcctttcagatttaaattgaataggaaaccattatttttagtgcttaaaagcacggtggtgtccccttagaaacctccaattagtagcagccattgtctaattaggtraaaataataatctatcgattgttataaaagcaagatattataattcaagtgtgtttccagatgccagtgaattgctggaaagctgcaagtttaactttccgctctgatagagttttaaaagaggtcagggtacattttaccatagtgtctagcaatgtgagtttattcagaccttttggcagacattcctgcacactcaagctaaatcaatgaatcatccattgttggccagctccgctctcagttgctaagagattttttcaagcatactgaggctttattctacatggtctgtaaaaagggcaaactgtattaaattttaaaatgtctcatctttcctaaattagtaattaaaattttacccagaactttaatactggggcaatgggaaagtctgtgtgcagctggaggcctttctacttgggaaaatacgtgagaaaacttcctgctcataactcttcagaaatatgtgtgtggaggaaatggaaacatttaaaaagtggacacatgaaaaacaaaaactcaaggaggaaggtctaaagtctcttaaagaaatataatgtgtttttcttcttatatatttcaaataaaagagctttcctttaaattttatgaaatatactctaattttccttgtttctctttgagtcataaagacccttgtaatatagcattttattttaaagctttaatataatagtttttaatataaaaatttaaaactaccatgaaataaaggaatgtaattttttcagcttgccctttatgaatgtttatagtatattctgttctctatatgtaataacagtgcttcgtatactcaaaaactaaaggagtatatttttacgtgttctcaccacaaataaatgatcagtatatgaggtaagccatatgcctgattcagccattccacaatgtatacatatttcaaagcataatgctgcatgccataaacatacacaatttttgttaattaaaaaattaattttttaaaaatgtatattctatatgtatccttcttgaatatttcaagttttaaaacataatagttgtttcatttcttttctctttggacttcatgatgatttcacattatagataatctcataatttatcatagaggttactatttcattttgctgagaggatggggataatttggactacaaatttaaaaagagaaagaaaccaaatgtaatgtatcttaaaaaaatatttttaagtttattggatccagatgtagtgatgaggaaagcttctcttctgtgtttcttagtttctcaagataaaattctatttcataaatctctatgaggactgtatcaaatattctaaaagaagcttttgagatagaacgtggcttttggaattggacaggcctggttgctccatgttctagacagtgtggccttgaacaaattactcctcatctttgggctccaactttcacatttataaagtaaacataataatgcacaccaccatgggtggttatggaattcaaatgaggaaacatggtaggtagccctggcacatagtgggtcctggataaatgtcagttcttagcttctttaaaactgttggaggctaatatccgtgtgctcttaaatacaaccaamcctctttaagttggcaacataagtgttaggttttacttctaatttcaaaagaaacgtattcgagtgagtggctgagagcattcattacatgagggcagcttggaataagagaacgggatagtcttgcaccttggcattctttcttgcagagaaacaaaacatttgtgattcttgggttcttgtctcccctctctgaggctctctctttttcatagaggattccaccttctctcaagacttgtattccaacatgctatctccagtttactattcactgctataaagtagggctttttttttttagggcactttttagatccagccaaggaccaagtctttcccagccaaatgcggagcagggaatggaccatgccttgatacagcccctgctcctgttgatccagaccacgactttttaagactttaagcttacagaaaaaataaggtgtgacctccatttacatgcttaagcgtcctgacacctgtgtttatttaaaggaaccatctccgtgtctgtactcacagcctgatgatgcatgccgtctatagaactacatacagtgttttttacagttaagttttttaatagcagggaaaaacaagatcwtttcctcagatgcttgactatttccctctgtaatcttaggtatagtttcaaccctatttcttttcggtaatatttgttatattagatgttggaggccaatatcagctaataaatagacccatgtggccaatttattgaattaaactgaagagaattgctagcatgtctgctgttaggatacagtagtatgaagtggcagctacataaaactgattactctggtggcccytgcataaagggagaaggcctcatacaactcaacagtgatatcagcaaaataacatgtctatccttgtcaagagagaaaacagggttgaaaatgacagaatgaagatgtaatactcaggctttctagggcggattgtagagtctggcaaaaatgaagcaaaacaaaacccaaaggaaagaagtttagatttaatgcctaaagaaatggcgttccctcaaagaaagtccacatgaactgacttaagttgcagtgatgggtcagtgagaacagtacatatagcaactcctgtggccttctgttagagcttcaccttacaattgtaatttttatataactcaacttgagagagagagagaaagacagagaatttccctcactttctgaatcatggctcagaagtgtgttataaaacaccaagaacggaaaagctattacgtggaatataaagaaatacttgagtctacagtatcattgaactcttggattcggtttcagcagacatgctctgtattcccacaagagtctggaaaatgaactcctatttttttttctgtctggagctgcagttagtgttattatttgctccatggctcaatccgggtcagactgttcttcagtaacacaggtggatgttaaaacagggaatctgttgaaaagattgcggaggaactgcttcccaaaagcagttctggatggcaatttgatggcagtcagctatggtaaggacaaatgaagcttagcagtaccttctagaatgtggtctttcaggctttgtcaactgcaatcctacaggcagaagtttcatgtataatgggtcaatatgaactggtggcatcttctaagaagtggattctagaaatggaggtcattaaatgctcaatacttgcgaattgtaatgttgatctgcatttttctgtttagctttatttgtgaaatataatatgtagttcttaaagaaaaattccataagccttttttttctttcgtatgggcttaaaaatattttagaaacttgttaaaaactagttatagaaatattcattatcctactaaaagtggcaggaggaatatagttgtgatttaagatatagaaattgttttgtactaatgtgtttattgtcagcaattacattgttaaaatgtaacaagtaaattttgccaagagtacaacatgtatccatttgtaagtaagcacacagggaaaacaatattttaaatgttctacccattgaattatttttctagtaaacaacttgacataaaatagactgaaacatccatttattttaacaactatgttaaattacagattaatggtccaaaataaaatttgaactgatttaatacataattcagttttgggggaaaatagatctttctccaactgagaatagactatatattttttcttttgtgaataacttattttacccttaataagtttaggacttgcctgaaccacagccagccttaagaatcctttgttcagaaatgttcagcgttatattgactaaggagcaatttgggggttgaaaaatagatcactatttcagtttctgactttagactatttttaaagtaaagtgctgagagttccaattgaaaaattgcaaatgctccaggacactgtgcctggaaataagattcctgaagagtagagcctagggatgtttaggcaacccttacagaaacaagccttcaagtacattttaagtacagtgtgtctcgcacgttttgaatkattcttttcagatttttttttctttggatataactattctgttttactttacatacatatatatacatacacatatatgtatatgtatatatgtgtacatgcatgtgtgtgtgtatatatacacacatatatattcacatacatattcatatatatattcatatatatataggtatatgtatatatgtggtaaatctaggagtttacatatccaagggaaaatttccctcaaacttgtgattgytactcaccagatcaaacattagcagtccctaagggacagtcccagtccacagccaacacacacagatcccttcttatcacttggaacagacactcctccatgggtacatacccagcatgcttaagaaaacaggtatctgtggaggttaaactaatatttttggagcaaaaaatgagaattgtcagaagttttttttttttttttttgagatggagtctcgctctgtcacccaggctggagtgcagtggcgctatctcggctcactgcaagctctgcctcccgggttcacgccattctcctgtctcagcctcccaagtagctggaactacaggtgcccaccaccgtgtctggctaattttttgtatttttagtagagacggggtttcaccatgttggccaggatcatctcgatctcctgacctcgtgatccaccgcctcggcctcccaaagtgctgggattacaggcgtgaaccaccgcgtccggccagaagatttttattaattgtgttttctagaaatgtaatcttagttcagctatatttaccagaaaaatatacaaagcatttttatatcttagtatttgtaactgaaattatacatttctgaagaaaatatcaaatctgagataaaaacagcatggtaaattaatttgtactgaaaatatttttgaaaatattttgtctataagaatagtttgacaagtagccttatttgctatagttgaaagactctgcttgaagaaaagcattcacacttagaccctggctagaagaaagaaattggaggcagattttttaaaagactgtactttcaggcctgggcacagtggctcacacctgtaatcccagcactttcagaggccaaggcaggaggatcactgaggctaaaagttcaagataacctgggctacgtagtgagaccctgtctgtaccaaaaaaaaaaaaaaaaaaaatagaagtattagctgggagtggtggttgcgtacctgtagtcttagccatttgaggggctgaggcaggaggattgcttgagcccaagagtttgaggctgtagtgagctgtgattgcagcactgcactctagcctgggtgacatagcaagaccctgtctctaaaaaaattaattaaagtaaaataaaatacattgccttcagaacacattaaaaaggaacaagatgcaaaatagttttgaaaatgttttcttttaagtaagatagtaattgtgcttctttttaaaacaaaattacatataactgaaaatctaattctacagttcaataataggaattttaagagctcaaaagctgcttcttagtcaggtgcagtggctcatgtctataatcccagcactttgggaggccgaggtgggtggatcacttgagtgcaggagttygagaccagcctggacaacgtggtgaaaccccatctctacaaaaaaatcgttaaaaattagctgggcatggtagtgtgcgcctgtagtcccagctacttgggaggctgagatgggaggattgcttgggcccaggagatcaaggtgacagtgaaccttggtcatgcgactgtactccagcatgggcaatagagtgaaaccctcctcaaaaaaaaaaaaaaaaagaaagaaaaaagaaaaaagaaaagctgcgtctcttaaaatccaaggtaaaattatatttcatcctcattacaactctttttcctaaaagtaaatataaaccatgctcttctttatgtgctatttagcctatctttatctgatgtatttagtcattctctactgctccaaggaagtgaataaatccaggtaaaaagaagataccaataatgaaagatttcacttttcatgaatgttttcatagtaggccctcttcattttaggactgtaacctgttggaaaaaaggatcgattcctgtaattgtattgctagactgtgtcaaggcagtgtattatgaaagctacatttgagcagcacgaagatcgccttttaatgatgagagatagtgttagtctgctgtactcaaaagtgttcactctttagcccaatgttctcgtattatataaagctttagaaaccctggacatttgcctacaatgtctttgaagaaggcaatcacattgtgggcatggatcatatctctctgcttacatttttatggttttcatttatgtaccattgtactgcagaagggatagaaggcagcttggaaggatatatataataaaggtagaaccaatcaaaagatggatataggaataagataaaatgattaccattaggtggccaggaacacaatgtatggtctacacactgttacagatgggtcacaaattccactgaaagctttctaaccaccagcataaagaagtgaacctggtgggtattttagtcwatgagggcctaaagatacaggcaggtcagattctgagaagtgaaaatgtgattactactaagctcagagaaaaatttcttcctggggatcccatgtggacagtgcgtaatgatataaatagcatcatctaccacatttttaccagtaggtacagttcagttaattcaatattatagaaagtaaactctctaattagatgtacattttagaatttctgcaagagtaggccaggcmcagtggctcaagtcgtaatcccagcacttygggaagcccaggtaggcagatcacccgagatcaggaagtcaagaccagcttggccaacagggcaaaaccctctctctactaaaaatacaaaaaacaacaacaaaaaaagctgggcatagtggcacacacctgtaatcccagctactcaggagattgaggcaggagaattgcttgaactcaggaggtggaggttgcagtgagtcgagattgcaccactgtacttccagcctgggcaacagattgagactccrtctcaaaaaaaaaaaaaaaaaaaaaaaaraaaaaagaaaagaaaagaaaggaattcctgcaagagtagactatgtgtccttcaggcattcctccctgattgtttttgataaataatgccagtgagctcaaggtttttttgctaaacaattggctgggatgcagcaaaacaaggccaagattctccaaagaaaaaaatatttgagtccacttgggcatttcaagaacaaaattacaatagatttagttttaaagatcacggttggctttattgcaattctagaatcaggcaacattttatgccataaaatacaataaatttgccagtgagttgaacagaaggggttggttttatagacagaaagggctaaggaaagcaaaaatgaagaacaaaaaacagattgattatttcaaagttactttccttgaaaggcagggacagggaggcagaaaaatagaaagattggttagcatcaggttacttttaaggattaaaacagaggaaactattatcctactgattgaagattgaaattggcctatttgggaaattggctgctatctctctctcctgctttcttggaatgttatataacaacttagtttcagtttggtgatgtggaacttcagcatggataactccattttgatttttagtcaaatctgttggggcctaatgcaggagctgtggggcctagtgcagaagcttagtccaaaacaatggcctcctatattttgtatttaacaattttcccctttcagtcatgctttcacctgggtgagtgcatgaccaaaactaagggcattaatgctactcttattatcatgctgggtttctggtctctacaagtcattcataggttatggtgtactcatcatcatgcatttatttgagtttttgtcattccagcagaaaagagactctttggtgtttgatgaatggctgtgtgcaacctttaaaacttttcgagaggatatagtgtaccagagaaactactattatgactatcaaaaggataatgccaggagtttggagtatgctcctttatctaggatccccataaactaaaccaactgaaattaaatagatcaaagaatgagccaggccggatactcattatatctatgggtaacaagaagtattagcaattgcacagatttctccctattcatttagtcggtagcarttctatcatatagcattccaggaatgggttaaattaaaacagacagtactaactctataaaagagatcactagtacaatttgaacaaacagttgcattagggatattagggatgttgctgaagttacccactaggtggactaaaggatctcaggttttttaaagattcagatttgacataacagattcaacrtgctgtcagattactcacaaaaactaaggattgtgaaactttaaccatagccttattctgccaagcgaaagaagtaggcataagcaaggaaaaattaagaggggtaagaatatcataagaagtcttcgtctgatggccttgggaaaagctgtccacggcatgcagttagcaaattctcaacctggtttgcagtttgaatgtccctggttgtggcgttagatattctggtgaactctctgtatggcacgcacatcacacatgagacttgtcccttgaaatttctatcaagttgtccagcttagcacttttgctcttagttgaagagttgaagctagatactggaggtagtgcactaaaagaattcaggatccagtccagtctagggaaaaagtgaacaaggctgcaatctactaaaaggtgtactatagtttttcttttgcaacataatttttctgtctataatcacccccatttctaccaaagataatcagagtaagactaatttgtttgcaaaataagtttcgtctcattaaacttcacctgattatttgtatataagtacagcaagaataaccacacagttctttttaaatttgatttgctggaaattttgacaaacaatctcagattatacttttaaaaacctctcatcactaggaagccaaaccaaggccgacatcagactttgtctactttgtctatggttatctagtgtcttgaggttcctaggcctgccaggaagtgacaactttttactcactcactgtaatgctgtgtgtaagtccactttgtgttgctataaaggaatatgtgagactgggtaatttatgaaaaaaaaaaaaaaagaggtttatttggcttacagctctgcaggctatataagaagcatggcaccagcatctcctcaacttccggtgaggggctcagaaagcttttacttatggtaggaggctaggggagtcagtagagtcacatagcgagagaggcctcccaccaggccctaccttcaacactggggatcagatttcagcatgagatttagaggggataaacatccaaactgtatcacactgggaatccttgaagcgaggcattctattaattctcaaatattacatttcagtcaaagccttggyaattaaaccagtgtttccaattgtattgtgtaatacagagagcaaattcttattgagcttatgaaaataatcatattaaggagaaagatggaatgtttcaatttttgtttataaaagtgtactctaccaaaccattgtgagctagagatagctttaaaaaatcgttttcttaaatctggaaaataaaacattaagagaaccagcaatgttttaaataaaaaagcaataaaaacccttactttttccttatcagtttttcagtctaatgtaattaattcttgctctgtttgatcttagttgatagtttcactaaactaccagtttctttcttagagttctacaaattcttacccaatccagtgctatctcaaagttgtcacaaacctgtacttgtcagaattttttccattctttccatgaacttctttgaagattatggttcttgcaaaaagctttcagaacagcatcagaataaagcaattaactgaggacaataagacttaaaatagccatcattgaaaacctgatgagagtctataatgatgcagctgacaaagaaattgtgttatttctgtggcatacaacattttaacataataaccaaaattatgattgatttctagaaatttaatgcaattttgaaaaamctttttttttttttttaagacagggtctcacactatcacccagcctggagtgcagtgatgtgatcatggctcactgcagcctctgcctcctgggctcaggcgatcctcccacctctcagcctcccgagtagctaggactacacctgtgtgccaccatgcctggttattctttgtatttcttatagcaatagggttttaccatgttgcccagggtggtcttgaactcccggactcaagcaatctgcccacttcagcctcccaaagtgcaggaattgcaggtgtgagccaccacacctggcctgaataaatattttaatatcgtatctatacaaatgtaaggaaaagacggttaaacgttatctcttattgacaatatttcctatataatttaacatatcaaataaacctaattggtttaatatctctcttttggacttccaggtggctgtggtttggatgtttgtcccccaaatctcatgttgaaatttgatccccaatgctggaggtggggcttaatgggaggtgtttgggtcatggggatggatccctcgtgaatggcttggtgtcttctttgcgatgagtgagtttccattctattagttcctgtgagagctggttgtttaaaagagcctgtcacctccccactcctctcttgctccctctgtggccatgtgatctctgtactgtgactcccttttgctttctgccataagtggaagcttcctgaggcttttgtcagatgcccagtcttccagccagsaaaactgtgagtcaagtaaacctcttttcttcataaattatccagccttaggtattcctttatagcagctctaaagggactaagacaaggagacttagaatttcattttgggaagtttgtcaaaaagattcaaacacttgatcaaaaataggatcacatttttgatcaagtgtttgaatataatactcatttagccacaatgataattaaaatacttcaaaagaagttacatagctgtagaaaatcttaactcttataataaagaggagactcagttttcctaagtaattaatgacctaagaaagaaaacatgaagcacagaaattattttgacaaaatacagaatctttcttttctaggccacatacctaaaaagtctcacaatttttttaataagaaaagatcagtacacgtcaagaaaaccttgttttaaaattttaaaaataaagcttaatttttagaaaaacctaaaaacaattcttttttaattttagccaacttgatcacactcaaaattcctttcataagattcatcttccataaatcttctaaaacttgcaaagacctcgtgcagcttgctcaaaccttcacttctttttcttttttctttttttttttttgagatggagtctcactcttgttgcctaggctggagtgcaatggtgcgatctcagctcaccgcaatctctgcctcccaggttcaagcgattctcctccttcagccttccaagtagctgagattacaggcatgcaccaccacgcccagctgattttgtatttttagtagagacagggtttctccatgttggtcaggctggtcttgaactccctccctcaggtgatccacccaccttggcctcccaaagtgctgggactacaggcatgagccactgcgcccaatctcctcgttttcatattgaaacaaccagtcattctaccttagggcaaaaatttacttttctttttccctcatctttctgaccacacagaattgtcattcaaaaaaattagtctgttttcaactttctttaccaaaaatatattctcagacttacaacttttttgtatctctttttcctacttaatagttccttcctgccttgtttccattttctccataaatctttattgtgaaaagcctttaacctttgaattagctgaaataactcttttctacaaaaatatattctcatgactwtttataatttttttcacccaaaacacattttactktctcttggtatactttgcatatagaattacatatattaattagaatttttaacttttagtaaccttaatttctagtgaaacctaggaagtaagcaattttgaactatcatatgccaacrttttataacaacacaagatgacaaagtatctatactttaatcatttttagcaattaatgggtcagtattctaacttacttggaaatggctgacatttcaggaatgttacttaatcatatgactttaagattatgttactttaagatttttgaaactatgaagagtttatttaaaacctttaactcatttactttcacctaatttacttgttcttaaaaattatgcttcaattggtcgttaaacaaagctagccactatctcaagttatttccttgttaaccatttttacagtatgccaatgttagttgctacctaaacaagagccctaaagttaaatatgaggttattttgttggtcagaagacacactgttttattgaactagccttatttaccaaagatttacctgtcacatgaactgaaaggtatttgagttagtctcttagcctgttttyttttgctataacaaaataccaaagacttggtaatttgtaaagaaaagtggtttatttagctcattattctagaggctggaaagtccaagacggggcagcccatctggtcagcttctggtgagtgtctcatgttgcatcataacatggtggagaaacagaagggaaagcaggcatggaaaggggataaaacacaggcgtgacctcaccttataacaacctgttttcctttgagaactaatccagtcttgtggaattaacccagtctcatgagaaagacattaatctatgtgattgacctaatcatctcttaaagactttacctccccacattgttatattggcagttaaatttcaacacgaattttggtgcagacacacagcaaaccatagcatttagtgcagtttttctgatgaaatattatattttgtcacttactttttctttaagccaattaattaaagctttttcatatattttggtagcaaaatatcacatacatataacacatgtagacatacagacacacagccagaagcagatcttagagcttttataagattctctatttgccagtttttcaatagtttctctttcttctttagattatcaatctcctgattacctgttctgctgttttaaattattgttagctaggcaaccctaaatttgtcattccaaagacatgactcttaggtgagacaatgtagaaaatttacatctcaaagcacacaactgagatctaaacaccattatttgctgagacaagggcaaagattaagaccccataagacaagatgggcaggaaaagtactataaacacagttaaggtttgttatgtgaattttaagccaatgtctttctcactgtaaaaatttctaatggttttaggtgcaaagaaagagaagcccttagaaatggagattttcttcatagatgtaaatttcttttacaaggggtttttaaatagccagctaaatgttagaaagttgtattttagagaccaatttagtacaataggtggtcattttagattgtttattaattggatcactgtcttcagggtagagccctctaatgaataggacaaagaaggcattttctttgcctggactcatggatagaactggatttgatattcctcacaactgaaattttgttttttattttgagggagagactgtccccacaagtggagtttaaactgtgtgacttatgcctcagtctcctgatctgtacactagaggtaataatatctccttcagaggggtattttaagaagtaaagatgatacatagtgtacagaacaatgctrtaagtattagttgttgatgttgttattgctattaaggagtgtcttgtgcaaaataaatatttcgtttgagggaataaaacaattaaaagaatgggcaactgaattattgttatagagcaaaatgacctaggagagaccaaatactaggaatcagccatgtatgtcagatgcttagagtgtccatgtcaaagacctttggaaactgcaggacttttattcttacatcagtccccatgaagtcaggatctgtgaagggtctgagattttacttcctttccttgtagttgcatcgtagttgacccacctcaaaatgggaagtgtcaggcctgagagtcatcaggggttcattttctttctttttttttttttttttttttttttttagacagagtcttgctctgttgccaggctggagtgcagtggcgcgatctcggctcactgcaacctctgactccctggttcaagccgttctcctgcctcagcctcccgagtagctgggattacaggcacatgccaccacgcccagctaatttttgtatttttagtacagacagggtttcactatgttggccagactggtctcgaactcctgacctcgtgatccgcccgcctcagcctcccaaagcactgggattacaggtgtgagccatcacacccagcccacgggttcattttctaacaagagctcagcagcacttatgttatgagttgaattgataccctctcagaattcgtatgttgaagtcctaacccctagtacctcagaatgtgatcttatctggagatagagtcttcacagtggtaatcaaattaaaatgaggtaattagagtaggccctaattcagtataactgtggctttataagaagaggaaatttggacmtatagacatgcataccaagataatacaatgtgaatatgaagacagctatctataagccaaggaacgaggcctagaacagatgctttcctcatagccttagcaaggaaccaaccctgcagataccttgatttcaagttgctaggctccagaactgagacaatacatttttgttgcttaagccaaaaacaaaaacaaaaatggagtttaatgtagaatctcagaaatcaccactaaagaacttattcatgtaaccaaacaccacctgttccccaaaacctattgaaaaaaaaattaaaaaaaataaatagataaagtagaaatcacagttctggtgtctacctacaggataacaactggagcttcccccaaaggcctgtcaatcctggtggtcaatgtggagwttatcagagggtagacagcctgtttataatgttttccctggaaatatttggggcagtctcttttccaatgtcctgcttgtttgcaccaataccaacagttttttggaaactgttttttcagccatttattaaagaaatgccccagagcaggccaaaaggccagcctaggttgttgtttgccatccaactgaaacactttggtaatggctttcaaaaagttatttgcagtttttccctgctttccataatggaccaggcagggcttgtcaggtaataccattctgcatctttcacccattttggggcttctctaattctcaccaatatgtgtattagttggttgagctcagatatcctggggttataagtttcagtgaagaccctaaatttttcctacatttttctatatttatttatttatttagagatggggtctcactctgtcgcccaggctggagtgcagtgacataatcgtaactcactgcagcctcaaactcctgggctgaagtgatcctcccacctcagcctcccaagtagctggggttataggcatgtgccactacacctggcttctcttcagaaaatatttggaggtcttctgtaggtttaggaactttttaaactatggcccttggctctgtttttgtccgaagagtataagtcactcagggattacttcctgaatttggggtggtttttcttataaagaaagcatttaattgtgttttcagaaaaggaaggcatttaagacagaggggagcagaataagtcaggttaatattactgtccttcgtatggatgatatctcacatttgtaactttttattagctctttgcaatgaatttttttaaaaagcaattttagaatcctgttgtctgcttgaggcttctgaatgccaattagaataacaattccattctctctgcctaattatagaaacttgggattcaagtacagttatatgaatggtcttgttcatctggaacattctgcatartagccattataattctatattatctgtagtaagatttgatatttgcagcttcctgagccataattctgtacgtgaaaaaggcaggcatactggaaggcagagttgtcagatgtttagaaattaaggatcccatttttatgttggattttgggtctctcagagctaggatggctttggctctaagatctcagtgctcaagaagagaacaaataaagaggcccctgcagtaataaccacttactgtgactaccgtctaagaagctggcactgtggtatgggggtgggtgtggcaaccccatgccctctttgggtaccttacatcccagcatatccatgtgttccccaaccccaaagcttatcaaatcttgttattcagaagtttttatggagtctaatctccagtccttcccccttccctttcctggaggtcagtaggtsacatggtttggctgtgtccctacccaaatctcatcttgtagttcctataatccccacatacgctgtagaatgtcttgggacaggtgtgtggagtasaggatggtgcagttgggttttaaatcagattcactctaattgcagatcaggctgtgttcagttctaactagaaggtaggagatcttgccagttctccaatttggccattaccaagggaccccggataaagctgatatatgatccctatttgtcatttgtctcttcctaattagccataaggtagaggagaggtgggaggtggtgattgacacccctaaccaccagcaaatagggtgaggacactgaggcaggactgggcttgacttaacatagaaagatatgcgaccacatatttctttctatcttttgacttcagatataaaaaygactagaatttattttcctatgataagtagtaaaaaagatgcttctgtttttcgttagaagttgaggtcttctagaatcgtcaacttggattaygcattcttttgctcttatcactgaattacattagcataactgtaacagaaattgttgatattttactaatggtgagcccactagcatggtgggctctaaaattccctctctaacactttttgcttccattgtcttttagggagctaattccaactcccaactagaacatgagttcccctaggtcaaggagttaatcttccttgtgtcgtattcattcatcctttgctcatttattcattccataaaacttgttagcatctcctgtttggtaggcactgtgccagtccccgtacattacatggttatatagccatcaacatcagagtagagactctagcctcacagagctcacaatctcttataaagcccatcatgatgagaggatttcaactaagtgagtaaagcattgagcacagggtctgagacagcatcagccactcaacacacatctgttcagtgaatggataactcagcagtgctggaagtagcacagagttggtattctgagacttctgtatgggattgtctagactcccagactaaaatttaatagttagtaaataatatttattgaacatttactgagtaggtcaccatgctaagagctttataaacatcattttattcatcacaacgctttgagataaaaacaacttttatttttattttttccagtttgtttttgtttgtttgtttgtttgttttgagacaggatctcactctgttgcccaggctggagtgcatttaattttcatttttagtagagacagggtctcactttattgtccaggctgatctcgaactcctgggctcaaggtatcctcctgcctcagcctcccaaagtgctgggattacaggtgtgagccaccacacctggcctaaaaacaactgttaatgatcattttatgggtgaggaaactgaggctcagagtgtaatatctttcccaatcaactagcaactatcagaaaaaggatttgaaccaagttgtttaatttcaaaacctgtgaatgtaatcattttgctacatagcctcttaggggtcgtctatttgaattcctttaagtgaatcctgggccggtgaactttaaacagactgtcagtcaggatgccaaatactccacactgaaagtagatagaaatagcttcatcaggagcacagtgaaggtgacactttctcctttgtgacatttttcagagagccattggtggtcctagagtattactatctactaggatttactgggtgctacatccagataagccaaagaggagatggctctgggttgttataatgacattttcatgattttttcatgtaacatgtcattttacactttattaagtattctaatgattctggacaacagattttgaaatggtactcagaaaaatgaggcaaatttagtgtgttgtttccttttatgattccaattgcattttttcatgggtcactgtgaacaaggcttacaattatttttatataatgactttttcattcacattatttctgtaatctcatagtttaatgacaattactgtctatttatatgacttgtatttataagactggtgttcaagagaaagtttattttttcttaacaatagtagtaatggcacataactaagattgagggatcactttgtgtcaggcttttcattaaggctgtttatatgtattatttcatttaatcatcatatcaaccctatgagatagtcacaattgtgatctccaatttacagacaaggaaccagaagttgtagaagttgagtgatatagtttggatgtttgtctctccagatctcatgttgaaatttgacccccagtgttggaggtgaagcctagtgggaggtgtttgggtcatgggggcagatctttcatgaaaggcttggtgccatcctcagagtaatgagtgagtgctcactctattagttcccctggaactgattgttaaaaagaacttggcacctccccaagttccgttgcttcctctctctcaccatgtgatgtctgcacacaatgactcctctttcccttctgccatgagtggaagcagcctgaggcccttgtcagaagtagatgctggtgcaacgcttcttgtacagcctgcagaactgtgagccaaataaaccttttttctttataaattacccagcctccagtatcctttatagcatcatagacagaaaattggtactgaggagtggagcattgcaataaaaatacctgaaaatggggaagcagccttagaactggataatggacagagtttggaagagtttggagggctcaaaagacaaaaagacaagggaaagtttggaacttcttagagactggctaattggttgtgaccagactcctgatagaaataaggatagtgaagcccagctgacaaggtctcaaatgaaagtgaggaacttagtgggaactggagcaaagatcacttttgttatgccttaacaaatatctcggcagcattgtgtccatgtcctagggatttgtggaaggctgaatttaatagtgatgatgatgaaggttatctggtagaagaaatttctaagcagcaaagcactcaagaagtggtgtagctgcttctaacagcctataatcagatatgggagcaaaggaatgagcttaagttggaatttatatttaaaagggaaacagagcagaaaattttggaaagktctcagcctgcctatgtagtaggaaggaaaaagcacttttagatgaaatccaaggatgtggctgatctattgcttgctagagagattaacatggataaaagggagccaggtgctaatagtcaagacaatgggaaaaaggtcctgaaggtgtttcagaaaccttcaagaccacctttcccatcacagacccagagacctaggaggtcagagtggtttcaggggaatggcccagggcaccactgccctataccacctcaggacactaccccccagtccctgctgcttttagctccggccagttatttctccaattgtctgtctggagggtataagccttaataagccttggtaatttccatatggtgttaagtcttcaggcatgcagaatgcaagggtgatggaggcttggcagcttccacctagatttcagaggatatatcagaaagcttgagtgcccaggcagaagcttgctgcagggtggagcccccacagagaacctctactagggcagtgtggcagggaaatgtagggtaaaagccccctacacagagtccccactggggtattgcttaatgaagctgtgggaatggggctgccatcctcaagatcccagaattatagacccaccagcagcatgtaccctcagcttggaaaagctgcaggcattggactccaactcatgagatcaaccatgtgtgctgcccagcaaagctgtggggacagcactgcctaaggccttaggagcccaccccttgcaccggtgtgctctggatgtgggacatagagtcaaggattgtttggagctttaaggtttaacgtctgccctactgagttttggacttgcatggggcttgttaccccattcttttgtccaattcctcccttttggaatcggactgttaacccagtgcctgtacaaacattgtatcttggaaataaataatttgtctttgatggtacaggctcccagctgtaagtaacttcccttgagtatcagatgagactttggactttggacttctgagttgatgctggaacaagctaaaattttaggtgactgttgggatagaatgattgcattttgcaatatgaaaaggacatgagatttggggaaccagggaaaggattacatactttggatatcatgttgaaattttattcccaatgttaagaggtgggcctagtgggaagtgtttgtgtcatgggggtagatccctcatgcttggtgccatcctcctggtaatgggtgagttctcactctattagttcctgcaagagctgcttgttaaaaagagcctggcatcttccttccctctctctcctccttcatctctctcaccatgtgatctctgcttatacctgctcccattggcttccaccatgagtagaagtgatttgaagcccttcccagatggatatgctggcaccattcttcttgtgcaacctgtggaaccttgagccaaatacacatcttttctttataaattacccagcttcaggtattcctttataacaatgcaaatgcactaaggcatggagtaatagcccaaggtcacacaactagtaagtaagtggtagatcctatattcaaaatgaggcctcatttgttccaatatccatgagctcarctgctctcctataccatcttcctgccaggccgctctaactgcagagtaaacttgcatcagataagaggttatgccttgattaaggccttgtggtccaaacttatgggttttccagtgggcaaaattatttgaggaaaagatttcacattttccaacttttcttcttttgaaatatgtgttaaaatgaggttgctttcttaaaagcaaactgttaaagaatacagtcagtaagctataatttagtatgtattttactaatgctttatttatttctaagatgatcctggtcttcttcaccagccttcagtggattgtttttctccaagccattctgaatctgtttttgattcaagttagaaaagctccctggctatagctatggttctgtgtttccagctgctttactctgtgccagtggctttgagttcttcagcaaaggtactctggcagaccaagtctgtcttactcaaaagcttaaatagatattgcagaggagaagaggaaaagaatcagcagtgattattacttgtacttctgagactctgttaattgtaatgtcatggttaaatttgcttattaaccactttgattcagactcatcttccaaatacagtccagagacagactgctatacagttataaaaggtctccttaattagcttccaagttccattagagttaaggttgtatcagagcttagcattttaagtaacatgtaaataaatcctaaagaagttttatcacactcactgtctgctccctttcatgccaatgtcaccaagatcatcaagaatcactaaatttgttcttaaagaagcaatttctagacctcccttctgttcatttgttaaggggagaaatgttgttcctcattgtttaaatgagaaaaaattttcatttgagttatgggacattatataatgttgtcacagaggtggtcaggaaagaaaagtaacaatgtttaggtgtatagtcttgaagctttgacttccatcatgaaagattaactgctacaggaatttttcttttgctgtaagtaattagaaaactggaccaactatatgaaacagcttttcagacagtgcacacaggaagtgtaggactgatccctgagggaagggaaacaaatgaattgagattacaattttcccagcttattgtctggaggcagttttcaggccacagaggtggaggaggggatgcagaacagaacctactggtcttatcaaattgaggggacaaaaaatcagtttgggagaactaaaatggtagaatttgcagggcagagtactggagatgaggggctgctcaaatacagcattccagagatatgcaggattgttacttgagtctttgggtaggtatgtatttgtctgtgcacgcataagaggaactacccaaagctagagaaagaaccagcagaaaataaaccagacaattcccagaactcacgcagaaatgagattatattcctaaaagccagaaaggagagacctcacaatacacagggctttgagtagagcctcagaagagccttgccttagcagtgaggggaaatcactacttaataccagaaactttacayatcatgatcaaatacaggaatacctcagagatagtacaggttccattcagattattacaataaaagcaaataccacaataaagggagtcacaattttttttgcttcccagtccatataaaagttatgtttacattttaatgtagtctattaattgtggaatggcatcatgtcttaaaaatatatatgtatctcagttaaagaatattttatggctaaaaaatgctgacaatcayctgagcctttagcaagtcataatctttttcttggggagggtctcgtctcaatgtcgatggctgccgacctatcagggttgtggttgttgaaggttgaggtgactgtggcaattttaaaaaataagacaacagtgaagtttgctgtgttgattgactcttcctttcatgaaacatttctctgtaagaagcaatgctgtttgatagcattttactcacagtagatcttctttcaagattgtagtcctctcaaactaccattgctctgtcaatcaaccaagtttttggactattctaaatattttattatcatttcaacaatgtttcacagcatcttcaccaggagcagtttccatcttgagaaaccactttctttgcccatccataagaagcaactcctcatccattcaagttttatcatgagattgcagcaattcagtcatatcttcaggctgcacttctaattctagttctcttgctatttctaccacatytgcagttactttgtctactgaagtcttaaaccattcaaagttggaatcaggttcttccaaacttctgttaatgtagatactttgacctcctcccatgaatcacaaatgttcttaatgacatctagaatgatkaatcctttccaaaaggtttcccacttattttgcccagattcatcagaggaatcacagttttggcagcaatagccctatgaaatgtatttcttcaataataagacttgaaagttgaaattactccttgatttatgggtggcagaatgaatcttgtgtcagcaggtgtaaaaaaagcattaatccccttgagcatttctatcagaactcttgggtgaccaggtgcattgtcaatgagcagtaatattttgaaagcaatctttttttctgagcagtaggtctcaacagtgggcttaaaatattcagcaaaccatgctgtaaacagatgtgctgttatgcaagttttgttgttccatttgtagagcacagtcagagtcaatttagcattattcttaagagcccaaggattttcagaatggtaaatgagcattggctttaatttaaggtaaccagctccattaacctctaacaagagagtcagcctgtgttttgaagctttgaagccaggattaacttctccttaacagctagagaagtcctagatgacattttcttccaatataaggctactggatttaatttgaaaacttttgtttagtataaccatcttcatcaaccatattcataacatacaatgctgtgtgttagctgtaatagatcttctgaataacttcttgcagcttctacatcagcacttatcgcttcaccttgtacttttatgttataaagatggcttctttcctcataagccagcctctgctacctttaaacttccagcctctgctacctttaaacttctgcagcttcctcacctcacctcttctcagatctcgtagaatttaagagagttggggccttgctctggattaggctttggcttaagagaatattggggctggtttgatcttccatccagaccactaaaactttctccatatcatcaataaggctgttttactttcttattagtcgtgtgttcactagagtggcacttttaatttccttcaacaactcaacttcctttacaatcacaacttggctaactggcatgagaggcctagcttttggcctgtctcagcttttaacataccttcctcactaagcttcataatttctagcttctgatttaaagtgagaaatgtacaattcctcctttcacttgaacacttggaggccatggtaggayattaattggcctaatttcaatattgctatgtctccaggaataggtagacccccaggagagggagtgacggaaacaaaccagtcaatggagtagtcagaacacacacacatttattgattaagtttgctgtcttatgtggacgtagtaagtttgaaatactgcaggaattaacaaaaatgtgacacagagatataagcaagcacatgctgttggaagaatggcatcaatagacttgcttgatgcgggtttgctacaaaccttcaatttgtaaaaaaaaaaacagtatctgcaaatcacaataaagcaaagtgcaataaaacaaggtatgcttgtaactgaaaaccagtagtgaagagataatctgaaaagcagtcagaggaaaaatactcattgtatataaaggaacaaagactaggatgacarcggaattcccattagaaacaatgcaggcgtaaaggcataagaatgatataatggacttggggactctgggggaaggttgggaggggggtgaaggataaaagactacacattgggtaacgtgtatacttctcggtgacaggtgcaccaaaatctcagaaataaccactgaagaacttatccatataaccaaaaatcacctgctcccccaaaactattgaaataaagaaaagaaacaatgcaggctgaaaacattgtaatgacaatctttgtaagtgcaaaaaaacaaaaaacaaaaaaacacttgccaacctagaattctgtatccaaagaatatatctttttttttttttttggatggagttttgctcttgtcacacaggctggagtgcagtgatctcggctcactgcaacctccacctcccaggttcaagcagttctcctgtctcacccgagtagctgggattacaggcgcccaccaccacgcccggctaatttttgtattttttagtagagatgaggtttcaccatattggccaggctggtcctgaactcctgacctcaggtaatccacctgtcttggcctcccaaagtgctgggattacaggtgtgagccaccacgcccggctagaatatatctttcaggtctatagtttcttctctgaaacccagagtgccagatgtgttttaaaatttataatttttcatattttgaaagtaaacggagtatgtcaaccatatttcataacacacacacataagtctaagatagcaccctttaatcaaccacattaatatatgtgcagcaaaacctaggaatgttcattctagatgatataaagtctaaaactttcatatcaaatcaggttttactaccaaataagttcaggcactaaattaaaaaagaatacccttggttttcagaactttgggctttcagaattgtaaataagagaccttgtgctagtcagttttctacgttatgcctgccttacctctgatccttacaaatccttaccttgtttgttatcacaaataatatgtgactacagaaggcagcatggatcatgtaaccagaggccagtgggaatatgaccatttcagctctgccagtgccagggaccaagaatctgagactatgttgggatgcttgtacatcctggaagatgccagcacaaaatgctgggtaaatgctcattgtgaatgtcacctaggaagaaagcagtggaaaggaggggatggacctgaatttaactgagttggaatttmaaataattgagaaattactggacttgactgtgtttacccggattatctacttataagaaaatgaagttacatttttacataacagaatttataagtttttaaattatctactaaacattacttaatgtcatacggcctggttcatcatctgttaaataggaagaataataccaactkcacaaaattgtataaggcttcaaggagaagattgagaaagaaaaagaaaacttcatacacttaaaagaaaaatgtaacagacaatgttaggtaagcttgggtttttaaaccaatgagctctctgttgttttggcagaattactctggctccagtgtgtgagatgaatttgagaagggacagctgttagaaggagaccagttaggaggctttgcaatcattcaggcaacagggaatgaggccttttgttaggaaattgcagtgtacatgggttcaagatcctttccagtggtagaaacgtggaaaagagtgaggaactcagaaggagtcaaagatgacctaagattccaaggttggtgattaaagaggacagtgatgacattaactgagttggaaagtaaggatgccagcaggtttgggaaatagataagttcagttcagagtacagtgaatatraggtcaacaaatgccttggaaaagaagagaacagtgaacagtagtataatggtgaagagtggtgtgtggtgtggctctgcaggctgactctttcacaagttatgtaagtgttccgtgcctcagtttcctttctgtagaaatggtaaaggtaaaaagctttttgaaatttgcctttggaaatatttttaatttagaattttagctgtgcctcattatctctacctgtcactataaattttctgtagaatagtggttcaaatattacgtaattcatggacttgttatgaagcttaaatattaggtcatccaggaagagagcatagttgggcaccattattgactatagctattgcaaccatttagtgggaggccgatgctgtggatgtgatggaaagagcactgctccctgccctgggagacagaagacacagctctgaaatataactagctggtggcttttaacaagaggttcagttgggcctcagtttgttcatctgtgaaaacaagggactggrtaattctctataaggcyacttacatcccttaatattatacggttcccttgaggttaaaaacaaaatttgctacagataaaccataatggaaataatgtattcacttgtaatggagcaatagattaagtgctattttagtatctgtgggcctggcctaagacatatttttgcatttaaagcrcattaggaaatttagaaatggtaaaggtaaaaagctttttgaaatttgcctttkgaaatatttttaatttagaattttagctgtgcctcattatctctacctgtcactataagttttctgtagagtttcagataaatgtacagtgtcttctctgccttttcctgttatacttgcttagtgatgtcacaaaacagctgtctggatgcttacttcatttgcaagaatagaatagggcatttcgtttgctaggatttccacttgttaaaaagaatcccagagggccagccatggtggctcatccctataatcccagcacattgggaggccgaggtggatagatsacttgagctcaggaattctagaccagcctgggcaacatggtgaaaacctgtctctacaaaaaatacaaaaattagctggatgtggtggcacatgcttatggtcccagctactagggaggctgaggtgggaagatctcttgaatcccagaggtcaaggctgcagtgtgctgtgattgtgccattgcactccagcctgggtggcaaagcaagaccctgtctcaaaaaaacaataaaaataaaaattaaaaatcccaggttccatagagagggtactcctttactattactttttctgccttctacagcagagcacaatcctctttccattacattactagagatttttattaatgaagacatgctaagcacataaccaaagctaagattttcgttttggcatatttagggagaaactatgaggaggaggagatacaaaatggcctcctcataatagcttacacctgctctatcactttacctttaataggggtgattccattcaccctcattaacttcttttagccctttttggttttccaaatttgataccatttgtgttgaacagaatagtcttttacttatgtccttcataaaatggcaatatgcaaaatatgattgaaataaggaatgaagtccaataagtcacttataaaatattcatgctgaaaactttattcatatgacatgttttatgctcacgttatatatacatttgccmagtgttcagctgtcagaaattagagatcaaatacaaaaattttgttacagtttgtactatatattttccaattctttaggtgggcagccttcaaatattaatgaagaagaagagaggttatcaatttagttgggaagccaaatcttcagtcatcaaatggattactcaaaaattttactgaatgtgtgtgtgtgtctacttgtatgggggtggggggatgagggggagaaggaaagagaaagatgttttgcttcctaaaagaatctgtgaaggaaaatctggcagacattgtaaatcactttgatttttacattttcctcatcaataccaattgaaaaacacctagaccattaactttgaattgtatggaaacgtctaaaaatgtacctgcctgcctaatatcagagtaccatggtcttcactcttgtttttcagtgccaggccacatttattctgtggcctttgggtttggttagatggcagatggctcctcatttgatgccatgaaatgatgaaatcccagccaatatgaaaactttaaatgaaatctgttaatttatgcttggagtctagaagacaatttaaatatatatgtatatataattaataatgtattaatgattctaaaactttaaaagtagaaacagctttctattcatagtcttaacattggcttttcatatcaaaaccatttttagtttatcaggaatcttgttaaaccgtaaacaaggggacttgggttctaatcctgcttctgcctctgtggcaggggagagtcatgccaaccyactgggagttggtcayctgagctgtatgaccacaaatgtctcttgtgagttttacatttcatgattctgtgaactaaatatcctgtgctagtttcttttcatttaattctccagtccagaaatttaccacacatatatctgcatgtagctttgacatacattaggtgatcacttaatatttggtaaagtaacaatgtgttttgctacttcagatggattgtaaaattactgtaattttgcagctttttgtattggggctattacttatttgtgttgaatcacattattgttgctttaacacttactctcggtggctttgtgcatcatttagagttggtttttatgcattctcactaaggtatttcagcagggaagctgcaggaaaaaaaaaaaaacactttattttgcctaatcttgggaactcwaaaaatagacacaaatattttcataatcataaggtaatccagggagtgaatttcacttttctccagcttgattttgctaaaaaaaaaaagaccattctggatacacagacagcttattccaaacaagttaccctgtgaaaagaaaagcttctccaactctgctcactggaaaactgcctggatggaggcaagcgtttagtaccctgaatttggagagacctagactttcttctaaagctctaagatggatatagaatttaaaaattataagaaaataactgctgttygatgaaagaattttaaagttaagacatctgtttcctttatttgttttccattacatattttcagttaatatctaaatgggggataaactactcatcaggcaggtagtgtaaatagtgcactagttatttttaaatgcctaattccatacggtatctattcagctttacatattttcagtagttaacaccctaataggagtggcttaataagccatttacaatagaggcagttaattagttatgctattaaaaagcaaactttaaagcatttaatccattgtacattattgtttgctttgagaggcaaacttaagatttataaggttccaatttgaaccccagaataaatgaaggtaagggaagccaaaacttccctggtgttgaggaaaaacctttgctttctcacttcctatgaatagcagtattgtccaccaccattagtacaggggcaccagggccttgccattccatgcttgggcttgtttttatttttaaggaatgttggaaaattgtggaaatgaatgttttttcttcccttttttccttaatacctcatggatcctgacctttttctttaaactggtttaatacgtgtttcccttaaggttggtcattgacccaaaaatragtttgagtttctttttccatgatctcctctaaagaattctgttaatagcatactaaactggattacaaacttactgaataagtgctttgaattctgggcaaccttggaataaagggcacagaaagagtaatactgcatagaatgaaactgggcaagttggtataaaggaaaggaatgcaactgtatggctgatgtgatcaacaccgtctagtaggtttattagcaatttaatggaatatggctattcaagcacaataatggcttcagttgaaatgtctgttctgctctttttcccatacactttggaatgagtagaatgtgacagttgagctttcaacaagcttcatgaattttaaatcctttttagttataaaatggggtacatggcatgtagtcagtgtggacaaggagctggcagcctcatctastcttatggaatatcaggtgtcttcaagataatgagggctcgagttgaccaggtgcattctgggtttgctctgtatatccacagagaacagagggacctctctctgtgcaacatccaatgattattttgcagttgtaaagttactttctcaacatttgctgcaagaccaacttgatatcatcacagaagaaaacctgtactgatgtctcagaacaacttctttttggcagctaaatatttttattttgttctatctctggttgattcatgcatatttagagaagaaacactctgtgaattgtgatgtagctttttatcctcaaattttaacacctatcctaattgatccttgagtatttctttaaatatttaaatgttttataaagttctcaaattatattaccaccataaaagtctgtatctctgctttgggttaggtcttgaagtactctaaaattcaatacaaggagctttacttattttatttgcagttacctaacaacaaaagactgttttcagaagataatttttttcagaaaatctaatttaaagcaatctcaatttaaatagtatgaatttatttttaaattggtttataatagtaccctgtgttctatttaactatgtttgtgcttatagtataattttataacagtatgagcaaaaaaaaaattctcataaaaatacttaataggaatgtgttgaagtttgtgtgatagattattaacagtaagtgttatctatgcatgggtgttgggattacaaagatttttaatggttctatttgacttatctatactttctaatttctctacattaaatttgtgggatgggatatgttacctttttcacttcaagtccagggagmgtgggctttaaataaacctctcagagagattaaatatatttttgcagtttggaaacaccaaggataggtgtctgggagatacagaggattagcagctggtgactaacaggttaggtaggaagccaagaaagtgctactgtgttggtcatagctgcactgccagagtttgtaaacaaaggatgtgcaagtgtttgcatggactagaaatgggtcatgtaggagaaaaagttggtctggggctgttttgagttcagtctaaaataatagcccagggaagtatggggactccaacagtgagagcctggatggagtagaccacaggtgaaccaggggtggataacccaagcaaaaaagactctggtaatacagcttccagtggtccagtctcccctatctagagtcacgttagtatttggatgtttagagtaatggaaagtacgcactgacaagctgtgccccctgccttgtgaaccagaatgagcaatggttactggaattgtaggtagtagatgaagttttaaatattcaggctttggggtcccaagtatctcttaacttcttccaccagtgtcacatcaaccattttccaccaaccaaccacagctctttgcatttttgcatatttcctttaagtcttaagaggtatacttaacaggcatacttaaaaaaaaatagttgcaatcytagttttttgtgtcttttaactgctaaatttacccacattctttttgttcttagagctgtctcttagtttctccctgggtatttataaggatactgtattagtctattttcacactgctrtaaagatactacccaagactgggtaatttatacaggaaagagatttatttgattcacagttccgcatgactggggaggtctcaggcaatttgaaatcatggcagaaggctaaggagaagcaagtatcttcttcacaaggtaacaggaaagagagagagtgtgtgaaggaggaactgttaaacacttataaaaccatcagatctcgtgagaactcactcattgtcacgagaaaagcatgggggaaaccaccyccatgatccaatcatctccctccctcaatgcttggagataacaggtccctcctttgatatgtgggacatggagattacaatttgagatgagatttggttgggaacacagagccaaaccatatcagatactctttagttcactgcacagattctaaatgacattgagcactaaagtatgttacattgtgccctgaagacctgaaagagttaatttacttttcaaagttcctgtggtactatccaggaggaagtgaagcaacaagaaaaatctagctaactatataacgtcaataagaaatacttcacttatatatttgcataatactgaaatgcatttagttttgacagcataaacagaactgtgttcactagggacttatttcaagatttgaatatcaacttatgtaatattaaatttagttaagatacatcagaaaaattttactaactatacccactattaaactaagtggttttttgccgacagattgtgtgctttgttcaactgtaggctttgtacatttcataacacgcacattcctgttctgaaatggaatgcacccgatctataataaatctgcttgagagacaatggatcctagccagctctgccttggttcaaggaaaaagacagtaaatagggggcaatgacatttatgagaayctaatttcattatactctgcctcataggaagagaatctagatggtgttgaggttatygtactttgagtattactcaaaaccagatatgaagtaccttctgtgttatattcctaatggttattcctccaatgagtgttttacttaaaaattagttaatatttagtgataaattagaagtaaaaaataacttttttaaaaggagaaaaaaactataatggcaagaaaaatatggcttaccatattttttaaagtaatttaggaaaggcaaaactcattagctagatgataattagttttccttggtagaatattgaccggaatgtttctattaggaaaatactattgaactgttccagtcttttccagctgaggatgcccagatttgataatagtgaagaaaaattcactattttttaacacaatgttagaacacggacagttatcaaaacctaggacaatttcttgaaactagccattttgtacaactatggttggaaatgagcctttacttaatatttataagcatccaaatactcagctggtgttttttcactaacatattttaaacaagttcccagagaagcaaatgtatgaacatatgacaaagggtgaatatttacaaaatcatttgccatgcttcagcctggaatcagaaggcagcttctcagaattaattrctatgcactctgcttatcctgactagggcctttcacaaccatctctaatgaaggctttaataacacacaaaaaagctaaggactaggaaggaaaaaaaaagcagcaaaattcccccccagaaatcatcccagtgttccaaaaaccatcttgcatatcatgctcaaacccagggcaatgtagaacagtcaaaaaagcaccaacttgtaccagctgttgagaaagctccacaattggtgaaaaattagcaaatacaatatttttaaaagaaatgcagccttacttatgcagcaatcattgaggatatactaatgaagtgtttctcagttcagatatttaggggacctacttgaataagtgaatatgaatgtgttttaattagcacagcaaactttcatttagtcctatggtgctatacagtgtgaatgtattttggactgactgatctgaaatgtgtttgaaagttgttcttgctatatagccttgcctacactattgatttgcttaatgcacttcagcttgtctccaattcaagtgatcataatttcaaaattgatttctgaaataataaaatcttatgctactggtatggttgttttttgttgttgtttgagrtagagtattactgtgttgcccaggctggagtgcagtggctattcacaggtgtgaacatagtgcactgcagcctcaaactcctggcctcaaaggatctccctacctcagcctcccaagtagtgaggcttcagacatgtgctgctgtgcccagctttactgctatgttttatagcatctacaaaactgaatttaacaagaaaatgtacaagcaagtggcaagaagtagcacttgatgacttcactacctgttacctctggaaagttcattacaatccatttatttgtttccagacctttgatctagatggcattggtgcaatcataatgaatgtacgttaagtagctcttcctgccaaagggggatttttgcatccattgctgcaaacagctaccaaacttcgcaacagtaatgaatgagcaatgtctcctggagtctttttgttagaatagtattgttaatattaatggacaaggcaagtttcctcacatcacttcctgcagatcatggtttgagttagctcttctgatatctcttagatttaagtaactttttgtatcattgactcccaatttttatttctggttctgactactccccttgatctctccatctgaatatctagaagtcatttcaaactcagcatggccacacagttcttcaattttttctctccagccttgctcctctccctggaatttttcatattagaaatmagtacacctatccactcaattgctcaagayaaaaatctaaaagtcaccctgggcccttcctttccttcaccccsacatccaatccaccaacttccgtccaccctccagaacacattccaaattcagcactttctttgtctccactgtcaccacacttgtgctcaccaccattttctttcacctggactactgcagttgctttttaactaagttccctgtttccatttgtgccttccaatccattttccacaaagcagctatccagaatttgtaaattaaattatatcactcccttcctgcagactctccagtgacttccaataatacttaaaattccaattctttatgtgagtttaccaagttcagctaaccccatctggcaaccccagctttatctggtaaaatgccatattagtttgctagtaccactgactggacatcttaaataacagagatatattttctcacaatgctggaggctagcagtctgatatcaaggtattggaagggttggtttcttctgaggcctctgcctggcttgcagatggccatctgtgtcttcacatggcctttcatctatgtctctttatcctagtctgctcttcttataaggacaccagtcataatggattagggcccatcctaatgacctcattttaacctgattatctctctaaagaccccatctctaaaggcagtcacattcttaagccctgggagttttcaacatatgaatcttgaggagacacatagcccataacacttgccctcttcattttagcactgtgctagctgtcttcctgttccttgaacaagttaagcttgttcccaccttagggcctttgcactggctcttgttggaacattcttcctatgggcaacagagttggtccttttggtcactcagatatcagcacaaatgtcacactttcagaaaggctgttcctgaccttccaaactacagtaactaccctagccattttatatcacatctcctgaattaaataactgcatagcacttaccactaatatttttaatgtttattatttattgcctatctctccatatcctcaccagaatatacacagggctcttctctcttcgctgatgtattcttggaacctagaatagtgccaggtatattgaaaatgctgaataaatgtttgttgaatgactaagcaaatgaacagaattactggagatgagtggcggttagtgattattgggacaaataggccaacggtagttttctcacctgcrggtttttagaaataaagatgaatcttcccacccttgaaatgtcgtaagagttgtttaaaagaggtcacagaggttgtatggctcttgccgtggctatgccctgtctaaacaaggtggatatttttgccgtatacttgtttataacatttccagaaattctgtctgacttacaaagttgttcagctgttcattcagtaaacatatacagagagtcaactaggggccagaacttgttaatagaatgccccgagcctgggcagcataagtagaccccatctctacaaaaaaaaaaaaaaaaaaattggccattgggcacacacctgtagtcccagctactcaggaggctgaggtgggaggattgtttgagccagggaggttgaggctgcagtgagccatgatggcaccactgcactccagcctggaggacagagtgagaccctgtctcaaaaaaaaaaaaaaaaaaaaaagaatcccctgggagccatgggagcacacagaaggaatctctgacccagccaggacctacatttgggctgggagcagggatatgctggatggcttttagggcagcttaatgcctgcaatgtataaattgtatactgaacatacaraatatttcccatacattaatctgtttgtgtctggcagcatgcgattcctctgaattcacagaaaattatgaacacttcgagtactatttctggtgcttattttggatcatgtgcacagcaaatttttatgcttctcaacattcaggaaaattagtttagaattttataaacttgtcagttccctggtttttagcctactaaattttgcaggtcttttggcagctgacacttattttaatttggtatttggtgataaatcatatttttatttgccccctgcagacagaacgtcagtggcttttaagtactcaatacatgtattgtatcattatcgtcaacaaggaattgaaccgcttgaattagtacattatatatcaagagagctgacaagaccagcagagctcctgccttgtttttcatttagaaagctaaatgtcacttccagccttcttccgggaaactgtcttgtagtgacatcgttatggagggacctttgaacctctggaactttctcagtgtattctccagataatgaaaagggtctttcctagttttgtccagagtgctttttatttctcctggctccgtgggtttgccttccacatttctgtctaatcttcctagatgctatatgccctttggatctgagcactggttcagagatgaagagtgttgaaatattaattccagctctgatatacagagctgcaacaattgtgctttataaactaacataatcctgggatgcttttagtttgacaatctactgtcttctataggcaggatggtcttagtgttgtaagtggttataaatagcatggtgcattcctataaacagaaaaaaatcctccattaatagttgtttctgtatcagaatttaatcagtttgataaagtggcctgttattactgactctttggatactacttgtcaattttgttgtatacctaaatgagttacttttagctgcagctaacagaaaactcaaattggttaataaaatgaaaaatcttatatattaagaactccagggctctagggttggatttggcagctcaaaatgtcatcaaaggctcaaattgcttccctctctctgccctgccatatttgatgatggatgtgttctcaccagttccaggtacaacatctatacagaacaatgtccaagggaagaagaggaattatgtttctttctatggctccaggaacctctcaacagacaccccctcagtggccaatattgggtcacttgcaccagaccctggcataagagacagaactgccatgcctgatttagactgggaggtaccttaaggaatatggtgataattaaatgacataatccatgcaaaatcacttagcacaatgcttggcacttagaaagagcttaataaattgtatttattattaatgatagtgttatgagtggttaagaggttcctcaaaccttgttgatactgattgtgtgttgaggagataaagataacagggatcacctggggaagcccatctactcaaatcctcagagcgcatagcaggaccctactcataggaagggaatgggataggtaactagaacaggacttcagggaaaagaaccaaagcagcacccaggtatatggtcaggagtaggacaaagcagaaagaatgacttgaccctgtgtctcagagcatcggcctggagcttgttagatccttctttttcaggttaagatcgatcatgggaataaatgagttatttttaggtgcagctaacagaaaactcaactcagattggtttgggaaatgaaaaatctcatatatcaagaactccagggctctagggttggatttaacagctcagtccaacttagggaatgaacccaaagttgatgaaatctactatactgcatgtgaatataaataagaaaacacacaaaggttggcaaataagcagagcctgacgtctctcttataggaaaagcattgtagattctctgtgtcatatacttatctcactactggcaagtaattagcatccttggagaaactgtgtgatgggttcttccaaaaaaataaaatataagtatcataagttagtgttgagttgacacactctttgtttcccactgcattggaatcttctgtttgcctctgaggattcccatctttctggagtttttttaatccacttttaggtttgccctatcttgtctgcattcatatatccagcctcttgcctctgattggatttggttaaacaccagaatactttactcatgagtaaccatctggggtattttcagtaaattctatgggaggaaaataggattacagttagagtcatatttatgaatgccaaaattttttctgagactgcaacttttagaagtctagagccggaaatgacctcatttttaagctttgtgccctccgtttactaatatggaaaccaaaatgctaaatatcttggttaatttttagcagtttccactagaaatraacccatatgtttggaaatccaagaaatcaatgggaaaaaatgaaatgggtatgtaacagtctgtgggaaatgtttcaagagatcttattcatgtaaaagttataacaaaagttcaataagagggaaaatgagctaaatggttataaaactttaacacgtattgaccatttgataaaatcatgagttctctgaataatcacagggttaatatttatttgactttgataacttttaaagattatcgtgattaaataatttccagttctgttgaccatttttgtaggactaaggctcccatttgatttgttggttgttttgttttttttttttttaccagctatcagccgagaattgctctcagttcccagaggccaccctgtaggccctcttcaggcaattcacaacatggatgtttacattcttcaaaacagaagatcagaacatctctctgacttctttgtctctaacctttaaacccacgtttaagggttctccttaggtcaagcccacccagggtaatctccctttgattaactcaagtcatctaagtagatactttacacctgcaaaatttctttacttgtgctatgtaaagtaaccaatcacagatatgatatcttcatcatatttacaggtcctactcacactcaaagggggagagatttatacaggacatgtacatcaagggggcagcaatcatgggcaccattttagaattctacctactatacttcctagtgtggtagaaacccttctcatctctctaaattcatcacttttgtttggagtgtatataatgtcttggtttggagtgtgtctgcatatccatatgctttggtaacctcactatttaaaatacactgttgactacctaaagatttttacacaaataactaactcctcctcatactctgatgagaaagtagtggctcccaaaatttattagccttagtttgtgtatgcttagaaaagcaaaatttagactgtttagaaaccaaatgcaagttcagactgctgcaatttgtagcctctatccttccatttctccagaatgtctgagtccacatttttgttcaataaataaataayagtgaacataatctgttttggagagtactgtagctcctcacagtcactcgatttcattgtagatacctaaatttgttggttagtaacaatattgtgtaggaaagaataacacaaacttaagagcaaagctaagttgaaatctcagctctctgcttacttgctatgagactttgatcaaatttacttactctgccccagttttctcatctgtaaaacaaatcattcttgtacttgcttcatcaggttgtaaaagttaaataaggttaatatgagttcatagtagagtgcctggcacataggaagactatataaatgtttgctgttaccattgctaactaaattccttctgagagctttgtcctaaaattagaatatagaagaggatcccaatrtgtttttatttagaaatttttaagaccggatcattgagtacacaaaatgtctgttcgatccytttttgttggtagttttggctagttttagtagtcaacacatacagccaggcatggtggctcatgcctgtaatcccagcactttgggaggctgagacaggcggaacacctaaggtcaggagttcgagaccagcctggccaacagggtgaaaccccgtctctactaaaaatacaaaattagccgggtgtggtggcacaagcctgtaatccaagctattcgggaggctgaggcagaattgcttgaacctgggaggcgaaggttgcagtgagccaaaatcatgccattgcactccagcctgggcaaaaagagtgaaactctgtctcaaaaaaaaaaagaaagtaatcagcacatatggacaaatttaggaatgaaccactgaacaaacctaaggcatctccaaatcaaagggtagtaatgaatatgcaggtttttcttggtgaaacaggttggtgtggtttatatattctgttcatattacttagtgttcttaatcactctataacttaacatcctaaggccctaatatacagaaatttcatttatctctgatatgaagagatcatggaatacaaagtcaccttggcacaggatcttacaatatccagtggacttaaatgtacagaattggaaggcagaaggcatgggctccaattctgatgtgggctgcactctatgatgagacctcaggagaatcttaatcatacagtgaagtgaaaatgaggatgggctccggaggcttgactcggcaagtcagtcaacctcccttagcctcagtttactcatatataaaatgggtatactaatatctaccctttcttctttttggagttattgtgagcatcacaacaaatattccattttattgtcactatatattcagaaggtgtatctgttccactagattaatttcacagaggcaagcaagggctgtggcttaaaaaaaagaattgtagcctgatttgaaaaaaaaaaaaaaaaaaaagttgacatccaccaaatatttgttgaactgagatgttattcacatgacaaaatatgtgtgaaaatgtgatacaacattaagcaatgtcataaaatcagccaagtgtactagcaagtggccacagtgaccaaagatgtgctgattaacaaagaagtttaaagtagcataaagaaataaaatgtggycttttgaatatgacctcagacaatatagtgattttgatgcatcagcaagttccaagccatctgtgccttgatgtgccaagacagcttcttgaacagcttcctcagcattatctacatgtcacactcaacattaaaaggcaaaacaaaatcagcaaaaagttgggagatgaaaccatctcactaccaacaaagctatgttgctactgttcaactctctggagctagacaagtgtaggggtagaatgattctataattttaaagctcctgtaatgtgatgagttacaaagaaaccasgacaacttaagcaggcattgaaaacatagtggtgacattggtgatagcacagcttctagcacatggcagaactgtggttgactgagacatgtcagccacagacaggccaactttgagggccacatttatttcatagtatstagcagcagaaacagctgaaggaaagcagcttggctaacagattggtgcatattctttaaggagccatagctcagaactgttcaccaggccccacaagcacattcacaacatttagaacgaagatgtgaracattcaaaaggggcwttactgaaaataaacagcaaaagtcaattttggaaagggtcaactggaaaatattgccctgaaataaagagtattaaactaacagtgctataacaagttattatgaatatagcttcctagtaaaactatataaggctttatttttgttttgttttatattagggagagttttgggttttttgggagttcttttagtaktttaggtttgagggagattttgcaagaacaaaaggaaaactgaacttaaaagatgttttatttaatacagaaaattgtattttttatcttttacttgtttttgaaaggtagccaaaatccaaacaaaggactgagttaatttagggcaaaataataatatcatcaactactagttttgagcacaatatgccaggcactgagctaggtgttttacatgtattatcttatttgttactcacataatccctgttagagagaaagcactattcccatttgcaggtcaagaaactgagactcagagaggtgaatttatccaagtcacattgctaataagtgataaagactttattctaatccctggttcttgccactcaccatgaaggtctaaagggagtgaaaagagaagacaggataatcatgaaaacatgataggatggaaatgagagccgtaaaagaaggaaagaagagagtagaaaagggaagggtaaggaaggagaccaggcattgagaaagagaaagaattctttagactgattgggtcccttagagtggtaatattctcagtgaccatgatcattccatatcatcttagctgatgctcttttgagtcctgtggaacatcttaccagacaggcccacttcccaccttatgtagtactttccaagggctatttcaaagcagaggttacacaagaaatttgccacatgtcttgacagcttccaggagctggaaggaaatcagatttggattatctaaatttaaatttaaatgtatcctcaatgtatgttctctaactgtatactggctttgcaaaaaaaaaatctataattttaattcacaggaaagcagatgggatctgtcatggagggataaaacacaagaaacatgtccaaatataagaaaaaacaacagttgttttcttgtgcactaattttatagtacaagtatctgtcactgtgtatacacaagctgttattcataaaaaatacaatatttattcagcaaatactgtgtgacttgtatgtatttaatgaccagaaggagcctaaaaagttgatactataatgaataaatacccactttaaaggtgagaaaactgaggctcagaatactaaataacctgaggacactggctaataagtagcagaactggaagcagcagaggtgatctgyagcagctgtgaccagagaagaaatctatgctgtgataaatagtatgaggagaaaaatggggcaaaaaatgcaagtataacattgttttaaaatgaaatgcaaagtgcatgtagcatgaaaagggagggaagaaaggtcttgtaaatcttttgagtaaagaatgaaaattactgtatatactttatactctaaggcttaaattaagtaggttgtttttctaattttccctttttatttctaattttgtgggctaaaatgacccattcagctcagccgttggaattaatactgtttgtcctgatggtttctctgagtaatgctaagttccacactgcagggttactgtctcaatgaaaggtgggtgtgttatttggtcattttttttcctcttggaagttaataaagtcaacattaaccatggccatgtaaccacagaatgggcagtttcttaaaggctcatggtttggatcttttcctgcaaaaactcccacttctatagttatatttagtgttctaactgcctgaatagctggcttgctatggacccatgtgtcaggcctgtttgcagctgagtttgtctgcttcaacggaacctcaatgccaagagtgtgtggttcccaatggacagcctgccgagttcagcctctcatttcttctccagaaatctccctcagtttagcattgccgatttgatgccatatggccctgcagttctcaaaactgtttacttgatatttacaattttttaaaaatcttgtccatgtgcttaactctgaaagtaatgtagtatcatcaacatgtgtggtatggacctatcctgatgactgtttgtatagatgtgattgaatttttttaagtactgcccctgcacaagagctagtttttttaatgtcagtgcagctgttttaacttgaaaagaaaagaaaagcacaaacattttatcctctaaaactttttaattttcaaagacataggacatttaaagagatgtaatgtttctgaaactggtatatagtagactccctacttctattctcctctaacttttaagaattgaatacagttcctgagttgaaatgttgcatagttacatacaaacttttcaaaccaaaatttatgttattgctcaactcctcctaatctttgaaatgttaagttataatagaagcagtagcattagtaatagaaacaaaaagtaactgtatatctgttctcatgatctctccctaagctcagtgaattttccatggacaaagargcagagatgtcaaaaggaaacagttgtgttttcctgggttcatagtagcccaacaagtcatggtaaatattgtgtttgctccttattttatgctgtagcaacaattccacttcctattacataggaaaacctattctgctgttaaaagaggtcactgaatgtatttactacaacattaagaccattttgtccatggaaatattttttattgttctgagtcactctggtttgtggaatttttacatgagttccaggacaaggatgagatgatatatttattttactttgtatcctctttaaatgttttttgaatgcrtgaatgtcaggcttgttgtcaaagtatttccatatttttattactttagaagtaactctgctctatttgtgtctcttaaactcttcactgacaattcacactgtgtactcagcatgttgtakttttggaagaactacctgctttgcccagtgtgatgtgatctcttgttcccttgtcccctattcgagtcatctcattgtatgtctttactatcctaaaggttttgcagacctttgaaaatatttaaattgttttgttgagctactggaaggacttgaattaaattgtgagcttcaatttgttatgcttcacattcatttcttatattaaagtaagcctcaatagaagtgttccttaattcaacccagaatatctctgtgctttagacatgccctggaatcatasaaattcctgaaatttattttcaaatattcattggtttgattgtaattgttgaacttgttaatcacctctaaggaactaggttttaaaagatgggtaatcatattaactgtttgaatataactaacacagtttacatttacagagaagcaaaggatgttttgacattttacaaaatatttgaatagaaaacagtgattgtcctatgggttgagatttcaaattacgagttattgatattccttccatgtattatactgtgtgtgtgtgtgcaattctgactaaatgactgacataagatttaaaatggaatcttgtatttcytggcaagggtaggataattgggtgctttgcctcccaccttcctttactcatgtgccctaactagtcagcctccaatagtgtgctaactggtcagaattgggtgccttgcctcccaccttcctttactcatgtgccctaactagtcagcctccaacaatgccctaactggttagcctccaatagtgtgctaactggtcagactccagcaatatcctaactagtcaacctctaacaaatgccctaacttgtcagcctccaacagtggccgaactggtcagcttccaatggtgcattaactggtcgtactccaacagtgtcttaactagtcggcctccracagtattgtaactactcagctttctacagaaaaaaatgacactgtattgactcaatcttacactagaagggaacaaaataaacaatttttaacagatcatttcttctcttacaaatgatcatgactggtcatacattatatattcacaaggatgggtgtgtatatgagtgtggatgtgtgtgggtgtgtgcacgagagcttgatttagtgtttagatgttttggatgtttttttcttgttaggaaattgtagcatagtaatctgaatcattttattttcaacaggttgacatgatgaaagaagcattagaaaaacttcagctcaatatagtagagatgaaagatgaaaatgcaactttagatggcggagatgttttattcacaggtatagttgtatttattttttctatccaagaatatttttaatacttggcttgtatttacttgttttattatagttttttgtgtttttttgtttttgtttttgagacagagtctcgctgtcacctaggccggagtgcagtggcgccatcttggcttgctgcaacctccgcctcctgggttcaagcgattctcctgcctcagcctcctgagtagttgggattacaggtgtgtgccaccatgcccagctaatttttgtatttcagtagagatgggatttcactatgttggccaggctggtctcaaactcctgacctcaggtgatctgcacacctcggcctcccaaaatactgggattactatcataagccaccatgcccagcctattgtagtagttttaattaccaaagtaacagatgctaaatggagggaaattggaaaatacaggaaaacacaagaaggaaaaaaaatgaccttctattcaaatataatcactttagtatttagtatatatgtccttttagtacttcgtrtatatacatttgcatatttttacaagaacattattggtatgtacatcaccactttgtatcttgcttctactttattcttctacagcatgaatttataagttgcatcsttttccattgttactgtrtatctggtttgtatttaaaggattcataattcaagattagtgtcatttacaaataactttctttccagatggcaaggtggatttaaataatttctatgcawattgacttggcttaatgccagatggataatagcagaactcaacaaaatatgaacagctaatattattattgatcttactggagtcagtttttacagtgtgtaatgtggctactaaagaaacagtaattttagcatttaaccttttcaactcatttatcgtataattagtgttgtataaaatcatgtgtaaaatctgggtccccaaattcattctggttatactgatgagcaagataatcaatagtaattttaatttatagtgagaatttattttcccagrcatgtcagagaatacatttcaccaatgtagccctgacagcaaaggctggtcctcagggacttgggaatgtggccccaagtggcccactgaaagcgtgaagcttcttggaagtctaatattttggctgatgtgaattttatattgaatctcatatatatgtatagtcaagatatagccatttttgttttaatatcaaaataatgttttgcattacttactttggacataattaatgttcctgaagaaggaatagtgtttattctgtgacatttaagyagttctttgctaagtgtcacatactgtcgctatggktggggccaccacgttgccagctctgggggcgccattcttsttagggattgtgtgaatagtatgccctggagttgtgtactgcacctgtgctgccactgtcwcatgcagtggtccatctctggggtttggtttgcatgcccattgaaccctaagaacacagaacaaggagtcaagaaggcctacgctgcattcttatctctgggtgtgcccaagcagactcaggcattctttgaatctgcctagtaagttccccttagaatattctttgtgtctcccgttgatggcactttcattctttttgacagtacagarcaacagtctgtttatctaacaaaataggcttttgtgaaaagttagatgtgtaaatcacacttccttacaatataactcttttttatcagaacatagccatgcaatgaataacttattgtaagcaggtactgttaacatttgaaatatggcttaaccaagctatgttcacaaccatttattttagcagctgagccagaaagaccccctaaaatctcctcagtgtgaaagtgcaacttacactaggagtctcttcttttggtcaaaggtctttccctagcatctcaagcccagtagttttgacctatcttcaaagtaggtactaagcatttaggcttgcctttgatactacctgtagactttttttatttgttatattcaatacttaagttaatgtgttaatagttactttgttcaaaactgagatgatgttgggatatctttacctccttggcactccattcacacctaatgtgtgttcctgccttctrttttctacttgtcacttttcttcatctcttttattttattgcggttaaacacacataacatttgcaattttaaccattattaagtgtacaattcaagtgacattaattacattcataatgttatacaactattaccactcaatttttggattaggaagagttagataagaaataaggtctgtaacattttctatgtgctctatgtcctcttttctctgtawttcaaagcctcattaataatttatcaggaaatggacagaaggaaagctgctttccaaatccagttcctgctgggaaatctgtcagtcaggcaagcagctactggcaaaaattgtttcaataccatttctcttaaatagacagcaacttacctctacttttatttatttttgtgaaatatagagtacattaaaaaagagttataaaatgtttatgtacagtttaaagatcaataataaaatgaacacctgggtgtccacctcctgacttaagaagtagaacattgccaggaccatagacacccctgtggggtccccagtcaaaaccagcctctcccctgacctcaagtaaccactgtcttgaattttgtgttaattattgctttgttgttctttgagttttgcctccatgcatgtattcctaaagtgtatgttgttttagttttgtttgtcttgtagttttataaagctacaagatacctttattagagtcacattatatgaactcttaggtgatttttctacttttgatctaagttgatgtgtgtagctgtagttcattttcaatgttgtgtagttctctgtgataagaatacaccataatgtatgtattaattttactactgatgtgtttttggatgttttccagtttttgtggattatcttctgtgtttctatgtacattcttgtgtgtgtctcctgggaacatatacaagagtttctctaaagtaaacacctggaaatgaatttcaggtgatagagtaaactctttttcttgtcactgaaatgattatatgattttctttaatctgttgatgtagttaatttcattaattcattttctgatatttgaccagtcttgcaaccccagcatgaaatcaaatttgatcatgatgtattctcyttttaacacagtgttgaatttagttcgataacattttgttatgactattatttttgtggcctataatttatatttcttgttatccttgtctggttttgataaaagagttacattagcctcgtagaatgtattagggaatatttcctctttttctattctctrgaatcaatactatttgaattatatattccttaaactttggaaacaggctcttgtgccttctttatggagaaatttaaaactgatttagttgattaatgattatgtgacaatttagattttcctgagtcagttttgatgcgttccattttctaagattttatctgttttaagttttcaatatgttgggtataaagttacttatatttcctaatatctgtttaagcttcacagcaactatagctatattatcttttcattggtaatgttaatttatgccttctttctttgtttgccagaggtttgttaattttattaatctttcctaaggaccaactattggcttggttgaactctttctyttgaatgtttcttttctgtttctgtatttccttccttcacatttctttctttttactctgttctctttttttctacatctcaagttggaattttatctcattaattttagcctttcatcttctctaatgtaagcttttaatgctatgtaacttggcctccaagtactactttagcagactccttcttatttttatgtggatatttttgttatcatttagtttttttaaatgttttgtaatttccactgtgatttaatctttgattcattcaaaggtaatgaggttttttttaaaaaaacttattggttattattgcaagttggtggaacactaactcataactgtaataatttatatgtaaaagaaagactcaagtatttagcttttctttcctttatgaatttcatttcaagtagaccaaatacttgaggagagattttctttttagggttgcagcgagtaaatgcagattcctaataaaaaaataatggatctgtgcaatgatcaacaaatgatattaaaactgctatatgaaagcttgacaggaaactttataatgagggaatcaggctgatgccacttgaacacacagtagtcctattaaaaaaatatatgaatgagcatctaattaaccatctacatgaaactgcctgcttactgaaaatacaaaggataaaggaaaaaatttaaatgttaagttataagaggaagcaaccagtcaaagcaagaatgtaggacagtcagtaggaaaaatggcctggtttctcctataaatgactgagacaggaaggggaaaaacaaaaattgtgaattggcatagaagaaaatgacacaaaagacatcaaaaaaatttagatgtccatttcagtattttagttgtttccatcaggaagattatttaggagatctcatccaacgtactgccagagacagaagtccaacctactttgaagagataagcagcatccttctctttgtactttcccatcacatcttagcctttttttactttttttcaatcagcccacatcacgctccgaacaccttagtcttttaaaatggaaatggtatgcatgccaccctataaatttgttatatacataaatgtggaaattttcttcctccctttgtttcttggaaaagaattccacatgaaatgtgagaaaacatattcagagagaaatcagtattttttttgcctcagagtattatgtttttcttaaaagattttcttaaaagttataaataaattaatttataaacctrtttttatcttgaaagaattaaagaaacttggtattttttcattgtagctgactatttaataaagtgcataatacttttttcaagtaaaatacctctccttgagttaaattttgatctttatataatgagttttcttaaaggacaacacaatcatgccattacccaaaaaactgtcagtgtgccacaaaagattcctgtgtctgccaacaacataagcccttggatattgtcgtaacatcacctgacctatgtcatttgcccgtttaataaggacattatgaagattaaagttataatatttataaaatctatcaagcacttctgcatggctactcttcttatacttcaccataatactctgaggcaaaaagatactaatttctctttgaatatcttttccacatattatgtggaatttcartaaataaagggaagatgagagttcccacatttatgtattgcctaactccatactataattatttgcctataactaagagaccatttttatctagtgttttgccttctgagtagaaaaactgctgaatttcagaaaagtcaaataagaatgaagtttcatcctgcagaaattttgtactttgtacataggtatcttttgatgttttgatttcaaatatatggaatgtgtagtttcaaagacacggcttttagaggtcagacctgaagaccagtcagcacttaactcactttccccagattgtttcctcaggcctcacgtgatcattttataagaaaagaatccgaatttatcaacaatgtctagtactgttcttttagtgaaaaaaaaaaaggtagtataataaattctcacttaacaatgttgataggttcrtggaaactgtgacttttaagcgaagtgacatataacaaaaccatttttaccataggctaatataaacaagagttaagttyctctggcatatttctagtcacaaaaatatcacccagcttctaaatcaaaacccaaaacacttataatattaagcattgaaataaatgtcagccatatgcacatttttttaaattaataaaaacaagataattgcccaatttttggccaattactgagtaacagcagttgtggtggtgggttaaatcagggaataaatatttgcaaagataaaactgtaaggagcccctcctcccaccatacagctcaaaacaatcacaaatatggtgggctcattgagcactttcctacgacatcatttattgttgtacatttgtatgattattggatgctttattacaatcatttgtatccattcattttctaaggcacttcttccagttcaggrtcatcaagggtggctggaggctatcctggaagctcggggtgcaaggcggcaacccaccctggacaggacaccgtcccatcacagcacactcacccacacacacccacacttgctcagactgggaccctgtaaacatgaaaattcacctgctgtgcacagctctgggatgtgggaggaaacccacgcaggcctagagagaatgtacaaactccctacagaccatggccccagctcagaatcaattttttctttttcctcatcaaagttgagcaaaatgatgttatttgaggaactgttttactgttaaattgtcattgctattacttaatttctgatcagagattatcaatgtgtttattattgcctaaataaaaatttcattcctattgtagtaaaatatacataacataaaatttaccattttaaccatttttaagtgtacagttcagaggcatgaacattcacagtgttaggcaaccatcaccaccaggcatctccagaactttttcatcttcccaaactgaaacttcctatccattaaacaataactccccatttacccttccccatggctcctggaaaccaccatcctgctttctgcccttttgaatttgaaaaagtttattcttaagggcagtagtttgaaatcattttttgtagtctctttagtgaagctgttctctgtggtaagagagaactgtgtgatgctttaaggtcattatttatagataaaagaaatgatgtacagtcactggtgccayctgctcactrtgttccatgacatctattacaggcagagaattttttgtgggcctttccaaaaggacaaatcaacgaggtgctgaaatcttggctgatacttttaaggtaggtaaaaggtagtttatgcctggcacaaagcaattacttaataaataatcatagaaccattgaatcaatgtcatgagtaatggtgtttacgcttcactggctttgtacaataattcgtaatgtttgtacatttactagaagttttagaagctataaaattcaaattcctcaataattcagcttcactgggctaccacaagaacaactaagttagcatgggcatcttctgtcttctcccagtgtataattatacaaccacctggcagatgttcctggaacaatcaacaacttaaaaaaaaatctggaaggccgggcgtgatggctcacacctataatcccagcactttgggaggccaaggcaggaggattgcatgagcccaggagttccaaatgagcctgggcaacatggtgagaccctgtttctaaaaaaaaaaaaaaaaaacttggaaacccaattgactctgttatgaaatacagattttttttagattggaatcaggggtcacctgtgcttgagtgccttctgtgtgctgtaaactgtgctaggtgttgcacgtacatcctcttaaggtccctttactctattgattattaatagattggctctctacactgcataggaagggatataactctcaagatgctccgttccccatgaggatgtgagtctccagctgagccactgtttacacaggatattcaaatacaccctcccagagtagcccactccatagatcaaacagccagcaaagatgttgcagcagtcacacatctggtgactctactgtcttcttagaagcagtcttcgtttaactagcaatatccaaatctgtgggtcccagtttttcttccaaatattcaaggtccctgtcagccttcaagaagtaggtgtatttcagggaggtttttaatcagttttagaattattctgcaatactaaactgcttgtttttctattgtcyacgtaggaytatgcagtctccacagtgccagtggcagatgggttgcatttgaagagtttctgcagcatggctgggcctaacctgatcgcrattgggtctagtgaatctgcacagaaggcccttaaggtaaatacaaaactgtgctccttctaaatgtagtgggggtgcctgccacagggtttttcacattctctctgctgggggagtaacaagcagggttggcagggagagaacaggcaggtatttgagcttctgtgatgtgcactgttgtgacctcacattcattagaagccaggaacacctaagtgtaggaagaactcttcactggtgaactgtttttagttacacaccagatttcctaaaaaaaaggccatgattcaaaataataaacaccaaactcatcaacattatccctcaggggaaaggagggcatgccaccagattgagctccttgtaatgttttctcacttaagttggagagttggtacacagggtttgttatattattcttatccttttgttgcgtctggactatttcataataatcttttagaaagccatggttcagaagtacctaaaaagcttaacttcttcatttgcatttggaataatarcattttaagaccggaaatttcctcattttatagatagtagacttgccagaagaaaattagacttgcccaggtcacacggctaaatcaagagtggaagtcattgmtaaagaagatgaccttctgttgttacaatgcagtgctttccctttccttctctgtaacttcaaccccgtgagatgatctggacacccaataaggataaagactgtgtctgttttgctcatcattatgctcctttgcacttggcccacagtgggcccttcataaatgtctgatgaagggatggataaatgaatgagagaggtggtattatctccattttgcagatgagaaaactagatcaagtgactcaccccaggtcatagtgctaataataaatggtgggtcaggactgcagccccttcctcttagctggtcctgcacacgagcatgcatgacttattaaagggccaaagccagaagttcctcttagtcatagacagcaaatctgtgggccctgaggctctttcaggtctcttctcttctacctcagtgccaagtgtggtggtttggctgggaagcaatcgtttccttgagctaaatttcctctctgtattatctgccactctttgagctagctcacctggcctttcttccrcctcttcccaaacggtatctttgattctgtttctaaggcttttattaattgttgctgaacaatctgtctcagaatttgatttgtatcatggtggcttttgttcgtttactttagagaatgtcttttgttctgctccatctggaagttcatgtcaacttcttgcatataaaaaaagctggtgtcttgaaagaaaacatttgataaatggtgtcactcaggaggtctaggaagattatttttctccttagggactgtggtatctatccgtggtacctaggctggtctgcatatgtctgagatcgattataagatgagagggtttaagctggtctataccatgcatttgtgtgtattagcagaaagaacttcttctgggtggaccaactagaaaaagyggccccttctgccattctgggtagaycaggtccctaactcaaatcatttggtccctacctcaataggtctgtaactcaaatagtctagagagactaacacataacaaaataaaaggtaatcaaatatgactaattagcactacgttatatgatataggccctaactgctcttcaaagttcagaggaaaagggggcgttccctgaggcctagatattcagagaaagctttgtagagaaaaatgagactagatgtgagtcttgaaggatggatggcatttgacagggtagaattcaatgagagaaaattacaggtggggacatggcataagcaaagactgagcaaagtacattgatgagatgtgagcaaaccagctcaactcgtagagtttctagtgggtttccaggggtacaggtggaaggggcaggtgagatctgaagaagtaggaacttaacagtgaggaagacaagattatcaccgtgagggagcaatctgggtctttgaggagaaagccctgcattgtttcagagatgttggaccaacattggaaaaggaagaccctgcagtcagaaaagaggaccactgatgacctaggaaaaaaaccccaagccctaagtcctattgcatggcttggcaactcacccctatttctctcttcatctttcccttcccatggtcaaattctctcagaccacatctgttaagggcatcctatgaagactttatagtcctcctccctgtagagttcattcgagttagtgttaataatgatgttccttttctacttgtcagaacctataaataatcctcactagctagaaaggcattcgttggagattgcattttccatcagcaaatgtactgcctaaaccacaggcctgtggatttggtgaatgcccacctgccatgtttctagcatcaaaaatgtcatgttaccttgtagtgaaaataagaggacaaactgatctggggaataatgagctctcctaaggaaatagtcacaggttcgaaatgggttggtgaaactcaggtttgcatgaactcagctgctttatttatttgagagcagtttggtttctatgttacaaccatcaataaaattaataatggggcaattatttttttctttttttattatactttaagttctagggtacatgtgcacagtatgcaggtttgttatatatgtatacatgtgccatgttggtatgctgcacctattaactcgttatttacattaggtatatctcccaatgctatccctccaccctcccccatcccacgacaggccccggtgtgtgatgttccccatcctgtgtccaagtgttctcattgttcaattcccacctgtgagtgagaacatgcagtgtttggttttttgytcttgtgatagtttgttgagaatgatggtttccagcttcatccatgtccctacaaaggacatgaactcatccttttttatggctgcatagtattccatggtgtatatgtgccacattttcttaatccagtctatcattgatggacatttgggttggttccaagtctttgctattgtgaatagtgccacagtaaacatacgtgtgcatgtgtctttatagcagcatgatttataatcctttgggtatatactcagtaacgggatggctgggtcaaatggtatttctagttctagatccttgaggaatcgccacactgtcttccacaatggttgaactagttgacagtcccaccaacagtgtaaaagtgttcctatttctccacatcctctccagcacctgttgtttcctgactttttaatgattgccattctaactggtgtgagatggtatctcattgtrgttttgatttgcatttctctgatggccagtgatratgagcattttttcatgtgtctgttggctgcataaatgtcttcttytgagaagtgtctgttcatatcctttgcccactttttgatggggttgtttgtttttttcttgtaagtttgtttgagttctttgtagattctggatattaaccctttgtcagatgagtagattgcaaaaattttctcccattctgtaggttgcctgttcactccgatgatagtttcttttgctgtgcagaagctccttcatttaattagatctaatggggcaattattaattgctaactactaacatagaaatataaatactccatgttattatagacaggcaggaagacagatgaatagagacaaatatatcacttataagtgataaaagtggtattggctttgtttttcccattttacagttcaaaatactgagacctgatgaaataatcattttgagtgggatcttacagttccagaaacaagtttcctgggccctgattcccctggccccagttgcccaacctactccatactgaatcttcttttttaattagaaaaccttttctaattattttgccatagattggttctagccgagcttgtctgctccttccgtgtctttccacctatctcctgactttccattttttactggtatccaggatctgagcagtctcaggataggtgtgagtttggtaccagatatttattttttcccttgtaaaccttgatgtctcagttctttcctctgtagagaagtccctggtcacttgggcatctctttaaagggcatattacttaaacagaggtgaattgtgccttcctgtgctacacaccgaaagcttgattacttctcacctctgtcactgctctctgagtacttggttccttcagaatctacttcttacatgtttaggtaaagctgagagccccaagggtttctgggtagttttattgcatttgaaatactttgtaatgggttgcaatctactcttggttaatgaagtggattcttatggagatcatcatcttgccatttgagattatagtagagttaatagtgtgtgcaytgtatatttaaatgaaatcatccatctaggaagagtttagcaattctcagctaaaaagcccagaacacataaattcattcatccactcattcattgattcatttaagatggagtctcactctgttgcccaggctggagagcagtggcttgatcttggctcactgcaatctctgcctcccactttcaagagattctcctgcctcagcctcctgagtaactgggattataggcacccgccaccacgcccagctaatttttgaatttttagtagagatggggtttcaccgtgttggccaggctggtctcgaactcctgacctcaagtgatctgcctgcctcggcctcccaaagtgctgggattacaggcctggccaccacaacacatttaatacagggtaccaatctagggaaagaagaaaggaagacattattactgcattttaccatccatatggcaaaggtactagaagytaggttggtttgaacaaatgctagatatttaacagcaagtctgatcctagaaatactattatttaggccaaattagtttttagagcaacctgcatttcctatagtttttctcccaactttgcatctcaccttcatacccctctacctgtaaaaaaaaaaaaaaataatgtaagacaaattaattagcacacaggcattagacctgtttgtactcttccagaaggaatgtttgccttctctaaaaagatgagtactccagttactccaaagtttgaacaraagaagycaacccccccaaagaataaatattctattctttcmtgcacatagttaaacaagaggcaaagctactctctactgttacctgtcagaataatagttattttaagatgaagggaggcagtcatggtccagagggccactttgtgtgttatactttatatattacactttgtatactttaattttttaaagtttaggaaaaatatatatgttacattgttggaagtaggctatgattgacttacagaaataattctccaataactaagtgtgcctaactcctaaccccctgctttaccattctacatgatgactgtcttttccacagactaccctgtttttaatttttttaattaagggggaaaaagacataagaaagagtaaatctataccacatctcaccttgttctttttctagatccatccctgaaattgccttcttttccaaaaacctggattaattacatgctatcgtcacaggaggacagatagtaatatctgcctcaggagggactcacagtaattctcagtaatgatttttaacttgacctcattggtagcattcactcttccagtcaattggagaaaaaaaaattttcttaaggaaggaaagatgaagggagggagggaagggagggaaggatgaagggagggaagggagagagggagggaggtcaggggaggtggtacctttagctaaaactttcctgaaactattcagaggaggaagctgctgaccccacctgggagggactgcagcactgaccggctacaggactgtgccatctgctggccgggcagcaggaggagcatcctcaccttcctaaccccgtgggagaggaattttttgttgttttgtcttgttttgtttttgttttcatttttttcatatattacatttgtgtatatttrtgggatacagctatagttttctttggtggacttttttaaaattagtaattctgttcttttgtatcacaataaattattacctaaaaatacttttaataaaaatactacaaggacgtggtaagaaaagaattatgagatcaccactccattttttgtgcctttgtcatgtaaatggagcttaaatacagtatgtggtttttcaatagacttgtaattttaaattaaaatgctcacaatgcatctcaatggaaatgtcttttaggtttcttatctacttcctgaaataactaactgaatttctaacattccttgaatgaacacaagagctgctttgtacctcatttaaattgcatagcacacagcctgtttttcttttgaatgactaactatataatagagatcactcagactgtatttcctcttgttttgactcagctgcagcattgcttttatgtccaaaaatgtccatgttattttatagatggtcatataaaaaatgaagatggaaaaacccttaatgtgtttggattttatatgctttttattgcctggaatttcctttaatgacaactagcaaaacccaaaagacagaatgagaactaactagctcatatcaacagggtgattgaaatggaaaaaataaagactttgcatttttagttattgttgtcacagggaattatagtgtgtagccacaagattttccactttgagtctctgctatgaaaggcatactgacaatcccattgtaggtttaattttgtcttactatctggctgttgtattcaccagctccacaaaacartgattttttwaaatctgccatgcgtgtattaagaaattaaaacacaaaaccaaatagcytctgaatttgtaacaactgtttatgctccttttcctggcagcagttgcctcatctgacratattcccagagctgtatgccaacaaggctagggtggccaaaataaaatgttttggcataataagccaataaataatttgaagctatgacaccaaaacagccatgctgaattttagcattagtcccaaggcaggaagaagtcaaaattggccaagtaggagaaagggaataatgtgcttttttttccttttgggctttcaagaaaatgtcaaagggaaaaaggaataaattatatttaaaagtgctgttcatcctgtccagtatatactagaccatcaaaaagtattaaactgactctataggataytgtaggggtaatcatctgttggatggttggccacatagccttataaggggcctttcaacccaagactctaacttctgaaagaaaaagtctataagtgaccttaaattagtggttcctagtgagagtggtttaaaggcatctgagtagctttctgaaaacatactaccctgggtttatctcagaaaattctgatattctgggtctggaatggaacccaggcatctgcattttttaaaagctctgcaggtgattctaatgcacaggccaaggttgagagccactgctttcaaggatatctgcaacttccaaaagtgcccagcttacaatcccgaataatgtgcacctgaagaagccaacgtttttgtcatacaggtgcaaaataacatatcccgattacattagcagtaaaagtaaagaaagtattcaaattaargccatagaaaactagaaacttcttaggtttttcctgcccagaattaaacattgtataaacttgaaatataatacctaactgggtaataatttggatgccatgatttaatccatttgacatgctaaaattcctcattaaaatattccaagttaccaaaatcwctaatgttatcattttctgagaacaggaagcttgcatttgactcatattcccatacctcctcctcacacacacacacacacacacacacactcatagaaaaacctaacaacaggacctgatcttactgtgtgaagatatatgccaaaaagggggaaaaaagttaaacttcacactattactgatattagagaataccttactttttaaaataataatcatatgttgattctactaaagaagcataattgcctacagggccaaaatgcccatgaggacaaagcagagaacttagaatccatttcatggattgtcattcttgctctgcctccagctctccctatgtgacccctatctcctatactcgttctcttcttgaaaaaacaaagttgaattagcctcagtaggaatcgagagtgttgttccttcccattggaaattttataacagccagtcaaggtgaaatgcygtgtcttaaacctaggatggagcaaacaactacttggcaaaaagtagcaaccatataattataaagcactagtggtaaggatcacttcagagtgggctcactgtagaatcttaatgtgatattgtcctttcagtgcctgtaagtgatggaacatctggggtttttttttgtttttgtttttctctttgtttttgtttttgagacagagtctcgctctgtcacccaggctggagtgcagtggcgtgatctcggctctctgcaagctccacctcccgggttcacgccattcttctgcctcagcctcccgagtagctgggactacaggcacccgccacctccccggctgattttttgtatttttagtagagacggggttttaccgtgttagccaggatggtctcaatctcctgacctcgtgatccaccgcctcggcctcccaaagtgctgggattacaggcgtgagccacctcgcccagccggaacatctttatatctgtttgtgcttagcaatgtttttatgcctgtttgaggaaaaccacagaaagattccaacttcattccattttcttagaagaagctttaattacatatataactattcagttggatatctaacaaacatgattttctaattcatacataaaactctgataggaaaagcagctaagattttcaaaacctcttattactgtctcttctgcaaaaagacttttaaaacagcaattgaaaagacatcacagtggtaagatttactgagcagcaactattaatatatgaaagatactatcccaagcacagggatactgagtcggatgagaaatgatctctgcatgatctctgccttcaaggctgctcccatttagctggagaaacaagagagaacattaaaagataaaaactgtcaccgtgcaacacaacataagtggctaataaatggttcagggtcctaggaaaggtggtaggagttctggagagggattgatcaaccagaagcaggactcaaagtctgagtgcacctgaatgaacgtcaggcatagctggcacagaagagtggtggttattacaaacaggacagcctggggaagtgtcagtagtaccatcaagagacaatggctggaatgggggctggatgcagggaaacagagagagaggtgaaagatacaagttggggctgcttcaaattatcttggccaatgaaatcggggtttccttatctgtgggctgtgggggacaacacagatttttttttttagcagaggagtagaagctgaaggtgttttttcagaaagatctgtctggcacggttcccataatgatttaacagggataaggattaggagtaataaaactagctgatgccattgcacagcacagtctatgaataaatgagtggaggatctggactaggaaagtagctgtgaaagtggaaagggcagtgcagaaagtgaggcccacttagagaagtaacagaacatcgtgactgatggactttaaagggagaaaaagggaccagatcaacactttggaagataattacagaactcctgttctgtgcccctggggacaatgatgaacaaaatgacttcagaaataactaccacaatggcgtgcctttggtagaatttttggaaaagagtttaaactctccctgtcaccatgaattcagcattcctcatccacaaaggaacaraccatcaaaaattggtgggcaaatgttgctggatttcactgacctagattcacattttaggaatagagcagtactcagatatgacagcagctctggtaggcatccgatgcctaagcttgcaagacactaacggggttggcttccatttcagtttccattggcagcagtggaatcagtgctcactcaagtctggagtctctgtcctttacccttttccatttattttcatctgttactctctctcaaggcccaccaaaaaaatcatcttaaaaacatttgcatgccttccatctctagcagtgttagattgtttattggctgaattgatttggcaaaagatttwaaaaaaaaggatgatttctgtctcatgggctgagatcgtacatcacagcatgacctatgtgatagtctcagccatgccaacaccagtaccttcggtcttgaagggattaggaaacgttgtcagttgagctggaaggaggagggttttgagttttgggttactgtttctctgtggaaatcacatgtattaaatgccrtaggtgttgataagtatcctattgcttggctgaaggttaataaagcatagggtgaaacatagacactaaattagaagtgacattttgaccatgaattattctgcagcctcyggggaaaacttccccactacatgacacaatactagaatttggatcatccttagaaatactgacatgcaaaagaaacacattaaattttctaccaccctcctgcaaaaccatcccactaccattgccctgctcttaatcacttactatttttccttgttttcatctttcaaaatgttgtatttgtccaataatctttaagaatatttctaaatctcattttctcagctatggttctgttgctgctgttgggtccccatattactcatcacactatctgtttgcaaatgttaaaggtagctttggagatagattacaacagccattccctttatctcttcccgaagtgggaccaagtttaaacctgtgaccacatactsagaggtgactcatcgttatagggttccaaaaacaacaacaatgaaaarcaattaggagctaaatgaaaagygctgaatctattagagtttttgtatgttttctaatcacttatttcttttttacccacaccctggcaaacgataagaactccataaagttcggctactaccagtcatattatcagtagcagtaacaatacctgttaggtgtgaagatcatatatatatatattwtttttttttttttttgagacggagtcttgctctgtctcccaggctggagtacaatggcacgatcttagctcacggcaacctccgcctcccaggttcaagcaattctccttcttcagcctcctgagtagctgggattacagacatatacaaccacgcccagctaatttttgtattttttttttttttagtagagatggggtttaccatgttggccaggctgttcttgaactcctgacctcaaatgatcccccatctctgcctcccaaagtgctggaattacaggcatgagccatcacacccagccagatcatattaatttgaatagtgtaagttagtggtcctcaaactttaatgtacccaagaatcacacacagtacacacttaaaatgtacatcccattcctggggttcaccgctagaaattctgattcagcaagactgggaaccatggcgtgattctgatgcaggtaatccatacgctgtgagaacactggctgygtctggagttcaccagatgtcagttcctacatgaaggcagggagagaaaatctattcctaaagtaaattgttatgtccttgaacagaaaatgtcacctaaaatcattcagaataatgtcatattgagtaaaatacctggcactttagagaaatagctctcayatgaaggaaaatcaagcataactcccctagattactgaaatacaagtgcttatgaaatgctaacttttctctaaaatgctgtctttttagaaagaaatgcctacagaatgaaagattttcatttatcacattttccatatagtgcctttctctgttgataacatatgtatattaaaatacaatgtatctgcagtgagtttttattatgctcattctcattaggcacacagtccctcagacatagagaaaagtctgccttccttcccagctaagaagtcctgtggtatgatactaaatacatgatactaaattctacaagaaggaatagtggcaagaggaaggaaacccagatctctgtttgggggagaagtttgtctggtcccatccctgaagcttgttagagagaatttgagaaagatctctggagagcaaccaaagctgatgaaagatggaagttcrgtgactggtgtggattgcacagaaggataatgcaaaagtgtggactggcagctcttttctcttcattgaaggcaggctctgagtgagtgtgtcttttaaaggaaattgcatcaggagactttaggagggttttcagagttattaaaatggatagactatggaggaaaggggactttaactttttgaaaaaattaattttattggccgggtgtggtggctcatgccaggactttgggaggccaaggcgggtggatcacgaggtcaggagtttgagaccagcctggccaatatggtgaaaccccatctttactaaaaatacaaaaattagctggtcatggtggtgtgtgcctgtagtcccagctactcgggaggctgaggcaggagaattgcttgaacccaggaggcagaagttgcagtgagccaagatagtgccactgcactccagcctgggtgacagagtgagactacatctcaaaaaaaaaaaaaaattagttttattgtgacataatttccttacaataaaattacagttttaaatggataattcaatgagttttgacaagtgtatgcagttaagtccaacagaactttaacttttcatatttgaattttttacgagatgcacttgtaatagtgtgataatttaaaaacatgtttttagaagaactgtttgacattgtataatcacacctcacctcataaaagcagcttacaaagacacctaagtacagcaaaataacataactaaaaatagaagggaaagatgatataaaacaagaaacaagaatgaggattttaattggagctgagttagagaatacacaccatctattaatcatatggtttttgtccttcattctgttgatgcaatatatcatgtttattaatttatgtatgttgaaccatcccttgcatccttgcacctttgggataaatcccacttgatcatggtgtaatatctttttgatttgctgttggattttgtttgctagtattttgttgaggagttttgtgtctatattcatcagggatattgacctgtagttttttttgttgtgtccttgtctagttttggtatcagggtaatcccggcctcatgaaatgagttaggaagaattccctcctcttatttggatccattctcttttcttcttggttagtctagcagtttatcaattttctttattttttcaaaaaaaaacttttagtttcattgatccttagtattattttttaactctatttcatttaattctgttttgatctttattatttctttccttctactagttttgtgtttggttcttgcttttctagttccttgaggtgcaacattaggttgtttttttgaaatctttctacttttttaatgttggcatttgttggtataaatttcccttgtaacaatgctttttctttatcccacaggttttggtaagttgtttccattttcacttgtttctggaatttttttttctttctttcttaatttcttcattgaccttgtagtcattcaggagcatgttgtttaatttccatgtatttgtagttttcaacatttctcttattgctgatttcttgttttattccattatggtctatgaagagaattgtcatgattttgattttttaatatttgttgatacttgtttggggcctaattttgattttttaacatttgttgatacttgtttggggcctaatatctatcctgaagaatgttcttgatgtgctaataagaagaatgtgtattstgcagctattggatgaaatgttccatatatttttggtacatttggtctaaagtgcagtttaaatctaacgtgtctttgttcactttctgtcttttgctgagagtggagtgttgaagtccctagctattattgtattggagtctgtctctccctttagatctaatgacatttgttttttattttattttattttattttattttattttattttattttatttcattttagagacagggtctcactttgtcacccaggctggagtacagtgatacaatcttggtgcactgcaacctctgcctcccaggcttaagccatcctcccacctcagccttccaagcagctgaaactacaagcatgcaccaccatgcccagctaatttttgtattttttatagagacagggtttcaccatgttgcctaggctggtcttgaactactgagctcaagtgatccacccacctcaacctcccaaagtgctggctgggattacagatgtgagccaccatgcccagccaacatttgctttttatatctgggtgcttcagtgttgggtgcatatgtatttagaactgttatattctcttgcttaattgatccatttatcattacataataaccttctttgtttctttttactgtttttcattaaaaatctgttttatctgatataaatatatctactcctgcttgcttttggtttgtgtggaatattttttctgtccctttactttcagcccatatttgtctttttataggtgaagtgagtttcactaggcagcatatagttaggtcatgggttttaaaaaaatattttttaataaccttcattactttggataggtcacaggttttttaatccactcagccactctatatctttaagttaaaaatttaagccatttacattcaaggttattattgatatgtgaggacttattcctgttatttagtggttttctggatgttttatatatcctttgttcttttctttctctcttactgtttatcattgtggtttggtggttttctgtagtggtaacatctgaatgctttctcttcctcattcgtgtgtttgctcttccagtaagttttatacttttgtgtgttttcatgatggaaggtattgttctttcacttccaggcgtaggacttcctcaagcatttcttggagggctggtctcttggtgatgaattccctcagtttttggttgtttgggaaactctgaatttgtccttcatttatgaaggataattttactggatggatatagtacccttaattggcagtttttttctttcagcactttgaatatatcatcccattttcttctggactgtaaagtttcagattagaaatgtgctgttagtctgatggagacttctttgtgtctagatgctatagtaatccattctcactgctataaagaactacctgagagtaggtagtttataaagaaaagaggtttaattgactcacaattctgcmggttgtacaagaggcatggctgggaggcctcaggaaacctaatcatggtggaagggtaaggaagcaccttgcttcacaaggagcaagaggaaaagagagtgaagggggaaatgccacacacttttaaaccatcagatcttgtgagaaatcactatcatgagaacagtaagggggaaatctgcccccatgaccaatcatctccctccgggtcmctcccccaacattgggaattacaattcaacatgagatttgggtggggacacagagccaaaccatatcagatgtttttctcttgctgtttytagaattatttgtctttgactttttacactgtattagtccgttttcatactgctttaaagaactgtctaagactgggtaatttataaaggaaagaggtttaattgacttacagtcctgaaaggctggggaggcctcaggaaacttagaatcatggtggaaggcaaaggggaagcaaagcaccttcttcacaaggcagcaggaaggagaatgaatgcaggaggaactaccaaacacttatcaaaccatcagatctcatgagaactcactcactatcatgagaacagcatgtgcggaaccgtccccgtgatccaattacttccctctggtctctccctagacacctgggggttatggggattataattcacgatgagaattgggtggggacataaagactatattagactgtttgattataatatgctggggaaaagatttttttggggttgtatctattttggaatctttgagcttcctgtttctaaatctcttgctagacttagggagttttaaggtattattttgttaaattgtttttctatgccattaaacttctctcaccctttggaacacccaaaattcaaatattttgttgctttatggtggcccataggtcacattggctttcttctttcttgtttttttttcttctttttaaagttctgaaattcttcttgatttagtatcctgttgaagttctcattgcattttttatttcattcattgaattcttcagtttcaggatttctctttggttcttttttatatgtctatctccttggtgaatttctcattcataycctgagttgtttttttaatttctttttattgtttatctgtgttctcttctatatcatggaacttccttaatgttgttattttgaattctttttcaggcacttcataaatttagtttttattggaatctgtctctggagaattattatgttcctttggaagtgtcatatttccttgcttttttgtatttctgtgtcctttcattgatatctgtgcatctggtgtaacagtcacttcctccaattttttagattggttttcataggggaagacattttcctgtagatagatctatggtgttggttggttagggtacttttcttttattctgggcatatatrgtggtgyagtctccataggatttctttggctatacaccatcagtggtgtctgtgatttcctcagtggcgtaggctgcmgttgttagtrgagattatgctgaggttttcctggggataggacgccaggtgggccagtcctcaggccctgctgttggcagcggcagaccaagcatgcctrttcttgggtcccggggtggcatatgtgggcgccagtgttagcaagtccagacgggctgattttggggcctccaggcagctttcttgggtgctggttatggcagcagtgtgccagatgactggatgagtcctcaggctccccatgggcactcactgatattagcggtggctgcaatgggctgggcagcccagtccccaatcctccaggtagtgcatgcagaagattgccagcagtggtggtggtggcaggctgggcaggcctattctcaagttccaggagkaytgcccagatgccagctgttgtagacaaggtgaggcaatcccccagcctccagacagcatgcttgggtttcagcagtaggttttctggtcctgttaggccccctgatggcatgcatatgcacctgggtcaaccaatggggaggggcaatccctaggcccccaggcartgtgcttgggcactgatggaggacaggggtggtgccaggccaggcaggcctattctcaggccccccatggggcccatgggcccaggctgtggtgaacaaggcagagcaatttccaagccccagacggtttgctcaggtggctatgacaatggtggcagcctgacctcaggacacatgctagtgtgaagcagcccttctactgtgggaacagggttttatttcattgacagtggccccaggaartcaggtttcatgctctgggaaacacatgcttcagctycctttgtcccaggatcaccctccccagtgtgcagtacaatgtgtgggmtagagttctggagaccctgccactctactgtgtccaacctgcattgcaccctgcagccctctgttagtggggctccagggatgtgaagatacaggggttgctgggtcccagggcacaatgcagtctggtgggaaatgggctttctaactggctctctatctgtccagaactaagtgggtacatgggacccgagtgggctccatctctggagcaatgctgccacacggaccccgggaataccagtttcagggtccttggggtttgagagactcttatgactaggatttcagcagtcaacatgggaacatgtaccactgggaatctctcacttaccctttcctctcactagggaccctctctgggctcccagctgattccagccaggctgtctaccttgcctccctctccttcagtatctcaggtgttttctgtcacttctctgctgaattccagcattctctcttagatgtctattcaaagtatgattatctacttgctattttggctcttctttgctggggaaacaggtgtccagtacctctagtcagtcatcttaaagcccctctcaggcagtgttcattttgaactagtctgtggaaagactataaaacatgaaaatatgctatcagttttagaatgttatccatagctatattggctcagccttaaaaagacctccagggcttgatgcyggtatgttgtcaggctctcaatacactcttgatggatggataaataaataaatgattttagatatgcagtagcaatgaagagtgtacttgggcatcatatattgtatcaatagaccatagtcagttgtttttaatactggtttagctttgatatgttaagatgggtacattatgwtatatatatatatatatatacatatayatacatatatgaatataaagatcaattatgagtgacccaaaaatgtgctttgaatattccctaaacatctctaactaccttttatatacctttgcttcagagtttgaccaataagttctaaattgttccatgaaacaacatagcccaggattttttaaaacataattaccattatacaaagaaagcatgagtaagaagcaagagaatggagtgggctttcagtcgtttggatgagaaaattcccagaaatgttgggaactgccggaaatgcctggttgttaatgcaacttgccatgcagattctcttgggctgaaagccagacagttcccactctattttgtgacagctccaccctggggaacaaggccaattcctccaaccagcagctgcataacagaccatgacagtgtggccacaatgattctcagagctatttcctccctacagctgcgtgccttcttcgttaaggagttgcctatgataaaagtgaggttgactgtctttttactgctagcatactcttcatgtgcttgtcctgccttaaatgatagmttttcatctccygaaggcatctctttccctttcccacctcacactgccattgtgctgagcccgaagggggcgtaccataaaagattgttgaacagagctgaccaccaattgatctaatccccataataaycaytcaaattagtttccataaagtggaatcattcctttggcaaaattcagaaagggcattcggaacagcaacttgacttctcagatctttcccccaaatcctgtagaactcatttgtatcattcagagttgagtctggggcctctcaggatatcaagtaatctgctcttagggaaaggaatttgtggtgacgtgtggagggtttaggtgtgtctcctttccattctggcttgagacacagtgagaagcaggaagtacagtccctggggttggaaaaacactacatacagcactggagcagtaccacctcctccatgcttttttaggaaaaaatgttggaacagaactaaacggcccaacagctgcattctcgggatatttgaaatggtgctcatcttttaacaaagcctctgtgcatccacaaaggggaaacagaacctgttccttggcctcactgttgctcagtcctcaggagcytgagctctttgaggtgataccctaccagacaggatgtgttaacacatcctcacagtgcccattagggtgtaaaaagggaaagatgttcaagagcaacacagccttcctgcatctttctctgcatgttccctgctgaatggccagcaccctgtcttgtgtacatacatgtgtctcctaaacccagctacaaataaatggtaagcttattcagacaataacaacatacaagagaaaggaaaataattactccaacaggaaaggagaaatctgttctttgcctcgaaagacaaaatctctttgtgtttataataagcacctttagcattttcaagggggaaaagcatatttcttgtttgttatctacagttaccacttcatacatcccttttatttagaaaggctacacctgacataacttttgtaatttttttcagttaagcagaactactcactgctccaaatggggcctgttcattattaaaagtcatttctttgggcatattcttaaatctgtcttaaaatgataaccgtggagtcttgataaattaattgaaaagcttctcctaaggtagctttgttggggttttgttaagacatttattttaagagtaactctcagtagaatttatcaatgaattacttcatatattctcagcattaaattatttccccactaaagatattataattcytttcctcccagtaatgaaaaattgaaactgtcctcaaataattctaaagtaggtactggcctttatgttagtaagtataggaatgtccccaccagaagctttaaatgataaaaaataaggctcagaaaaggaagaagcattaaagartgaagagtgattacaatttcaaatacatgccagtaactgaagaacaattcaaataggaaccaagtaggggagaggattgttcactcaaggaggtgaggttgggggatagggcagagcatggaaacagctgaagtcaactggacaggccctgtcacttcagtgacacgtggtrctttctgagatgggcacaaccttggagattttagtttgtttcctcactggtaaacaagaagtcagcactgataacaatccctgagaacacttcctctggaatgtatgacattccatgcttytgctttgtagtcacctccggacatgcatgagtcacactgagaggtggggaatttgcccagaccgctagatccagtgaataaagtcaggcctaagagatgtagtcttgccatgtttctttctctttcaattcatctggtactaagagacatgggtgatttatttatctgtgggtaaagagtacaatgaagcttctgcagatcacaaattaaaatggaaagccaactggcagttatctggtgattatgagtggtgggagcacttagcctgaatgtgtgggccaaaatatgccacacacagttttcccaattgcttagaaaagtaagtcaatgtgagtaatagattttctagattttgttttgtttgtgtctaggttgaccaggtagcagtggttgtgtatacatgttstaaggatctctctgaggtcctcaaaccactggggtcctacttagtaaacctctggctcagagaactgcctccccagttgtctggaagaaattctgaacttcttgggtaaactaggtccaattcatgtgacaggatgaccgtccagttctgactgcaaacatgagcagactggccatcttggtccaccctcaacagcacataataaacagagatttagacatagtggaatcccattccctgcacctggaaaaaagcacgtttgtgagactgaccaaaagctattgtctagaagtttcacaaatcctaactgccaccttgcatatcgaggcagccccactctactatgaagaagtcaatctgcccattgggtttatggactattttactaaattggggtcacaacctgacagaggcttatgtgttcggtttgatatacacaaaagtttttcttttctttctttctgtgaatgcccttaggtgccacatactctgcaggtaattccagatccaaccccctgttgtcttactttgtcatccagagtcatttgagttaggaccacagagtatagtgcccttctgtatggctttgaaaaacagacaaaccttggcctygttgattttagccatgttttttcacattaaaaataatgagttgtatttctgtttytggacatagaccataccttgtttctctgagggaattcaattgtttacccatgtgattgaccacacagttcatcacagtgccctcctgaggttctctgtagcgtttaaaaaggtgaaaggaatgaagaaatgaaccagttagtgcaaacatattttggtcacctgctatatktcaagtgacttgcaagaaacaaagagggaagtgaaccgacttttattacacatttaatatctgctagaagcttgtgctaagcattttatgtacattatctgttttggggttttttttaaawaatcttcagagttaccctgtggaggataggtatagcattcccatcccattttactgctgagggaattgaggctcacagggcatatgtgactttcccaaagtcacacaattagtgtgtggctgagcaaggcttcagacccagacctttctgactctgaagcccatgctctgtccacctcattatgcctggacctgcattcaaggaggtagcagtctggttgaagagagcaaaactgcacaaaaactcatagtaaaatttgtccttattccaaaaactttgggaactttgtagcaattatctctctaggggatctaggtagaagggatgctaagcctgcaacactactagttacatgttaacgtaggccttagaaagaaggaagctgaagaagtaattgtgagaatatggtaggtctagtcttttatggtttttaagactaaggattagactccaagacagattatctgtggctcaggctggagtgcagtggcactatctcggctggtggcaacctctatgatcttcccacctcagcctcctgaggaggtgactacaggtgtgtgccaccacacccagctaatttttttgtagagacagggtttcgccatgttgcccaggctggtctcaaactcccgggctcaggcggtcttcatttgttcccttgcacacaataataaatggaagctgctattattgtgttttggaagcagccaaaaagaaaatctgcataagaagaactaaattgcaattcgtaacaaaagagctacttgggtctgtttttttattctctcaagcgtcttcatattatttctgggcatatccattttataaagagggctaaattgaatatgttgttaattttcttagaaaagttaatctttaggagtgtctttaacttcttaattgcccacatgttggattagatctaaggtttctaatcagggctgtaaagaaagacccactccataggtgagcccctctatgggcctatcccttcaagaacaatttaaattcaaaagtgcaagagagatgtccagttaagtcctttacctataccagacggtagcarrtcataacaggattacatacaagaaaagaattaatggtactgccagagaatgaataataagtatcaagtgaatgtgaaaaagtaggtgttatgtagtttgtaggaggtagtttcctgctgcagaagttgagaaagagcaaagtgagatgattaagaaacgttttgagttgcacagatctgggtttgaatctacctatgtgacctaaagcaagttatttgacctctctcagtgcagtttcttcatctgtaaaatagaagtttgagattagataataaatgtaaaatgtttggcatggtgccctgctagttcttattgtaatataattayctatttttctgtcagtttcctccactaaactgtaatcttggaaaactgggtctgtgacctgttcatctgtatgtctcagcctttcatacagtgcataagctcatccccattcctgatgtttcattccatgtgaagggtattccattatgggattgctcttggcctctctccacccttgacatattccacactagaagtgaatgatttacctgactggtgagtcaggaagggcttactatgtgccactcttaggaatgaattttctacaggaagcatgctgtctctcttctgcttttcataccataaatcttactatccagtgcccccatgactgagtgggcatgtctgcctagtaatatgaagcacatttccatacaaacactgaaaagtaaaagtaratgggaccataaaggtagattagaaccagattgtggaaaagatcatgttataccttcctagcatgatatttcagcagattccttaaaactgtatggatattgataaagagtagaaagagtctacatgactaaaccccaaataatatttgtttttgtgggtttttaatttggatattcttgttgttagggggaggagtgttgttttttgatagttttgattatgttgaggaggtaaggatgaggtatcaatattttaaattttgtgcagagttcatttttgtgttgtttttaaagttattttatgctaggatactaataagttcatcatttgaagaacagacctgccaagtaggtttttttttttttctctccagttgtggtccagggaacctctgcctcaraattatctgtagggcttcaaaatgcaaaattcctatgcctcacccaaaatctgccaaaccagctttccctaagggtgaggcctgggaatatgatkttcttattctccccaggtggcttttatgctcattgtattaaggccatcacctgccaatgaacaggtgaattcagtttaaaagtatgtggaagagcaaagcgtgtgtgtgtgcgcgcgcgcgcgcacgcacgtgcatgcacacacgtgtggtgttactgattaatcagattcacattattgactattctgattactggtatggcccttctttcctatagaggaggcagccctgcttactcagccaaagatatcaaaacccctgctgggccttacatgtggccattttgcatcttactgataagtcttacgaacaaagactagaaaaataatagacggttttaaaaccttaaaagaaaagagagacaaacacatacttttaaagagcaacaaaaacccttgcaattcttccaaagactcatagcttaatcaagttttccttttctggttctaagtgactggaggtaatagatgggaatttgaacagaggaacagcctaaagtgtcagttccaagcttgtatcctaccacaytgccttccttctgtttgaaagtgtggggagttactcttcttaggcctgctttgtttctctttatagatcatgcaacagatgagtgaccaccgctacgacaaactcactgtgcctgatgacatagcagcaaactgtatatatctaaatatccccaacaaagggcacgtcttgctgcaccgaaccccggaagagtatccagaaagtgcaaaggtaaaaaaatatcccttctgaccactgcagctgggtcagcctccctggggattttttcataaaggagtgaccaataggagcctccttttcctgtatacatatcaaacaattaagaaaagaaaggataatacaatttagggcacaaggaaaatgtgtttcacttttctcattcatgtcattgctcactaatgcatgcatagtaattgagatgatcatgccgggtattcaaggcttttcaaataaatactcagattttcaaataagtagtcacccaagtctatgccccagctctgattaaatgtactttcccaccctcagatactcattaagcataaagacctacaattagatggtcaacggtatcrctgttttctgacagatctgagctgtccctcagaaaagggcagcttttctttttatttctttttatttttattattttattattattattattattattattatttttgagacagggtctcactctgttacccaggctggagtgctgyggcacgatcttggctcactgcaaccccacctcccgggctcaagagatcctcccacctcagcctcctgagtagctgggactacatgcatataccaccacaacctggctaatttttgtatttttaatagagatggggtttcattatattgcccaggccggtatcaaattcgtgagctcaagcagtctgcccgcctgggcctcctaaagtgctggaatgacaggcatgagccaccatgcccagtccttttttttttttttttttgagacaggatcttgctctgttgccaagtctggagtgcagtggcataatcatgtctcactgcagcctcaaattcctgggctgagcaatcctcctacctcagcctcccgagtagctgggactacaagcatgcaccattatacctggctaattttttattttttgtagagacggggtctccttatgttgcccaagctagtctcaaactcctgggcttaaaggatcctcccacttcagcctcccaaagtgcacaggcatgagccaccacacctggccatttgtttctttaggtagaggagtatgaatgacccagagtggtgggtgttcattgtcagggctgcagaaagaagaaactgcccgtgctaggtagcaaaaagctcttcattgaaaagatagagcaggtagtaatatggtacactcgaaatcagccaactggtcgctccaggagtctctgtgtttgtgttccaataagggagctctctctggatctggaatgcttttcctggtctaagaaaatctcccttgtttttcagcatactctgccagtctcatctatatactttagtaatttcgattttaccctaccaagcaaacataacagtgctcgtccatagattcttcaagtgtccatatcttctaggcactcagcatctcatctctgcccggaggaacaagatatttatactatgcattacagaagagcctttagtaatcattgatcttttttttttgtcttaagcttcgcaaatattagaaaatattttatactaccttttaaatatgcaatatgatataattactaggttcactctctaatcacagcctcttyctgagcagataaaaagaaaaaggtgagggaatacatagataattttttctatttccatggctgaaagtgtgaacctgaggaaaatagagtactcctgacccagaactggggcttacccagctcttagatgagtaatggatctcatactttaatgcacatcagggttgctaaaaatgcaagttcctggacccccaccctagaatctgcaatatcaacaagcacccagtcacagaactcactttgagaaatacaggtctgaatcattcatccctctttagccacattgatcatctgacctaccagatgattattcactgcccccctgattcagccgtktgtctctcaaaaataacaatagtattaataatatccctgtttactgagggcttccccggtgccaggcagggtgccaggcatcccaggtgtattatcttattcagtccttgtaacagccctatgggggcaacattactattccaatattacagagaagtaaaccgaggctcagagggaatgtcacttcactgaaataattctttaagtagtaggttgacagaactgggtttgggaccctactctggctccaacactcttaattaaccactgtgctgaattttaagaaacgcagtgcttcctaaagaagcacaggagattgttattaggcagtacactttcaagtgattctgtttttaaaaatatgctttgtttgatcatcacagaacaatctatgaactgttaattgaagttttgacatatgctttctattagtgtcaraagatgctaataaaattcatacctgtaatttaaaagcagtttaacctgaaatacttaagttatatcttgtcaaatttttccagcrgtgttggtaagaaaataaacctaaagtatagttgagagggttttaaactgtgaagagaaggcctagtgtggtggcttatgcctgtttaataccagcactttggaaggccaaggcaggatgatcacttgagcccaggaacccaagaccagccctggcaaaatagtgagaccctgtctccacagaaaataaaaaataaaaattagccagggatagtggtgtgtatctgttgtttgtcccaggtacttaggaggctgaggtgggaggatcacttgagcctgggaagtygaggctgcagtgagccatggtcgcgccactgtacaccaacctggacgacagagcaagaccctgtctccaaaaatatataaataaataaaaataaagtgtgaagagaaagtaatattcagactgacacatggtcaccaacttccatgtaccacttaatctagcaatgacaatggcagagtaaaggcatctctagcaaaaccacatttctgacacatctttggccttgaggttaaagcacagggctagtggttaaccagttcccaccagctctatagggatgactgtgggcatgtgtgtggttgagactgcctgtgtgtcttgggattaaatgaatgaaaagcctagatntacraatcaawttgattctccacwtctgaggatggtaaaacataatccttcttttcttccttttccttgattcccactgtaggtttatgagaaactgaaggaccatatgctgatccccgtgagcatgtctgaactggaaaaggtggatgggctgctcacctgctgctcagttttaattaacaagaaagtagactcctgagctgcagagtccccccsggtwgccggcaagaccgcacaggcaaggccgatgactctgtgcccactcctgttgttttccttgacaatctactgtgccactgtgctactaactcttgtttacaaaatttgattctaagttgaattgcttcattcaacacycccaccctccctcccctcgmggtggtacctaagctgtggatttgctaaatgaattaagcaacctagaagatacagagctaatgaattatcaaaatgtgattaatcccagtaaggaaacactcatttagtgtctgtatttttggtgtgaaaattatttagttgccagtatattctgaagaatgtcttcttgatcagtcagataarcttgctttttttttttttttttttcatgaatcatgtttggttcctgtgaaagtccctggtccagggatcctcctcctttctcttttacttctgaattctgaaattcagttagttacttttgcctttcgctcttctatcacagccaccttgaccttgggtaaaacccaaggtctttccttctggctaccttcctgcaggtccaccctgtctgccattggtctcctctgcctctgactacatctgccaccaacaaccctcccctcacccctgccaggggcagacaggcttctcagcagaactgtgactgaaatcagagctgctgtctggggcagtgttaactacacagaggcacatcctgacagggtttgccccagagatctaaattccagaaggagggcaccacacctaggaaggtaaatccagtatcagaaggttgctaaaagattaaagatcaagaagcttggaaacatcccwtgggtacaatgtcttagaaagtctttaagtcacataccatgaatttttgcttcattactgaccatatatgaccttggaggaactcttttttttttttccttctactcatttctgtttccacctaccctgactcaccgtatttccagtcttctacccctgcagttatcctagtccagcaaagtcatttctttcaaaagagacatcatgtctgaaaataattactggtagtctaatatgagccagagtaaacagctcctcatggtcaatgaacatgttcaggaagcgatcaccttgatgcttgaacccaaccccagacagtggacaattctactttgaaatatccgtgaatatttactgtgggatccaatttaaacttctttcttctctagcctttaaattacacaactttgaactgacacggatctcttacaaagaacaatgcggcactgaaggaagagatgattcctttactcaaacctgcaggaatcagcctattaacaggcaggggaaacggtactttccaatgaatggtaactgatccaggcacrttatcacacttcctagtcatctccacctttcctgtattgcctgtggcttgttgtttaagattaagaatcaaagagattaagaagtatcacttcaartcttgctctgctcacttctatgtttgcagtcaaattattccttatgttggtgacctaaagagaattactttcattcatttcatttcccccgtagcagatggaagtgagaaacctctgagaaaatgaaaacatccttaaccactatctttcccttttatttgattattttatgtcagaaatttgcaaaagtttttttctcctccttctcttccttgttgcttaactttttaattcatgccatatgcagatatccaattatgtgcatcctgtgaataaaccacgtcttggtcactgtcatattttgaaccatctcatcagagatgaataatatctttttaccagagagagaacgaatgttagccacatgcccaagttaacaaagaaaaaatgttctcaaggttgtccttttgggttaaatctggcccttccttggcaaaagcaaaaattctccctgtgagagctcaacatctcaaatacaaccacaggaaaaatggcccaatctgccagtttaggcttaccagcatataatttttaatatctttacttctrtcatcccaaatcaaagaactcttctctattatgtttaatcaattgcaagcaaatagatttttctttgtaacaatttgttctgcagaaggctgtttttcacttttcctttcttttgcttctttctgtctttccttctcttttgtctggagaaatcacttagactctgtgtgcctcttctacattgcattctgctctgctatgttacctgctaggctggcttctttggactccctatatgattgatgatgtgaaaacctaaattacttgcagcatagtattacttctttgatgttctcattagcataatgttatttttgaaaaggaaagatactatcacataagttttcctcatctgttgtgatatacaccaatggataaactaacggaaactgctttttgacattaaaagacaggagaaattatatttaactaagtaaaagttaagtcagaattacttgggtgatgtgattcaatttagttaaaggatgatatagagaaaatacattatttagcattatttcttcagctataatgaattgctatagaaatcaggcagatctttctaatgtgtattgattggtcttttcagctactctgaacagattactaaggccatctcctcatctctaagggagaaaaatagtctgtagatgaataatgtaaggtaaagagttgcatgtcagtctttgtaattatttacactttaactttctccagaactcagacatgatttcaacatggtgttagatttgtgcattttattttcctgaccacctcattccagccaatgtwtggttatccactctgtgtgccaaaaccaatcatgcctttcacggccmtttagttcagagaagttctgcactgatttttagtctcttgatgtctcaatcttacatgtataccaatcacaatggaataaagtgttgagttgtactgtgatcaacagtgtatgtctcttttctttgcaacagaaactgccatggggaatgaagtcatcatttctttgctgtcagtcatgggatattttctctcttgtcccttaggctatgaacttagaaaaataccatacctgtaaatcaattgccatcaaagcttgggttaaaataatatttgaagtgatacttcatacttcaggcacttaaaaagtgtgcatagtatgtacaccaggtcaggagagcttgagttcccctgtgcctctcctcaaaacggcgtcccttcatccctttcactgttaaccatattcagcacatagtcagttatgtggttcagttatggaggcaggtaaatgatttttttatttgctcattcatacaagagtttgtttttgttatatagtaagcatcttttagcaaatttgaaggtttttttaaatgaggcttttttcaacaagttttttcaatctgtattgttttctttcaatgattgtaaaaataactgcttactgttaaaatccaagcaacacaaaaaactaagtaaatttaaaaactaccccacaattttatcacccagagataactattattaacatttcagagaataatcacagatctgtaaatagatagcagtataaatatgcaataattttacataatcatgctgttctgtagtctgcttccttcgacttagcaatattgttggccgctttccatctcaacaaatgtagatctacatcatcagttttaacagccctgaatattctacaacacggttattcaagcagctcgttctaaattatacatagtgttatgtcacagatagtcaatatgcccacattgctattagccaggggtcttcagtctatcaaaaatgcaccgcttctaagctttcacccagccccagagctagttcatgtggcatatttttatcataactgaatgagctgtgtgaatgctcatcagatgcaaagaccagttctaaaattccttggggatgtcattgatttaatcacaccttctcagttggtgttgcattgattatctctgcattatttagattgtcactggcartgatgctaaaaaatgccaaatgccaccttgcaaacctactgtgggtcccagtcggaaatggagccctccacctcagtgccagatatactgctcctccagaggagaaagggagatacttcttaaaggaagagttggcaggggttccctgactgaccttcctccccacctctgaaagaataaggggagaggaaacagaaaaataccctccgtagcaagctatagattctggaagtgggaattctgctcactgaagaatgctggtcatcaacgattttagacgagtgagcacgtgtttaacaagtgcccgtactctgccaggctctggagtacagctccgatctttccagaactgatggtttgggagaggcagggaaggacgactacacaattacacaaatgattatgatacagcagaatgtacgaactacaaaagaacaatgccgtgtctgttcccaagtcagggagaccagacataggaattggggtttaatctgggcttggaaggacagctctggcttcaataggttgagatgggactacaggttgtctaggctgagggagccgcagaagcaaaggcatggaggtgggagagcatcgtgttcacttcagaagcaagtatttgagcccctgttacatgccagttaactttgctaggccctgaggatacagtggtgacagtccctaccctcctggaatgtacatgcaacagggaagactgacattgaacaagttagggcaaggggaatgaacattattaaaggagaatggggtgcttagagcagaccatagggtcaagcaagcggatttatttggctgaaacacagggtaagtgtaagagcatggtgagacaacattggttggaacattgagggccttgcctgctgagttaggatatttggactgaaattggcagtctgccaggatcccctgaagacttttcagtcaagaagtgatattattggagcttgatctggcagcattatataggatgactgggaactgagaaagactggtgtttcgccaagcttaatttctccaagtttaatttgttatttaaatatctcttcttaccaccaaaatggagcctgaaagcctggcaattaagtctctttatattttctttcctgaagaacagattaataacaccttcccctcccaactccgaagggacattttcaaggcaaatgcgataaaagaactgaagggttctttggatgaaagagataatgtaaatatcattatcatcatcattatacttattaactccgatcacagcaagcttagatcccattaaaatgtcatcttctatttgaaacgtcaatcacctactccagaaataactcgggattttcatcacggatgcctctaagctggcctgacggcttccgtggtgaattcacaggtttccctggtagctgacatggctgtgccacagacatacttgcattaggaaactgttggctaatcggaatgttccctgtctcccttccccctccaaaccctcatttctaagttagtgaaagctaggccacttatagcacaagataactggggttatcaggcttttaggaggacgggtaagtgccaaatatattactgtcactataaataaataaaagattcaaacaagtatgaacttggtaaaatattgcctgagctggcgtgtgacatgaatgcctaaaagcaatgatgggtctctaggtcttgggaggccccctctatttataaatggaaagtttagtcattttggctatgaatactgagaaagagcttgagtgaattaacacaggcctaaggaggtagcttgctgccccaactttattgaagtctaattgacaaataaaaatggtatatatttaaggtgtacaacttgatgcttagaaagacattgtgaaataatcacagtcaagtcaattaacatagccttcacctaacagagttatcactttctttttttttctttttttttggtgataaatatttaaaatctttccttttagcaaatttcaagtatgtaatagaatattgttaactataatcacattgcaatacatttgatctccagcatttttctatcttgaaaactgaaactttctgccctttggcatctccccatttctcactttaaaagcactttaaaagcaggaactttaaattcctgctcatggacaagaaagcttatttattagctaaggctttgaggtaagaactcagaggatgaccattcaaaattaaactaggaccctatatgctataggttgaatgtgcctctatcccaccagggtacaaagactgcatatttcacattgatggaggaaaagctcaggaaccaaacaagttctgatttcaagcaacagtctagctgtgtaaaaggagctagtggaataaatactgattcacagggccacagaggcttaaaattccagggaaggatgtgagcaaagtcatcattttgtttacaggggacccagatgagggtatgaggtcccctagagttaatgctaagacagtaacatggggtttgcttctttccaggcttgataataattgggagagacagaaggaatgttgttagcagggcaagatataatagtatcaaggagtctgttaggaaatataattcattcccacttggttcaaataaagagatgaccttaatgaaggtctgtttcagaagtatgggtgttaagggtaaaaacaaggggtggtaagacacccggaaaacagatgtcagcagcactcctaggcccagcaggacaaggacagaaaattgtgctgcaaaatataagacagagaaggcagggccacagacccagccagagagcagagaagaagtaccttaacctctttctctcctaactctgatctgctggtgctccccattggctgaacacaaccacaagatgcagttgggggctcaggggatgcctccagcctaggaggtcagcgttctagggcagagaactggcagagaagggcagaggatggatctggagagtcagaggatatcagcacaaggccactgtgaaaatgagctcttagcctatcagacagtggtcataaccaactctgtaaatttacaagtctctgtaaatttaaataatttattatttcagttatcatttaataactcttggcagattccttaggcacatgccagttctgtggtctggtcctccctccctcaacatcagaaaataattggagcagaatcaacaccagaacatgagtatgcacggcctgagggtggaagaacgttgcattccagacccatgagtcctggacctctttagtaagcactgtgttatttctaaaattagagcagtctcttgggcacctggtatcccaaaacagctagttgcctttttgtagcatgcccatgaccttctggtaacataaagttgtttaggatcctgaagtacctcttttctgtttccttttgtttgtacatcctgctcatcttggcaggcacagctgttttggttttacttggtcatattgcttatggggataatagtcagtctaaactaatagtagtgaattcccctttcctggggtgttcaagtagcatttgaaggaccatgtgcaggagtggtccttctatccactaacatctgatatacttaacatccataccaaggtattcctttcccaccctggaatcttttagtaggcctttgtactatattctgattctgggtgactttygtttcccctctactacccctagtctcccaaatagatgaacattgccctcatctagtgttttagttcattttctgtggcttataacagaataccacacactgggtaaatgataaacaatagaagtttatttggctcatgattctggatctgggaagtcctagagcatggtaccagcatctaacaaggttcatcccatggtggaaggcggaassaagtgcacaagacagaggcactagggatcaggcttaccttataactacccattcccatgataactaacccactcccatgacaatgacattaatgcatttgtgaaggcaccaccctcatgacccaatcacttcttcttaggcctcacttccaaacactgttgttttaatgattaagtttccaatgcttaaacctttggggaacacattcaaatcacagcatctactaaatgacagtagtaagggttacagcttcaatatggtagcatgaagaggtctatggattcactcccaagtgaaactggcaattcctcaaggatctagaactagaaataccatttgacccagccatcccattactgggtatatacccaaagaattataaatcattctactataaagacacatgcacacatatgcttatcgcggcactattcacaatagcaaagacttggaaccaacccaaatgcccatcaatgatagactagataaagaaaatgtggcacatacacaccatggaatactatgtggccataaaacaggatgaattcatgtcctttgcagggacatggatgaagctggaaaccatcattctcaacaaactaacacaaaaacagaaaaccaaacaccacatgttctcacacataagtggaagttgaacaatgaaaacacatggacacagggaggggaacatcacataccagggcctgttgggtcggggggtgggggaaggacagcattaggagaaagacccaatgtagatgacaggttgatgggtgcagcaaaccaccatggcacacgtatacctatgtaacaaacctgcacattctgcacatgtaccccagaacttaaagtataataataaaaataaataaatatttaaagtctctggaaatggtcataaatgtacatagcaaatgaagaaacatttattcaagaaaatctattaaaacttggtaagatcagtgaatcagtgattttgacccaagacccacacccttcctccccgctcacag

SEQ ID NO: 94851 - DNA, 22374 bp, Homo sapiens
  misc_feature (1)...(22374): n = A,T,C or G
tgcccatatgacagaacataataaaaatcaatcagttcaagattttttccagtttttaaaaggaagatttatttaacaagtttcacttagtacaatacatytaaatggaaatcacaatacaaggaaagatttaaaccaaagcctcagattttcatacaaacgacacgaccaaacttctaaagtattggtattacatcttaaaattgtcccgtatccttaaaaaaaaaaaaagtgtacactcacgtgccttacaggatattaaaccaaaaagctagaattaacaaacatgccaaatgttttcactttgaatcgtagacacagctcctatatttgagttttacagaaaggcatgtttctcaacatgcatccgaagttttcaatgtatttgtggtataagagcaacatttaacataagtgaaactgcattaacctaaatacgcttactgcttaggtacactcctacaacataactaacttgaggaaagctaaaaattgttttaacagttatggtcaatactgaactttgttattatgtcctagatgaatgtttcagtgttcaaaattactgagcttgaagttttaaaataatctcaacttccactttacagtaagcatgaatcacaagcctgtaatgcaaaactgttaaacttaactcgttttcttaaaaaaggagaaagaaagataaagaaagagaagctgaccaagagtgatcagaatcaattatatttcccatttaccaatcatactggatatactaaacatccctcccattctattcaactcccacaaatgtacagcttttatatctggagtagctatttagtgctccttctctacctaagcaaggtttgactgatagtcactggarttttcctgcagaacttggtcatatccactcatactgctctgaccaccataaccacctccataaccaccactcagctgctggctagcaggacctccataactagactggttggataagcccatccctcccatcatttggctaccataagcgccaccacttgcccctgctgtagaattcaaaaaaagttctacatagctgtgatcgtaagcacccccacttgttcctgcagtagaatttaagaagagctccacatatctgtgttgcatattagctttgtcttttgccatagctgccacagcatcttcatgagtagcaaattcaacatctgcctcaccggtaactctgccatcgggtccaatttcaatatgtactctcatgggattaagaggtgagaagaaattataaatatcattctcagtggctctgtaaggtaaccccctcatgtgtacacagtgccctgtggtgctctggaaactggacccaccatctccgtatctatgatcagacattcctgaaaaacagtaattgaggtctcttccaaatctatcagacccaaagccatatccatcattatagccaccatagtcatcatagcctccataccctccaccataggcaccacgcctcatcctttcaaacccagctcctctgccaatgctattataccctctgccagcccccggcctatcatagggacctggccgctgcatagccatgagctttcgagggggatcatagtgggttcgaacttcagctcggctactcttgaagatctcaatgtacctgtgccctattctttccttgtgtttctttaaggccttctcagctatctcctgtgaagcaaactgcacaaaggcttcccctgtgcttcgcccctgaaagtccactggcagtgtcatcccatttggcacaatttccaaccctgaaaagaactgaacaatctcttccttgctacagccaaatgggagtcctctaagccggacgaagccatcgttggcagtatcagggctattcggacctgtatgcttcaacacccaatccatttcaacactgttagacttgaatacttcaacgtatctgtgtcccatggtttctctgtccttcttcaaagccaatttcacttcctcttcagattcaagttcaacaaatgcttcaccacttggtctgccttctctggtgtagatgaaacgaatacctgatgtgccattttggatcttgcaatcagagaagaagcgcatcacttcatcggctgagcaggaccagggtaggcccctgaccttcaccacgaacccctccctgccttccgtgctcagcatcatggtgattgttgggctcttggtggcaagtttggctcaatgcaattttggtgtagctgaaaaaaaaaaaaagaagactactgtcatggaaaaatgctcgtgatatagtaagagaaaaaagcaaactattaatagaaaattcaattatgctgacagcttttctgtaagacgtctgtataaacagagagttcaccaaatttttaactcattcattttttagcagttatttattcaatgcctattacgtgttagataccattaaaaattaacagcaatcggccgggtgcggtggctcacgcctgtaatcccagcactttgggaggctgaggtgggtgtatcacctgaggtcagcagttcgagaccagcctggtcaacatggtgaaaccccgtctctactaaaaatacaaaaaattggctgggcgtggtggcaggtgcctgtaatcccagctactcgggaggctgaggcaggaaaatcgcttttatgtacccaggaggtggaggtgagccaagatcacgccactgcactccagcctcagcgaccagagcaaaactccgtctcaaaaaaaaaaaaaaaaaaaaaaaaaaaattaacagcaacaaatcagtgggagatgtcaacaaataaaagatggctatatctgaatatataaacataaaaaacttcactagatcaaaagattaaacaacaattaaaacacaaacaaaacacaggttatgtaagttctttatataatatcttcattatataaaaatgtatgcaaatcaataaaatcagggaaatatttgggctccagagataaatgaaaaaaagacattattgggaattcacacattcattttagaaacattttttagttgccatgtccaatattcggctctggcatacaagaatcaataagcccagaatgggcttatggtcctacaggagcaccgaatgtcattattaaagatgtaaatgcaaatatacattatacttgccatgaccctctgagtggagtgtaagcatagtatcaaagagggactagttgatcagttctattggttggaggccaaatggttaaatgaaacagactaatctgcccagggatccataaacatttttttttcttaattatgatgaagcacaaataggagagggaaaagcaagtgaaaagactggcaaggcatagatcagatcccaaagactttgatatacaaacactaagcgccttttaagacttttaaaccggggagtatgtagggtgacttcaccaaaactctttcagacagatcaccctggcaacagcgtggcactcaaacagaagggggtcgacgtggaactagggagattagttagaacttgtctcataaatatatgttaaaggaatcgcctaaggcaacaggagtaaaatggagaaaagatgtatctacacataccaaaaaaagtggaatctgcgggacttgataacagattaagtatgagagaatacaggtataggaggatacaggagaggaatctgggaaatgttcaaatttaatcaatcttccagcaagttaaaatcagaactaatcgttatttttcacccatcaagataatggaaattaaacagcaacagtaaatcagtgctatgcagttcacaaactaatacactaccagaagagtgataattgatataaactatttcctttttgataaaccccactatatcctgaaagcaatttgataatatgtatcacgccttttgacagcaaatacatttcagttatgtgccctaaggagatgatctgaaattcagacagatttatggagctatatattctttgaaaagtactttattaagaaaacgaatattatgcatttaattttaaaagttacaaaaatatttaataacatgagaaattacttatgctataattgtaagtgacccaagagcacaactgctttacaatatcaactgtgtacaaaatacatgttcccataccctttgacactgctagaatccttccaggaatctagtcaacagaaatacttacaaatgttccttgcagcactgttagtaatggcagaaaattggaaacctaaatagccatcattagaggaatggctgaatgaattatactttatccttaaactggaatgcaatgcagccatttaaaaaaaatctatctgccttgacccagaaagatctccaaaatacattaaataaaagaatatacatagtatgatcctacttatagtaaaagattggcatgcatgtatatacgtatgtaaataaataaaagatctggaagcaaacttgtttttgagagaactgaagggtgggggggtgaagtgggcttttcgctttttaccctatatacttctatacagttttaattctttacatttgctgtactgggattttttctttttaagttagaaagaacatattagtggttactctgagtgggaggtttatggattttccatgttatttttccaatttttttatgcagccttaaatttctacagaaataattacttttacttcagcaaaaaaagtaacataaaacaaattaaaatgtttgcatttctgggatttggtataggaaattttataaaattttctaattttgtatgtggatggtttatctgaaatggtctgggagcactgggcctcttggaaacaaagtacaaagtgtaataacggccwtaaaactacactgaggaaacgatttaacaaacatttactgattgccgattatgtgcctagcacactgcatctgcagtgataacagttttcctattaaccatcctaaggtctcagtgacagatttacaagctgtttttttatttcattttgcaggatttttttttttttttttgcttgccttatccctgggataacccgtcccatttaattccctgcaccgctctattccttaagagcccttctgtaggggcagagaggttctacttcattactgcgtctcctgggaaggccatcaggactgctggctaaagtgggaaccaggactctttgtgagttaagaatttgtgtatttatatgtgtgttatacacattttttaaaaaactgtaacgacatcaggttgagcagtcgtctccgggtggtgaattatgtgtatttttaaattttatactatattgttatttttcaaatgttcgaaattgaatatgtagattgttgttatcagcagaaaaataaacattattcaaatactctattcagtaaagtaatttattgggcgcctttgtcaagcacgcatttgcctagatgtgactctacagataaaattcacttggggcctccccttacagacaatcaggcagtggagactgagtgcctgaatggatagaccagcactcagaccactattttcagtatctgtttttcttaactcagggccgtggttttcaaacgtttttcgccttacggtcacccttaggggtcccccgagaccggcccagacagacagatatacaaaaacacatacacagtcatgagcgtccaccatttccccaccaggcgcagcacaggcggcttcccggcactgagatgggggggaggagggagagagcgcgaggggggaggggaaagcagagaacgaaagaggcggaggcggcccccgaaccccgctctggtcttcatcatcaccacccctgggtccccagttcccacccacacaccaacctctaacgataccgggtaattttcctccttcttccctcaaacggctatagcgagacggtagacgacgaccagaactacttctgctcacgtaagcgagtaatcacgtgagcgcctacgtcatgtgagatctcggtcacgtgagcaactctcggcttaaactcgggatcactaaggtgccgcacttccttctggtatggaaatagggcgggtcaatatcaagaaaggaagagggtgattggttagcggaacgtcttacgtgactgattattggtctacctctggggataaccgtcccagttgccagagaaacartaacgtcattatttaataagtcatcggtgattggtccgcccctgaggttaatcttaaaagcccaggttacccgcrgaaatttatgctgtccgrtyaccgtgacaayrcagctgaggaacccagaactacatctgggctgcgcgcttgcgcttcgcttcctgsccctcgtttcctgggacatccctggggctagagyacyggacartrgattggcaaggacgyytaccrtggrctrgctgyrckkggagmbcttcawgtgcaaccttgactgccaggaaragccagattcctgcatcaggtatcagatattgggtrctcccttccctttgcttttccatgtgtttgggtgtgtttggggaactggagagtctcaacgggaacagttgagcccgagggagagctcccccacccgactctgctgctgcttttttatccccagcaaactgtcccgaatcaggactagccctaaactttctctgtgtgacctttcctgggatgggagtccggccagcggcccctgtttctttctctctctctctctctctcgttctccttctctttctctttctcttctttcctctctctttctctctctccctgcccggttctcttttttcactgctccttgcagagcagggccaccccataggcagtgtgccyaaagtagccctgcccggttctattcagacccttcttgtgaacttctgctcttcctctgccgggtgctaaccgttagaacatctagggtgggtaggaggaatggggaactaagattcrtgccattttttctccttttggggtcgtggatttctcggcagtatctcgagggagttagagagaccataaggtcgctgagatctctcccacctcgcccatgagcgtggcatcaggctggaaggttgacatggaggaactttatacatttacacctttgcgtgagggttgaggctggattagataggtattgaacatatctgaccctcacaatccttatctgtaaattgggattacaaccttttaatttcagggagctgacaaaaaaaatctgaaaaatagttcttatctcacacaggtgagttttcaaggagataacctatttaaagtacatagcacagcgcttgaccattcaactgcgcttacagagcaaatgttcaatgggaaaatgaatgtaaatctacaaatctgaatgaatatgtgtatttttctggagagaggatatttacctttcttcaaattctcaaagggctctgtgatttaaaaaaggttaggaatcactgatagatgttggtaaaaggtggcagtcacagtacatttctgtgtccataagttattcctatgaatatctttatagataaagtcaggatgttggtcagacatcacagaagaaattggccttgtaagtttcatgtgaccctgtggtacagtatgtgtggcaattttgcccatcacggatttttttttattggtatttgcatctgattataaaactaatgcatgatcattgcaaaaaatgtagataaagaagagcaaaatgaaaataaagatttccccccaccgttccaccacccagaaataatcatggttwaaatgttaatatacaaccttacaattgttttctatataaatgaaaacatagatttctttatttcattattttccataaaaaatggatcatgtttatgtcatgtttggctaatggcaagaccctggcacccagtctgggctcaaattctgcctcattgttacttagccctgtgacattgggtaaattacactttttttttttttttttttttgagacggggtctcgctctgtcgcccaggctggagtgcagtggcacgatctcggctcactgcaagctccgcctcctgggttcacgccattcttctgcctcagcctcccgagtagctgggactacaggcgcctgccaccacgcctggctctttttttttttttttttttttttagtacagacggggtttcaccatgttagccagggtggtctcaatctcctgacctcgtgattcgcccgcctcagcctcccaaagtgctggtgtgagccaccgtgcccagccttacttttttttttgagagggggtctcactctgtcacccaggttggagtgcagtggcgcgatctctgctcagtgcaaactccacctcccgggtttaagcagttctcctgtcgtagtctcctgagtagctgggattacaggcacaccaccacggccagctaatttttgtattttcagtagagacgggtttcaccatgttgcccaagctggtctcgaactcctggcctcaagtgatctgcccgccttggcctcccagagtgctgggattacaggtgtgagccaccgcacccggcctcttttttcttttttagtctatcataccttgcaaatacagtggttcttcctatgtgttggttttgatatttatgtaatcaaacacatcagtttttcctttctgatttctgactttggggtcatgctgagaaagtcctttcctacctgaagataatacagtatatacgtttcttactagtatttttgtggatttttaaaatatttaaatctttagtccatctgaactttgttcttctatcagaaatgccacatttaataaataataagtcccatggtatcagatggctggaaggacctctttcgaaactttgtttaattccattaatctgtgtattcttattctaatgctaatagttccacactagcttcctttatcttttttttctttttttttttttttttgagctggagtttcgctcttgttgcccaggctggagtacaatgtcacgatctcggttcaccgcaacctccgcctcccaggttcaagcaattctcctgcctcatcctcgcgagtagctggaattacaggcatgcgccaccacgcctagctattttgtatttttagtagagatggggtttctccatgttggtcaggctggtctcaaactcccagcctcaggtgatctgcctgcctcggcctcccaaaatgctgttattacaggcgtgagccaccacgcccagccttcatcttttaatgaatgtacatgtatgtaatcttttaggtgaactttttgtaatgttgtgccaagttccttaaaaagcccttttggaagctgggcaggtggcccacgcctgtaatcccagcattttgggagtctgaggcaggtggatcacttgaggccaggagttcaagactagcctagccaaaatgcaaaaccctgtctctactaaagatacaaaaattagccggatgcgatggcacatgcctgtaatctcagctactcgggaggctgaggtagaagaatcgcttgaaccggggaggcagaggttgcagtgagccaagatggcgccactgcactccagcctgggtgacagagggagactccatctcaaaaaaaaaaaaaaaaaaaaagataaaaaggaaacctaagtactcttgggctttgttaaggattttgttaaatatacaaaggattgcagggaaaattaacttatttttaatattgagtatgcttatccaagagcaaaataatatttctccatttattcaaatcatttaggagcatcatagttttaacatatgggccttgcacgtatcttaaatttatctctaggcattttaggttgttcagttgttcttgtgaatgggatctttttctccaaataggattattgttgatatctgttgattatgttaactttgtagtttctgactttactgaactgtcttcttagatctaatactcttttcaatttcatcatatatttctcattcctattttgtttggggtttttagggcgggaatattaacgggataagagagacaaaagaaaatctggaaaaacaattcattttaccttacattgcttgtgattactaccacactattactgggttggaaaaaattgtgaaatcccaaggtgcctaataaatgggaggtacctaagtgttcatttaatgaattgtaatgattattggaatttctctttcagtsagaagctcttcatggagrtggcagagctcatggtctsakaaggctrgaaggatgcagrttrkgagkaccbctgcaytnatgrctvttsgatggytcccyaaavagattcagaaggcagacttyaggcagaccctcagcgctttcctcatgggattcgcyagctagctaattatgtgagtttatagataatgttcttgttcattcagaggactgtaagcacttctgtacagaagcttgtttagaaacagccctcatggccgggcgtggtggctcacgctgtaatcccaacactttgggaggccgaggcgggtggatcacctgaggtcaagagttcaagaccagcctggccaacatggtgaaaccccaactctattaaaagtacaaaaaattagctgggcatggtggtgaacgcctgtaaccccagctacttgggaggctgaggcaggagaatcgcttgaacccaggaggtggaagtttcagtgagctgagatcacgccattgcactctagcctgggcaacaaaagagaaactccatctcaaaaaaaaaaacaaggaaaaaaagaaacagccctcatgacacttagaaagtagaatagctggctgttatctgaacattgaattgtaaggcttatcaggtggactttgcattccatcagcagacaatttttttttttttttttttttgagatggagtctcattctgtctcccaggctggagggcagtggtgcgatctcggctcactgcaagctccacctcctgggttcatgccattctcctgcctcagcctcccaagtagctgggaccacaggcacccgccaccatgcccagttaattttttgtatttttagtagagacggggtttcaccatgttagccaagatggtctcgatctcctgacctcgtgatccgcccacctcggcctcccaaagtgctgggattacaggcatgagccaccgcgcctagcctacaaatgttttgtaatagctcttgaggcccatcttggagttctccttttgctaaaaccactgaactctctaggaggaaaaaggaacttggttcttgacatatgtgtgcatgtatttccatataacctttaggaagctattgcaatggtactataaactagaattttagaagatagaaggaaaatattctggagatmattgaagagaaatggagtccaacactagttaaagatgatgaagacagatttttttttttgacggagtctcgctctgtcgcccaggctggagtgcagtggcacaatctcagctcactgcaaccctccacctcttgggttcaagtgattctcctgcctcagcctcccaagtagctgggactacaggcgcacaccaccacgcccggctaatttttgtatttttagtagagacaaggtttcaccatattcgccaggctggtctcgaactcctgaccttgtaatccgcccaccttggcctcccaaagtgctgggattacaggcatgagccaccacgcccggccgatgaagacagattttattcagtactaccacagtagaggaaagagccaagttcaattccaaatacaacaaagacaggtggagatttatagccaatgagcagattgagggggtcagtggatggaatatttaagaagacatcaagggtagggagcttcttgctaaagcttcatgtacttaaacaagaagggtgggggatgagggaaattgatcagatatcaatggtggcagtattgacttagcaggattcttgctaagaggtcttgctaggacagacataggaagccaaggtggaggtctagtcgaaaagaaggctcatcagagaagtctaactaaagtttggtcaagaagagtctttgtcaaggtaaatctatcatttccctcaaaaggtaattttcaggatcccatcaggaagattagcatggctgctagctttctcctcagttctgggctatagctcacatgcctagtttgaactagctcagcagaactgggggatttattctttgtcttccaacaaactcatctggatgattttgggggtttgtggggaaaagcccccaatacctggtgaagtaaccttgtctcttcccccmscctggaatggttctctctttctgctacctcacgattgtgcttctacaatggtgactcttttcctccctctcatttcaggttcacagcaaagracygaagcyagggatttatgcagatgttrgaaataaaaccyrmscagkcttcyctgggarktttggatactacgacattgatrycyagacctttgctgacyrsgkagtagwtstgctaaaatytgwtggttgttactgtgacagtttggaaaatttggcagatggtaatgtttcattccagagatttagccacaaaggaaagaactttgaggccatggtagctgagccaaagaaccaatcttcagaattttaaataccctgtcacratactggaaataattattctccatgtgccagagctcccatctcttctctttcagttcattaattaattaattaattcatgtaaaatccatgcatacctaaccatagctaatattgtgcacttataattcaagagggctctaagagttaattagtaattgtaactctctataacatcatttaggggagtccaggttgtcaatcggtcacagagaaagaagcatcttcattcctgcctttcctcaatatacacaccatctctgcactacttcctcagaacaatcccagcagtctgggaggtactttacacaatttaagcacagagcaactgcctgtccctgctgctagtttaaacatgaaccttccaggtagcctcttcttaaaatatacagccccagctgggcatgatggctcatgcctgtaatcctagcactttgggaggctgaggcgggtggattacttgaggtcaggagttcgagaccaccctggccaacatggtgaaaccccatctctagtaaaaatacaaaaattagctgactttggtggcacatgcctgtaatcccagctacttgggaagctgagacagaagagtcacttgaacctgggaaacagaggttgcagtgagccaagatcgcaccactgcactccascctggatgacagactgaaccccatctcaaaaaattaaaataaaataaaataaaataactatatatatagccccagctggaaattcatttctttcccttattttacccattgttttctcatacagrttataagcacrtgtccttggccctgaataggactggcagaagcattgtgtactcctgtgagtggcctctttatatgtggccctttcaaaaggtgagatagtgagcccagaatccaatagaactgtactgatagatagaacttgacaacaaaggaaaccraggtctccttcaaagtccaacgttacttactatcatcctaccatctctcccaggttccaaccacttctcaccatccccactgctgtaattatagcctaagctaccatcacctggaaagtcatccttgtgtcttcccctttatttcaccattcatgtcctgtctatcaacagtccttccaccagtatctctaaaatatctcctgaatcagcccacttccttccatcttcactacatgcaccctggccttccaagctactatcggctctcaaccagactgctgggaccacctgatctctctgcttccactctgtctcaacccccatctattttccaagcagcactagagttatcatattaaaatgtaaatatcagttttttttttaaagaaaaaaaccctgagacttaacagagttataaaaaatataaatgtcatcatcagttccctgcttaaaacccttaactcgcttccaattgcacttggaatgaaaccaaactgcactgatccagcccttgcctgcctccccaaagtccaaggggtcatggctctttccctggctacactggttttctttctgtccctcaacactgcaagcctattgctgccccagggcctttacacttgctttttttctgcctagaacagttcttccccaaagatttttaaagggccgggctccttaacattgaagtcgcagaccaaacgccacatatgcagacagttcttctctaactactttaaaatagccctctgtccattcattcttcatcacattaacctgtttaattttcttctcagagctccacactatttggaagtatttgttgacttgttaccatgtctccccactagagtgtaagtttcatgagggcagggaccttgtctgactttgactgtatctctcgcatatggttaagtgttraatagttatttatggaatgaatccctattattccctcattatctctgcaaaatagtcttttttctcaacatcttaaacctgatatcccacctgcctatctacaaactttttttttgcgacagagtctcactgtcacccaggctagagtgcagtggcgccatctcggctcactgcaacctccgcctcccgggtttaagcgattctcttgcctcagcctcccagtagctgggattataggcgtgcgctaccacatctggctaatttttgtatttttagtagagatggtttcaccatgttggccaggcttgtctcgaactcctgacctcagatgatccacctgcctcggcctcccaaagtgctgggattacaggcatgagccaccgtgcccagcctctacaaactttttattccrttaacaaactatatgctgggatttaagttttcttaatacttgatggagtcctatgtaattttgcagcttttaattttactaagaccattttagttctgattatagaagtaaattaacwttaagggatttcaagttatatggcctacttctgaagcaaacttcttacagtgaaaattcattayaagggtttagacctccttatggagacgttcaatctgtaaactcaagagaaggctacaagtgcctcctttaaactgttttcatctcacaaggatgttagtagaaagtaaacagaagagtcntatctgttttcacagcccartkatacagaaatcygacagtactgcaatcactggyraaattttrctracattgatgattsctksaaaagtataaagagtawcttgvactggacatcttttaacyaggagagaattgttgatgttgctggaccaggggrttggartgwccsavwtatggtaaaaacttgagccctccttgttcaagaccctgcggtaggcttgtttcctattttgacattcaaggtaaatacaggtaaagttcctgggaggaggctttatgtgagagtacttagagcaggatgctgtggaaagtggtttctccatatgggtcatctaggtaactttaagaatgtttcctcctctcttgtttgaattatttcattctttttctcagttagygattggcaamtttggcctcagctggaatcagcaagtaamtcagayggccctckgdgmtwtcatggctgctycttkattcrtrtytmrkgacctcbvacacatcagccctcaagccaaagctctccttcagkataaggacgwaattgccatcwatcaggaccccttgggcaagmaarsgtaccagcttagacaggtaaataagagtatatattttaagatggctttatatacccaataccaactttgtcttgggcctaaatctatttttttcccttgctcttgatgttactatcagtaataaagcttcttgctagaaacattactttatttccaaaataatgctacaggatcattttaatttttcctacaagtgcttgatagttctgacattaagaatgaatgccaaactaacagggccacttatcactagttgctaagcaancacactttcttggtttttcagggagacaactttgaagtgygrraacgacctctctcaggcttagcctrggctgtagctatgataaacyggyagragattggtrgacctcrctcttawaccatcgcagttgcttccctgrrtaaaggagtggmctrtaatcctgcctgcttcatcacayagctcctccctgtgaaaaggaagctagggttctatkaatrgacttcaaggttaagaagtcacataaatvccamaggcactgttttgcttcagctagaaaatacaatgcagatgtcattaaaagacttactttaaaatgtttattttattgccaactactacttcctgtccacctttttctccattcactttaaaagctcaaggctaggtggctcatgcctgtaatcccagcactttgggaggctgaggcgggcagatcacctgaggtcgggactttgagacccgcctggacaacatggtgaaaccccatttctaataaaaatataaaaattagccaggtgtggtggcgcacgcctgtggtcccagctactctgggggctgaggcatgagaatcgcttgaacccgggaggtggaggttgcattgagctgagatcatgccacctcactccagcctgggcaacaaagattccatctcaaaaaaaaaaaaaaaagccaggcacagtggctcatgcctggaatcccagcacttttggaagctgaggcaggcagatcacttgaggttaggatttcaagaccagcctggctaacatagtaaagccctgtctctactaaaaatacaaaaattagccaggtatggtggcgagcttctgtagccccagctactcaggagactgaggcaggagaatcacttgaacccgggaagtgggggggtgcagtgacccaagatcacgccactgcattccagcctgggcaacagagcaagactccatctcaaaaaaaaaagttctatttccttgaataaaattttccgaagtttaaactttaggaataaaactattaaacccgtatttactcatccagatacccaccccccttgttgagattctctcccaattatcaaaatgtgtagcatatttaactaccaagagctaaacatcattaagactgaaatgtattaagaaggatgtataggccaggcacggtgtctcacgcctgtaatcccaacactttgggaggccaagtcgggcggatcacgaggtcaggagatggagaccatcctggccaacatggtgaaaccccctctctactaaaaatacaaaaattagccaggcaggtggcaggcacctgtaatcccagctactccagaggctgaggcaggacaatcacttgaacctgggaggcagaggctgcagtgagctgaggttgtaccaattgcactccagcctaggtaacgagcaacactccatctcaaaaaaagaaaaaaaaaaagatgtataatttggaactgttaagaggcattttaaagaatggatattttgtctcttaagattcttccaccggggagtttggccagacctggtggctcacacctgtaatcccaacatcttgggatgctgagataggagtttcactgaaggccaggagttccagactagctgagtaacaaagagagacacccaacacaaaaactaaaattagccaggtatggtaacaggcacctatagtcccagctactcaggaggctgaggcaggtggaccacttgagcctgcaagctcaaagctgtagcaagctatgatccacaccactggcacttacgagagggagaccctgtctcaaaaaaaaaaaaaaaaactccactggggggtttcatacactagaaaacctattctttgtagttattttggtataaatatatctactttaaaatgtgagggggaatgtcaaaatgttcaagagtgtaagaccaagtccacagacaatgttatatatgttacagtgtactgtgtctgaagaacaatgccaaaattctttattaaattaactgttataacaaagatctgacacttaactcttagcaaagacatctcatattcactatgaatgtgttactgacttctccctattagcctgaaatgtgtctactcacatgataaccaataaccattgcataatgacaaactgcctcataaggcccctagtgattgaagtgccaaattagaaaattgcaacatatgatgtgaactcaaccagtcagcttcaatgcaaaacaagtagtaccagtaagaggcataaatttccccacaagcggaattgtattgatggctctagcttattccctcccaaaagatgaacagcaaacaaatgaagtgaacataaactcaagattttattgtcttcataataaaagatgacacttagaactggatcacttggccctgtaacagaacagaaaaaagttgttttgtattttgccatgaactactgccccattaagaacattatctgttcctaaaatactcaccatgctgttaagctgcctcattcttcctttcctccttgtagcaaaagacctcacatatctttagctatagatctaatatttttagaggattacccctgagctctatgccacaatgaatagatgttcaccttttcaaataataaagctatgaaaaagattgcaccttccacccataattatatacctttctcttcttatctcctcccagttcaaaatgcttgcatcttttaatagccagcattctcttagatctgcagttgggctcaacgcactcaagccttagcacaatcttctttgtagttttagcctgaaaaaaaattaaattaaagccttaataaataactacagaagatcactttcttcaaaaatgactactttaagtactatttaaagcaaagcattgcaaatgaatagtggggcaactattcttttgcaatgctttgctttaaatagtactcagtatactcttaagccatagggagaaaataatctaaaaatcagtgaatttaagagaaaatgtgtagaacttgtggactaaaaaaaataaagagaaggctgggcacagtggctcatgcctgtaatcctagcactttgggaggccgaggcaggcagatcatgaggtcaggagttcaagaccagcctgaccaacatggtgaaaccccatctctactaaaaatacaaaaaaatcagccgggcatggtggcacgtgtctataatcccagctgcttaggaggctgaggcagaagaatcacttgaacccgggaggtgggcggaagttgcagtgagcagagatcgcaccactgcactccagccagggaaacagagactccatctcaaaaaaaaaaaaaaaatatatatatatatataatatatataaatatatataaaaaacataaaaatatatataatatataatatataaatatatatatataaagagaaaatgtggtaatagcaaagatggcatgtcacccagttgtcatcaagtttgaatccaaaccccattcagatcaaacatcctagagcttcctatcaaatgggcaactcatcttgccaccctgaacttgtggccattcagcagctctgcatagttctttaatcccaacagtttgtgaggctgaggcaggatcacttgagcccaggattttgagaccagcctgggcaacatagtgagaaccccatctctataaaagatcaataaattctaagactacctacaattatgtctagaatttatgtccattcaactgaattatttaactcaaactacactccccactaatcctcaactttttttattgttctttttttttttttttgagatggagttttgctcttgttgcccaggctggagtgcaatgacgtgatctcagctccttctcctgggttcaaacaattctcctgcttcagcctcctgagtagctgggataacaggcgcccaccaccacgcccagctaattttttcttatttttactagagatgggggtttcatcatgttggacaggctggtcttgatcccctgacctcaggtgatacacccgccttggcctcccaaagtgctgggattacaggcgcgagccaccacgcacggccttgattgctccttttacctaaacaacagaactattgtttacaagttttctatttaccaaaaaattgcaaacatgctacagagttcttataaaccttaccagtttctcatcttacattagtatgactcattaacaaaccaacactgatgccttattaactcaagtccatactttttttttatttccttatgtttttctaatgtcctttttctgttctaggaccccacgcaggacaccacctaacatttagtcatcatgtctctagactcctttggctgtggcaatttctcagacttttttgatgaccttgacaatttccgcactactggtcaagtattttgtaaaatgcccctcttgggatttgttatttttctcattagatagggttatggatttttaggtttaagtgtcattttcatcacaccttatcaagggtatatatcaacatgactcgtgactgttgatgttaaccttgattacctggctgaggtagtgcttgttaggtttctccactgtaaagttttattgcattttttctttgaggtacaaacaatccaattacactctaagttattttaaaatatgtaactaagttattgactttagtcacgctgtcgtgctatcaaatagttggtctaattcattcttttttctttttgtacccattaaccatccccacctcccgccaccagaagttctcagcttctggtaaccatccttctactctctatatgacaagtccacttgttttgatttttagatcccacaaacaagaacatgtgatgcttgtctttgtgtgcctatttcacttaacataacgatctccagttccacccatgttgttgtaaatgactggatctcattctttttatggctgaatagtaccactgtgtataggtgcattttctttttccctcttttttttttttttttttttgagatggagtcttgctctgtcgcccaggctggagtacagtggcgtgatctcggctcactgcagcctctgcctcccaggttccagcgattctcctgcctcagcctcccgggtggctgagattacaggcccacaccacaagcccggctaatttttgtatttttactagagacggggtttcactatcttggccaggctggtctcgaactcctgacctcaggtgatccacccgcctcggctttccaaagtgctaggcacaagccaccgtgcctggccgcgtataggtacattttctttatccattcatcccgatggacactaaggttgcttctaaatcttagctattataaacagtgctacaacaaacataggagtgcagatatctctttgatataccgattttcttctgggtatatacccagcagtgggattgttggatcatatggtagctcaacttttaaatactcaatttcctaataagcttgcccctttagccagagttctgctgctgctagtttgcagttcttaataggccaaaacctagttagaacctctgtcttctaaacaagttatccgaatgtgaaaaggtataaaaaaagcattctttttgccaccctgagatcaaaccacttactgcatccaaatgagcactaaagtcattccttaatactttctggagctaaactgcacaagaagcaaagtgccaaaagaaatgctgtgttggagagaatgctccgttccaatcatcgtgctaattactttaagagttagccaaatcacctaaggtttgagagtaaacagaaactcgctcagcctgagaatacagaattcaggaggctagcagaaaggcctaaatggctattctataagagttttaagacttcacgagaacaggtagttgactgcagatttctgtgatgagaaacaacagaacaattcttagtgcaaccaacaagcgaggattcagacatattgacagataaggaacaaggcaaatgaaaggatttaccagtgtactcacacttcagttcttaggaaagcagggcacattcctcaattttttgcctcttcagaagggaaaggataaaaaatcgtaaacactgaaatagtgcagtattgtggactagtcagacatgagttgcattcccagctccatcacctactagatatatcagtgcagtgaaaacttcgctaaactaacgctatacctatatcatgaagtgtgtggactagagacaagtgcatatccttacggcaattaactgggaaacgtcaaatagtaactaccactcacctttttccggaaaatcggct

SEQ ID NO: 94852 - DNA, 12624 bp, Homo sapiens
tttaataattaggcacggtggcatgcaactgtagcctcagctactcaggaagctgaggtgagaggactgctcaaacccaggagtttgaggctacagtgagctatgatcccatcaccgcactccagcttgggagacagaacaagaccctctctctaaaaaaaattaccctgggcacagtggctccctcctgtgatccccagcactttgggaggccgaggcgggcttatcacttgaggtcaggggttcgagaccagcccagcaaacatggtgaaacccatctctagtaaaaatataaaaaacaaaaacaaacaaacaagaaaacttagctgggtgttgtggtgcacatctgtaatcccagctacttgggaggctgaagcacaggaaatcacttggacccaggaggtggagattgcagtgagccaaggtcacaccattgcactccagcctgggcaacagtgcaagactccgtgtcaaaaaaaaaaaaaaattaaaaagttattttttgtgaatatttctgccacaaagcacgtacatgacaatgttaatagatattgctatatcattcccttaaaaagatttaatcaatttcattcttaccaagagaatataaagatacatgaaaccctgctctaattccaaagccttgcttgcttcctgagtgtcctgaaaatacagatgaacagtaaatccaccttaacgcaaataccacttatgttggaaattgtgatcttgacagaagtgactgacaagtaatttaccatctgtgcaaatttatactgtcagcacaatttaggtaagggatctagaggcctaaaggtagattctctgaaggtgaggaccacgtctgtgcacttgtcaccccacgtcctaatttattacctggcataatatgaatgctcagtgaatatctgtggaacggccaggtgcggtggctcacgcctgtaatcccagcactttgggaggccgaggtggacagatcacttgaggtcaggagtttgagaccggcctgaccaacatggtgaaaccctgtctctactaaaaataaaaaaaaaaaattagctgggcgtggtggcaggcacctataatcccagctactccagaggctgaggcgggaaaatcgctggaacccgagaggcggaggttgcagtgagccgagatcatgccattccactccagtctaggagataaagcaagactctgtcaaaaaaaaaaaaaaaaaaaaaaagagtatctgtggaatgaatgaatggaatcactctccctaaaaaacaaaacatgttcaatatttctatggcggagacttggccttaatctctcatcccttaacttctataaaatggtgaggggctcacaaattgtgccaaatatgtgacaagacccagaatctgcattcttcctccgtgacgtggctgcttgtttttttctttttcagcaacaaggctttttgcatttgggggaacatgatggcagtcttggtgagtaattaaactgggacagaataagacactaatttatttctggtgaaatatcctaagacaagtgtaagaattgctcatgtgtccattactttttcagttgcaaattggatccaaactggcttaaacaaaattccaagaataattcttgctttaggccttgcctaacgcaggaactcacagtgtcaccagaacccggtttctttcagttccgttcttacccatgttagttccttttgcaatagactctgcctaataagtgcaagacagctttatcaacttcttatatcttctcagagtcagtctggtgggaaagactgagggacccaggattctcacggtgtttcataggatctgactgggtgatgtccccgtctatgaaccaattgttgtgggtgcaaaaatgtggcagttcccttgatcacatgatttcatctgtagatgcaggtggtgcaaccatgaagaccatagggaccaagagtagggaagggtgacttcctaaagaaaatctggggctgatgccaggagagcgaattctgggcaggaaacaaacaagcaaacccatttatttttgggggatagcatttactgatgacttccagtgatgggagttcaagggaaggattatagaaactaaaaggaagaggcaaagaaggcatgagaagctatggaatcttgaaggcaagctggtctttcccttgtagagatggggcagagtgtgcctgcgttaacttctctttcctgtgtcaaacctagacttgcgatctagaagatcagttcaagaaggtaatccaagggcctgatgactcttttggtaaccagacaccaatcaaataaggggaggagacgaaaatggaatgatttcttccatgccacctgtgcctttaggaactgcccagaagaaaatccaaggctttagccaggagcggaaactgactaccatgtaattatcaaagtaaaattgggcattccatgctatttttaatacctggattgctgatttttcaagacaaaatacttggggttttccaataaagattgttgtaatattgaaatgagcctacaaaaacctaggaagagataactagggaataatgtatattatcttcaagaagtgtgtgcaggaatgattggttcttagaaatctctcctgccagacttcccagacctggcaaaggtttagaaactgttgctaagaaaagtggtccatcctgaataaacatgtaatactccagcagggatatgaagcctctgaattgtagaacctgcatttatttgtgactttgaactaaagacatcccccatgtcccaaaggtggaatacaaccagaggtctcatctctgaactttcttgcgtactgattacatgagtctttggagtcggggatggaggaggttctgcccctgtgaggtgttatacatgaccatcaaagtcctacgtcaagctagctttgcacagtggcagtaccgtagccaatgagatttatccgagacgcgattattgctaattggaaattttcccaataccccaccgtgatgacttgaaatataatcagcgctggcaatttttgacagtctctacggagactgaataagaaaaaagaaaagaaaagaaattagctgggtgcgatggcttatgcctgtaatcccggcactttgggaggctgaggcaagcggatcacttaatgtcaggagttcaagaccagcctggccaacatggtgaaaccccgtctctactaaaaataaaaaaactagctgggcgtggtggtacatgcctataatcccagctactcgggaggctgaggcaggagaattgcttgaacctgggaggcagaggttgcagtgaggcgagattgtaccactgcattccagcctgggcaacagtgagactctgcctcaaaaaaataaataaataaataaataaagtaaattaaaagtcttattcaaaccaaatatgaaactggtggtgatgtgtggaatgtgtgtgtgtgtgcacatatgtaatgaatacgtgtgtgtataatgtttttgcaggtttgccaaatgattcacaagccacgtggctgttcttaacactgaaaggtccagcagaaaggtgcagttactcaggagagaggagcctcctcttaagtaatcactcgcataaaacctaattggaactgaatttagaaagcagttaagatacattcgaaacacaagcacccaaccagtgctgtcatttattcccttttttttttatttttaagagataaggctgggctgtgttgccagctttgactcaaactcctaggtcaagcagtcctcccacttcagcctgccaagtagctgggactacaggcacacgccactgcacttgaccacgcactttttcattcacttatttttttcattaattcacttcatcggaggaattaatttcttttggtgtcatctttggtaacagttgtatgtagtgttcatccatccattcattcaacaaatatggaccaaatagtggtgagcaagatggtgaacaattcatggtgctgcctgtctagcaggtttagacatgaatttaattcttaagcaataattaattacagttgtagtagatgctctgaagaagcacagggactaagggagacttgtctgtggggtcagtgcaggcaacccatggaagtgatgttggaagtgattttattccccttggggtcatcttagtgctgtttgtgcttttttctttgcttttttttgagatggagttggagcctccctctgtctcccaggctggagtgcagtggtacaatctcagctcactgcaacctccccctcctgggttcaagtgattctcctgcctcagcctcccgagtagctgcgattacgggagcgtgccaccaggtccggctaatttttgtatttttagtagagacggggtttcaccatgttggctgggctggtgttgaactcctgacctcagatgatccgctcgcttcagcctcccaaagtgttgggattacaggcgtgagccaccgtgcccggctgctgcttgggcttctacaatgaaatctgaactctctctgaaagcatcacttctgctcattcaccagatgctaagtgcttccatctagaatgcttctcccttcacctccatcccttgtctccacttcagtgcagccctgcttctcctggaggtgtacatgcagtggatagtggctcatgcctgtaatccccgcactttgggaggctgaggtgggcggatcacctgaggtcaggagttcgagaccagcccagccaacatggtaagaccttatctctactaaaaatacaaaaattagccgggcgtggtggcaagcgcctgtaatcccagctactcaggaggctgaggcaggagaattgcttggacccaggaggcagaggttgcagtgagctgaaatcgcaccactgcgcttcagcctgggtgacagagtgagactgtctcaaaaaataaagaaactactgtacatggaaagcattttaaacagtctaggacatggtaggcagtcaataaatgttaattagcaaggattttacatgcactctttcatttaatcactaccaccgcaagaatactacccctattttacagataaattcagtaacttacccaaggtcatatagctggtaagttgctgaataggaaggcagacttggctttctctgattccaaatcctgttattaaccctatactaagccttccaaggaagtgcttaatagtagttattaataccttatttcatcattcaaattctccaccttttgaggccctgaccatcttagcataggacctaaatccttaatttggcctggctgaatcaaaggtaaaatggatttgggataaagatcaagagacagagatctcatggctctccagagatcttcccacaacacaaagggatattattattattatgaaatttttaaagattggagtcaaactctgtcccctaggctgtagtgcagtggcacgatcctagctcactgcagcctcaacctgctaggctccagtgatcctcccatctcagcccctatttgtaaattttttgtagagatggggtctcactatgttgcccaggctagtgttgaacagcctgttgaacagctagtgttgaacagaggtatctttttttttttttttttttttttgagacagagtcttgctctctggcctaggctggagtgcagtggtacaatcttggctcactgcaacctctgactcctgggttcaagcaattctccttgcttcagcctcctgaatagctgggattacaggcatgtgccaccatgcccaactaatgtttgtatttttagtagagacggggtttccccatcatggccaggctggtctcaaactcctggcctcaagtgatccacccacctcagctcccaaagtgctgggattacaggtatgagccatcatgcctggcctgatgtatcttctttggtcactttttcctccttctttcactctagtcataacatggcacggaagtacatgcagtttagacatttgttgcactcaatgaacaaatctttgttgtttattttaaaattcaagacaatttttttgcaaatgctgattcaaaacgtaccaatccccatctatcatgcctatgccaatacaatctgtcacaaaaaagtttgcttctcattgtcacatagctayggggactggtggccttctaaaatcactgtccagctgctgcaagtgtgaggccagcaacccacrgcagggatgcaggagggaagccatggctaagctgtgggcctggacaaaggccacagatggggttgaaaggtgagaagcggtaagctagaggagacagacggcrttgccattaaaaacaattcaacttcattttaatgttgctatgtaagttcacaataaaatccctggaagttcaaattggaaagagcagtttggggtcatgggctcaacaatataaaggcagattcagtgaggggtaagggtagtggctctgggggcagactgacctagatttgaatgccagttgtaccagactcaagacaccttgggtaagtggttttatgaagtacctcagttcttcatcagtagaaagagtgctaacacctccataagacttttgtatggattgagtaagataatgcatgttaaaccacttgtatagtttctggctaactgtaaacaagatgttctagaagttctagttatctttttttttttttttttttttttttttttaagagtcaggttctcactgtgccaccaaggttgtagtgccgtggtgtaatcatggctcattgcagccttgaacttctgggctcaagtgatcctcccacctcaacctcctgagtagctgggaatacaggcatgcaccaccatgcctaattttttagagatggggtcttgctatattgcccagtctggcctcaagtaatcctcctgcctcagctttctgaattgctgggattatcggcatgagccactgtgcccagctaagctgtgacttttgaggcaaccccttcccttccacagagtttagtttcctcatttgtaaaatgaggacaaacctagatatttttggaagtttcttccagttctaattgcctatgatcagatcacatctgttgcagagcttcctaaaaagcctggaaaaatgcaactctgccccctggtggtttgcagctctctattcaagatgctataaatccctcattggcttcaagacctccctaccattttggttgctgtacactgaagcctcactggattgcatggtggcttccccaaattccgtatgccttaggatatgatgcttggcacacagttttcctttagtgctccttttaataattttattagtatggccacaagtttgatgtctacagtacatgttaacatagctgagtacaaatatttgaaataagtgtggcaagttttaaaatgtcaactctgagttatcatgcatgtcccatgcatttacatctgcatctgcaaactgtacaattcaatctgtgcttatcctcactgggtctccctgtgtgcctcagctagggcagggcaggggctcttgtgcgttttttcagacccagattttcaagagcaacagtgttgaactctggcatgccatggtgcatggtggcaacaccgggtttagctttggttcaggtaaaaatgcagtgaccaactattgcatttgtgtgagtcacctgattccccagggcctgggctagcacaaagggtattttgatatccctgtatgaggcccctggcagtttctgaacccgtttcgtcccaccgtgaaagtctagaagtgaggttcgcagtcttctaccatgctgtcagtgatatagctggaaccaagatgggattcgtagtaactcttttcatcaaaggtattaacagtccaaccaacaacctggattcctttagctgaccacttcttcaagtaggccctggggaaagaggaaagccaatcctgttagaataataagcagctgtctcaggaatccataatggccactaagtatggtgttcactgcataccaatggtgcccagagaatgcctcctaactggcctctgcactgtgatcagagggactgttccaaaacccaggatgccatgaacctcctctacactgtcccagcttaaaacatttcagtagctcactaatgatcgccacccccaaatgtccttggcacagccactgaaggtgtgcctgacctggccccgacctgtctccttggcttcatctcacaccacattccccctttcttttctgtgctgattaattttaaattaattgaaagaatattaattttctttcacttcctggaaagaaccatgttccttcctgccagagcacattacatgtatttttctctctgatctggattcctcccaattcccactcacccttcagatcttagcttaactgtcacttccttggggatgctgtttctgacaacccagaccagattagattatagcccatgcacagttttctctgacatagcctgtatcttagttttaactttatattgattggatttttatttgattagcatctctcactctcccacttggctataaacgtcacgagggcagagatcatggctttgattctttacccactgcatcttcagcttctcaacatggaaccttgcaatagtataggcacttaccaaatatttattgaactgaatcatgtatgtctgaaataatactagacctacaactctaattagctgaaatatacagatacagaattgccaaagaaatgattccgagatcgctagcaggttaggaaatggaaattttatggggagaggtgggggagtgcctataacataagacggtagtggggaggctggtgcccacaggatgtcttcactgtggttctgcccaggatcctgtgttggctttcaaaaaaaccagtcacagaaataaaatcccttgctcagcatagtgtcacaggttcattttttttcttcaaaatacactaaaaaaccgaaaatatgtgatcgactcggtctgaaaacagtgaaatatgcctgaactcttcccacctaagaagcgaaattggtaatccaatttagaggtatggtaagctttgcaggtcagaaccaattcaggttgtctactctgttaatccttcctttcaaataagagcattcaggatgtctgtctgggtaaaataaaaaaccttccaacttacggggatacaaaatccttttgcatgaggaaagctgaaattccacacaggtaccacaagatattatgcatgctccaatcgagcaaaatgtccatcataacaaatataaaatgtttccagaaagtatcatagcgtggtttcccatctcctgtatggcttaggctccaaggtctgtgagttaatgctgttattacatcccgatctgtttgtctcatctgcaaaggaatttggggaagtaaaataatgatcatatgtaaagttgaatacttattagtttagatttagccaatgtgctcaatcagatgaggtggtcatggttggtaccctgccccggtatctactaaataagttctcaatcataaaccctttgagaaaataatgtgaagaatgtaaagcactaatatgcagcacatatgagaacttttttttcccagtccttaaaaactgcaatcctatctttaaaatggaaaaattaaaacttcaggatcaaattttaataatgtcacgagaataaacttttaattggctattgacttaaatcctggccagagataattaattagaactcaatgaggagggaaccaaggtcagttcaagatgggctgtttagttttgaccctttccagagcaaatggctgaagagttgtaggggtgaggagggggatggggaagtgaggtgggaagggagagaagggattgtgacgagagaatgggagaggacaacagagaaatggagagatgtggatggagttcctttagtctctgctcttgtgctcctctgggggaatgtcttatacgttttaaaggactctgtggtcaaggaagtttgggaaacactgttccaaatgtctgcaagccccatgaccctattcaactccatgacagcttctattgataggctctatcctcactgtaaaaattttcaatgtatgctctgttggtcactggtaaagaatgctacggaaccagcttgttattctggaaactggtaaataaaaggaaagataaagcatttattctgcctatttggtaactaaatagtagaggaggaaaagtttctttttaaagatctatttcagctaatgcaagaagtaatagaattaaaatatcagcattttgtagctccctagaaaatggacagatctggccaatgagcatcaatagcagccaaaaacaacaggagtcaaccagatgtcaagtgcctcctgacggaaaaacaccctcatctctagagttatcttgccaagaataaccaaccctaacctcatcaaggcaagcttccagctctcgctaccagtttatagaaaataaagagaaaaaaatattaagccatatcatggcataatcagcaaaatttggacttgggtaaactctacaaaacaataatccggtttcttcagtaaatacaaaacaaggaccccccccaaaacaaacaaacaaaaaaaacagagagagagagagacagaacctgcaagttttaagatttacagttgccggcagggcatagtggctcacacctgtaatcattttgggaggccgaggcaggcagatcacctgaggtcaggagctcgagaccagcctggccaacatggcaaaaccccgtctctactaaaatacaaaaaaaattagccaggcatggtggtgtgtgcttgtaatcccagctactcaggaggctgaggcaagagaattgcttgaacccgggaggcagaggttgcgatgagccgagatcataccactgggcgacagagcaagactccgtctcaaaaacaaacaaaaaaagatttacgattgtaacacgccgatcttacttgggtcctattcgaatgagcaatttatgaaaaacaaccatttatgacatttccgagacaagtcaaaatttatacactggatatttgatgatatgaataatttattgttaataatttttagatgggacaatggcattgtggctatgtttttaaaaaggcatcactaggctggttactgtggctcatgcctgtaatcccagcactttgagaggctgaggtggaaggattgcttgagcttaggagttggagaactgcctgggtaatacagggagaccctgtctctacaaaaaataaaaataaaaaattagctgggcgtggtgacgtgcgcctgtggtcccagctacttggaaggctgaggcaggaggatcatttgagcctggaaggtcaagagtgcagtgagctgtgatcacaccactgcactccagcctgggaaactgagggagaacccgtcttttaaaataaataaataaataaataaataaataaataaaatggcatcactttttaaagattcttaatgcaattttatggatggaataagatttgcttcaaaataacactggggaggatcaatggggttatgggtgaaatgagctggatcacagttaaagggggggtacactactactttattttatgcatgttttagattctccataattaagaatttattttatgaaggtatgttctgctgttagttggtgagaagtaggggctacataattcttttctgttgtgagaattttactacagtaatctgagtgagcctataaacaacataaaagaaggggcaaaagaggaataatggcattctgtaaggggtatgagtacattccccttctggaatttctctggttaatttaaaagaggagcttctcaactgtgaccctgatgcagttcaatttaataggcatctatcctgtgcttacgcagcccattgcaattatctacaccagctcacctaatatgtacaagaaaaatcccgaatgttaccttgtagataacttctggcaagaaagaacagaccacactattattatacagttgaggaaattccatatacattttctttagagcctcagtagcctgtaaaataaagagattcatatatttaaaattgattaaaatgtgatagatagccccagccaataactatcacatattaagtacaaccctatggaataaaacagaagtttactagaaatggaggtactgaaagtattggtagagtctattatccactgggatgcattttaaactcacaccagcagcaaacaaggaagaaggtggagtactgctgctttactccctctgagggcctcaccccttttggaatacttttgaaaagtgtggtaagccgtaggtcagatgaggccagaggcaaaattttccttgccttataccctagtttagccactatgaaaagtcctttcatacccacagctctatcactctgtgccttttctaaatgaaacatgagccagccagtctgggaactacagagggtagatttctcagtccaggggactgagaggacgcattacccatcaccaatatggagggagaagtaatggggcaagggtaggagggactgggaagagttaaggggctcccaattcttcccaagg

SEQ ID NO: 94853 - DNA, 13538 bp, Homo sapiens
tgtgggttttcgggtagagaaaatcattcgtgatcccctctcagaactcctctaaggtaaagttgtccagacatatgaagctcaccatttaaaaactgatcttgccatgattcccaataatagtcacttgcagaatgttgacgcagcagaatcagccactcctgtctacaatgaaaaacagcttgcagctccgttaagtggctgttattagaagtggagttctggaggggggacgccggtgtctgctcccggtgacgcgtcccggcgcagctaacagccgcggggctggactcccctggttctgggcagcaccgcttcgttccagaaagcactcgcagccaatctcacgggaccttcttctttcagtcctttcaggggagccagggacgcgcctacctcttcaattccgtgtgagtaccctggttcagcccggggggagcggcacgggccctgggacggcctggatggcacctacacagtgccctgtgtagaatcacctgggtctttaggggtcctgaaagaacccaccatccccccgccgggagtttctgaaacgcgctaaggatcttgccccctagcctgtcccatcactgatctttcccattgatggtggtggcgggcagggctgggggagaggcacggcactgctctctgggagtttccctgttttgggggaactcttaggaggatggggtggggcccgctgagggggcagggcctggtcaggggcgggccgggcctgcagcgcagtggcccctctgtccccgcagggtgaacgtgggctgcggccctgcagaggagagggtccttctcaccgggctgcatgcggttgccgacatctactgcgagaactgcaagaccacgctcgggtggaaatacgtgagtgccacaaggggatgctcgtgccacaaggggatgtggcactaagttgccactgagccacacctccccgtgcagtgtggcccatggtaccagtcacagcactttcagaaaccccagttcctcagccgaggtgggaagtccagactccagtgaggcatggtctcaccactgccctccagcctgggtgacagtgataccccaacccaaaacaaaaaacaaaaacaccatgttttcaagccctgtttcttcctaagccaggctctctgcacccagcccgccctcggcccgctgagcagagcctggtgtgggaggaggccgaggaggctgcagggggctgcgggaggctgtgcccactgtcagggacaagtctagaagacctcagcgccagacctgctggagtcagagacagagagctgccccatgagctctttaccccaaatccctctttctcagggaccttgaattgaaggttgcaatcgccacctcctctccagccttcacctctagctcccttctctctccaccacatggctgatctggcctcctcaggccctgcaccttcctgccccgcttccctcctctacgctgccctgaagtctctcttccaggctccactctctctgaccttcgtggccgagtcctcccctcccccaggccacctgagattccatggttttgaccccctggccatctgccttctgttggatgctcccatgccttccccagttgttgttgttgtttttttgtttgttttttgagatggtctcaaactcctgacctcaagtgatccacccacctcagcctcccaaagtgctgggattacaggcgtgagccaccgcgcccggcctgcctgcctttgttgaaggaggctttcccattctggctctggtgttcttcgggtccaggccacctgctctgcctctttcctgaattcctgatcatctctggtctcccagattcctcatgagttttggaaggccacagttcacaccatggaaacgggctccacaagactagcacgcatccctagcccttcccctggtcagtcagccccatacccatctgtgggccccacttccagaaacccgtgccttccctgcatggccaccacactgcattcccctctatggctgcacccgcttcctgctggcacagtccttcctgtgtctgccacacctggggctgccgcttgggtaggcaggatccatcttggtcatctgtgtccctagcaccaggccacacactcagcaaaacaaaatgatgaggatgtgtctgtgggagagatgttaactcctccccatgaaggaccttctccagatatcctgttttttgttgttgttttttgagacagggtcttggtcgatctcagctcattgcagctttgaccttctgggctgaagcagtcctcccacctcaacctcccaagtacctgggactacaggcacaccacacccagctaagtttttgatttttgtagaagaaaatcactgtgttgcgtaggcttgtctcaaactcctggactcaagtcatcctccttccttggcctcccaaagtgctggaatgacaggtgtgcaccactgcgcccagcctccagatgtctttgacctgtttatgtcactctccctgtatttgccttcacgctagttatgcacggaattcctggagtgtagtcttttgcatctcttcaagcctcttaaattgtcccacatgtagtaaatgttcagtaaacagatctgcattcacactgtcctacaagtaatcccagcactttgggagcctgaggtggaaggatcacttgagtcctggaggtcaaggctgcagtgagctatgaccagaccattgcattccagcctgagtgacagagtgagaccttatctcaaaacaaacaaacaaatgaaaaaccttttagtatatgcgctgccgaagcgagcacatgaaaaacctttaacaacaaatgcaaagtaaacctacactgcctcaatggactcacctggaacagaccctcccagcgccggatgagtgcaccgctcagggaacatctgggtatatagttcatagtatagacttgggggggttttttgccaaaagagtgatgaaattgaaaagtgaaaccttctgtcctgaaacctttgtctcttctttttcaaggagcatgcctttgagagcagtcagaaatataaggaaggaaaattcatcattgagcttgctcatatgatcaaagacaatggctgggagtaatgtgcgaactttcccttctccttcgaatgctgttttgtgaaagaaactgtgaatgtaatggaaacgtaggagcatctggtgacagcctttcttgccctctgacctcaaaggctagctgcgcatagctcttgacactcccggccatctctgtgggtaaggtgtccctcggatctgtcctcttcgtgtacacagttgtttctgaaaattttcaatgagctttttctaacttctcaagttctagagaaagaattaaccaactgatgacttacctgcctagttaatatcttcctttcacctttgtcttcaatatagttgggctctgcttttttaaggttcagttgaaaaccaaactggggccgggtgcggtggctcacgcctgtaatcccagcactttgggaggccaagatgggtggatcacctgaggtcaggagttctagatcagcctggccaacatggtgaaaccccatctctactaaaaatacgaaaattagccgggcatggtggcgagtgcctgtaatcttagctactcaggaggctaaggcaggagaatcacttgaacctgggacacggaggttgcagtgagctaagatcatgccatcgcactccagcctgggggacaaaagtgagacatcgtctcaaaaaaaaaaaaaaaaagctgggtatggtggcgcatgcctttaatcccagctactcgggaggctgaggcacgagaatcacttgaacccaggaggcggaggttgcagtgagccaagatcgcgccactgcactccagcctggcaatagggcgagactccgtctcaatttaaaacaaaagagaaccagactgagtctctgaagaccacagggacagggtctctttagatagcaagtctcaccattcccttttttagagaaaaggtattgtagcccaccctccaccccgctgtttttcttaaatttgcagaacttcaaattggctattcctcttgcaaatgaacccttaaagtacagtgttatttaagaatcttccagaggcagtcaacagacttatacactaagggcatttttggtttttagcttgttcaaaaacagaggccagcacagatgacattttagatacactctaaattgagaatggtgtctagtggaacatgtttatttaagccagtagattccttatctagaaagcaggtgagctagcccttagagaaggctgtcccggggcccgcagaggtgcccttactgaggtgacagcctcacagggtctggtaccaggggttgtgccctcagcagtgacagcagcttaggtgtcaggcagttgctgagtggctggtccatgtctatagagtaacacactggaccgaggaaaagtcagatttcattttctaccctggatgtacttgaagaaaaagaattatttttgcatatgaaagaggccagaacccacaggaaaaacttcaaaacttgacatttgccagaatgtttaaaatttgttcagaaaaggttaaagcaacaagtttagcctttgtgcatgaagacgcctggcctgctagacgcgttgcccgtccctgcgtggtgctgtcccatgtcacttgaactgatagaggggcctgtgcaatctcctaaggcctgtgtttctgccatatattttattataaattacaatccactcatccacctgccctccaccaggagtgggcaccccataagggtttaggccactttgcagaggatggaggtcaaaaaccactcccagataagtttggttttcaacatttagtaacttgtctcagggcagagggcaggcagggggaccgaggggcagcagataggagagcactgagcccggatagttctcagcctggcaagtggctctgaagctgccttcagacaaggctagtctaggggcaagagtgcgagctggctgacaataagaacgtggccacctgcccagcttcacacctcccccgacttcagcccttcctaaacccagacctgcggtccaggcaggcactgggctgtgcccactcgagctcactgcccacacacagcatgcctttgggtgccatctctttgcccaagcctggaagccttggcaggtgggaaatgccgctgccctggtgggcatggcactgagatgcatccactcagcaggagtgacagaggcagaagttcctttaaagcacatcttccacttaggaaaggaaggaaatctttgtactgtcttggaagcctccacatccggctatggccctgcaagctgctttatccctgcgctagtctcccccgagggtttaggctggcccagcacatcctgtcctcctgagctcgcgtgcagccacccagagcgcaggggtcactgcacgctgcagggctcttgctgccatggtctcaagcctgaagaggctccgcccacaagctggcccatgaagttagcaatgcctgtggcttcagtcaattgtcttgagactgtgaagaggctgaaagacaccttcccgggtggaagaaggagttcactgaaaacttatcttaaactgacccttccctttgagtgagtcttcattcctctcccatgtgggaacccagcctccgatgccccggggactaggggaaacagttggaggttcgtgccgtccccagcctgccacgggtgcgaggacagccaagtcctgagtgactcaagatgcttcacttacatggaagaaacttctaaaactctaccgagtggtttttgtatatactaaagttctatttagagcttttctgttttgggcaagttcgctgctccttctatttgggcactttggtttttgtactgtcttttgtgacggcattgattgaacattttttactagtagtcttatgacttttgtatttttttttttttttgtaatttataccaacaacacttttatcactttttttttgttgggcttctgcaaaatacaagctcatttttaaaccaaatgaacagaccatgagctggcttcaggggaagtgctattcacaggaccatatccaccaccctcttaaattcctaaacaatatcatctaggacttctatttaagttatttaaaataaatcttccttgagagccttgggaggtgatgtcagggttataaatggcacagtgcatttgctgtaggaatgtggtttggcattgttttatacacacagtattttttataccttaatgcttattcttgatggcatctgtcagatattagaattgaaaataagaatcttcccaaaatcctttaatttacctgatgccctcatcaggtcgttaaaaattcaaatggttttaatagctaaaaaactacaaattaagctctaaaacaaacaaactacagaaatgtaaaccttcatttgccaaaggtccttggtggcctgtcccctgccctgggagcagatggccctgaagcccttccctcactgtgcaggccaccgggtgaggctggacggtcacccatggtggcttcactgcaaggagcaggactgccgagctcaagcacggggccttcagcttcccctgtcctctggccacaccgccagcccttggtccttatctgtgtgaggtttacaaataaagcttctgatgtcaaatgtttaaatcgtgccctcagtggacgaggccatgtcctgatgcagaaggctgagcccaggctctctgtggcgccgctgagagcagagggctgtcttggggtcttcgagctctggagccaaggayggcctggtcctacttctctgcccccaccaatgggggacttgaatgtggccagagaatacagtcagtcagggccagccagggtgtctgtcagggtgggcacagggtcctctccaaacctgcttctcmctccctggtcaggccttcatccccaccacccgcacctgtaccctggacgctggctcagaggcctacaggtgtgtggacacctgggcagtcactgtgtcctactgtgcccctcctctgcaggcccagcttggtgtctgagcctcttacaagccagttactgccagggctgcaccaggccttgcggaggacagtgcctggcgggagggatggagggcgtcaaaagtcactctagagcccaggggcccgaccaatggtcacagacagggatgacaggctgcagagggatgggctggagaagagaaggagccagccatggcgcagttcttgttcttagcatgatgaagggccacagattggtgtgcagcagggtgacgaggggcagacatacctctagtggtcatcaggcagcctgtggcagtggatggggtgaggcagagatgcagatgaggcgccacccagcatccagggagacaaagggctcaggcctgcagcttcagcatcagtgattgatgagaaaaggaagggcagaggtacagcctgcaagttgctgacaggttcaagatttggggcaacaaaaatgagaaaaccaagaacaaggcctaagttagggcttagtgtgaagaactagaagtggggggtggcctgagggcaacagggagcccaagaggcaagtgtcaggcaaggagagtccatgacatgagaacactgaccactggcctgggctgaagacgaagaaaaagccagccaggggcacatttaacagaaaaatgggggttgagggaggggtctttctttaagggctgctgatgcagccggcccaaggccatcagagtcagtgactgacaggaggagcagagtcttggagcccagtggccgggcctgagagcagcaaggccacttcagcaggagggcggggagagggacatccacttgttctcacagcaggagacactggcctcaacccagtgtgggtcccctcaagattctcacaggggcacagagacgccaggcaggcttgagatgaagcccaggtggttcacagccagagcaggtgagcagggccctgagagctcaggcagggcacggcaggaaactcaatgctgccgtccaacaccagccttcagaagcccctgaagttttgtcaaaacagaccgagaagcccaccctgcagaggcttaggctcagtaagtctggggtctgaaaacttgtcccaggtaatggcgttggtcaggggaccacactggttgtataaataggctgtccctgagaagatgacagaagtaggggtaagaaaaccagacatatacagctggatgtagtggtgcacggctgtagtcccagctacttgcgaggctgaggcaggaggattgcttgagcccaggaggtcgaggctgcagtgagccatgatcacaccactgcactggagcctgggcaacagagcaagaccctgtcttaaagaggaaaccacaatctggagacacagtccttcctcactaacctggcctgcctactagaggagaggcctgaggcaccagcctgggtgtagggcaggccttgtgcttgaaggtcccagcagtgggctctggctgggccaggtcctggaaacagggccaaggcccttggcaacaggttaagggatgggaaggctgtgggctcccaggggccaggaaaggggatgcaggcagcaggcaagcaatttattggctggcagcagagggcaggctagaaaggctggaaatggagatgtggacatgggcccccagccctgcaaccccaccaaggtccacagcggccaacctgctgctaccaggagctgaagtccccaaaaccccgactgggcttcttcttggacatggggacagtggcactggttgagggctcttcctctgctgctcgcttcctgggaagagaagaagccgctgggagcccacaccctccctcagcccctcctgacttgtctgtgtctccatacagccctcccggtgtaggcccaacccctcccacctgctgctcccacatccccctgaatttgatctcttccacccacagaggccccggccaggccttcagaggcagtccctcggctgcagaggccacacagcacaagcccacggccgggaccagtgcccatagcttgcttgcccctctgggtctgaccctcagacctcagtcagccctaggaaacaccatgggaaacagggaggccagccccgcggcactcacgtggctgctgggttgatgtacttgcccacgccctggcggaaggtctgggggccctggctccctgcctggggctggctgctcttcactttggtctccggggctaccttgagctgtgtcttccgctcctgcgcaatctgtggcacaacagggcgctggctaaccggcagcacctcgggcaggacagatgctaggcttggggtggaaaagtgcactagcccagaccctcctaggtggtggcatcgtgccccctcacctgggcatcggcctcctcataggggtccacgaacactgtagtggcatcaatgcggatctcctcctagcagcaaagggggctcagtgcacggcaggtcctccccctgcctgcctggcccccagccgccacgccccacctccctgggcacagaccttagggcggtcagttttggggtcactctccacattctccatggctgtcagtacgtcaaagcccccaacaaccctgcagcagggagacagaggtgggtctgcgtgtgctcaaggagggcacccccacggctgagccccaaggcacgtgggaagaggggttgagagccccgaggctggcctggtggtccttgggcagcagccaggaaggcgatgagagggagtggcaagggcggggtcggctgaccatggccctgggcatatccagctgggtttttttctgtttttgttttttttttggtttcccccacccacaggaaaaataggagtcacaaaacgtggcttgtgctctccccgctggtttggtaaacagagttccacttggccagaaccacatcacctgcgtccaccctgtttcgtgctgcttccacacagctgggtgggcgtcagagaccacgtggcccacaacgctggaaagacccctggactagagggtgaagggagctgggtgtggccaggcttgcgagtggcgcgccactgggtctgagacagggcagtgtccaggccacatgggcgagtttcctcctctcctgagcccggtgggtctagagagccagacttccctggcacatggagcaccctccatcgcagctctgcatagcctcaacccccagcagtgatggccagcatggcacatgactcaggtccacgaaaaaggcagtgaggaggcctcaggtggggaaggaacccacctagcccactgaccccccaggcttcacacagccgcttcccttaccgtccaaagatggtatgcttcttgtccaggtaggcacaggagcgaaacgtgatgaagctggggaggagggctggatggttagggagagcatggcaccttctgcacctggcctgcctaagagcacaccaggagctgcccaccctctacagccagctctgggaacctgcagcttccacggacgcatgtgtgcacgtggttccctgcgctgcccaccagggcaggtcattagcccccaaggctgcccaggggaccccggaactccagctgtccccaggtcttcctgctgccccggctgctgcccactgcctgtcaggtggtccctgtgcccagaaccaggttggccatgcagctctgtgggaggtggctgggacgaggggacacctggaaaaccagagccagccccatgtcatcaagggacctgttgaaggactgaggagaaaggaggcaacaaagccagaacaggagtcaagggattaagaaacgtgggtaacataaataaacatggactaagaaaatgctcaggtcgtccaggcacagtggctcacgcctgtaatcccagcactttgggaggccaaggcaggtagatcacttgaggccaggagttggagaccagcctggccaacatggtaaaaccctgtccctattaaaaatacaaaaattagctgggcgtggtggcgtgtgcctgtagtcccaactacttaggaggccaaggcaggagaatcgctttaacctgggaggcagaggttgcagtaagctgagatcacaccactgcactccagcctgggcgacagagtctgtctcaagaaaaaagaaaaagaaaaaaggaaatggggtggaattaaaacagccaacagcactgccatgagacgaggagagagtttctgccagcctggtctgggaggaaggcagagactacctcataactttggacttttttttttttttttgagatggaatcttgctctgtcccccaggctggagtgcagtggcgcgatctcggttcactgcaagctccgcctcccaggttcatgtcatagtcctgcctcagcctcctgagtagctgggactacaggcgcccgccatcacgcccagctaatttttttgcatttttagtagagacggggtttcactgtgttagccaggatggtctcaatctcttgaccttgtgatccacctgccttggcctcccaaagtgctgggattacaggcgtgagccactgcacctggccaactttggactttaaatagatgtccttcttaaccttagaccagaagtaaaacatctaatttccaaaccagcagaaagagaagagaagcaaatgaaaataaatataaaaaatggtaactagaaagcaacaagatcatagaacgcaacagaccacctgaagaattaagtccacatttaagattgtcaggattggccaggcacagtggctcacgcctgtaatcccagcactttgggaggccaaggtgggcggatcacaaggtcaggagatcgagaccatcctcgctaacacggtgaaaccccatctctactaaaaatacaaaaaattagccaggcgtgtggcgggcgcctgtagtcccagctactagggaggctgaggcaggagaatggcatgaacctgggaggcggagcttgcagtgagccgagatcgcgccgctgcactccagcctgggggacggagcgagactccgtctcaaagaaaaaaaaaaaaaagactgtcaggatgaaggagaacacgacagaccccagctgtgagccttcaaaaagccctcagagggcagagccagagaggctgaaaagaaaacgatggaagacatggggtgggtcccggcgctggcggcacggagcactccccagggtggtgcaggcaggcacagcccacaacccggctggtgagacacaggacttaacctccactgcatcaaacatgcaccccccagccacgcagggacacgctcctgagcccaccaagtctgaccacacccgaggccaccagacaagtgtccgcagatgtgacatctgcaacggtgcagacctgagctctgacctgcaagcagttccctctcttgctgatttctaacacagtgaaggaaactagaagcagaattaaactcagataagaggaaagtaaaagaaccatcctgaggcaagctcctcctagaaaatctttttttttttttggagacggagtctcgctctgtcacccaggctggagggctggagtgcagtggcgcgatctcggctcaatgcaagctctgcctcctgggttcacgccattctcctgcctcagcctcctgagtagctgggactacaggcgcctgccaccatgcccggctagttttctgtatttttagtagagatggggtttcaccgtgttagcgaggatggtctcgatctcctgacctcgtgatccgcctgcctcggcctcccaaagtgctgggattataggcatgagccaccgcgcctggcctcctcctggaaaatctttaattacaagaatcacaaaagggaaaacaaagctgtaacaaattaaagtctaatgatctttgaatacggtaaaataggcaaacctttggcaacagttgtccaagaaagcacaaaatactactagaaataagaaaagaaggccgagtgtggtggctcatgcctgtaatctcagcactttgggaggctgaggtgggtggatcacctgaggtcaggagttggagaccagcctggccaacatggtgaaaccctgtctctactaaagtacaaaaaattatcctggtgtggtggtgggcgtctgtaatcccaggagaaccgcttgaacccaggaggcagaggttgcagtgagccgagatcccgccattgcactccggcctgggtgacaagagtgaaactccatctcaaaaaaaaaaaaaaaaaaaaaaagagaaggtggcaactgatctgtcagcagtttcacaggctggttaagccaaagagaaataaaaaataataaaatgattccctgccctggcccctgccaaacaacaaaaacaaaccacgcacccaacctacttgaaaataaccaacagtcctaggcaatccttggctgagaagaaattgaaagggaagctaccaacaaccagcaagcagtgaagagggaacatgcaccctcaaaatgacagacgtggct

SEQ ID NO: 94854 - DNA, 15746 bp, Homo sapiens
  misc_feature (1)...(15746): n = A,T,C or G
gccttcactttctcctccctgtggtcattgactgtgccaagcgctgggctgagcgctgccgcgccctggacgagcgcgctgtggagcccggacgcactggtggcaattcccgctgtgcgacccccccaccccaccccgcccgaggctgaggacctgcaggggccccaccggcctggggacaaccttnnnnnnnnnnnnnnnnnnnngcgtggagtgcggggagcagggctccgcaggttcaagaggacgcgggcggtcgggggcgggacggatattgggcagggacgcgggagatgctcagggtctagaactgactgcgccggattcttgtttagagggaggtgaagagaggaaggaggcgcgggtgacaccgggggaggcaggaggagagggctgggaggtggggagaggggaggacctcatccgggcatgttgctttgacgttccctgagacagacatccggatttggggatctgggagagagctagagcagtgatgggaatttgggctttcgcggaagaaaaaaagttaacaggaccgggtagaacacccggtagatgtgacatgagatatgacgggaggtgggtcgggaaatcgagagcgttctcctgtcttgactccccatcccttccctctcaccacccactccaccccaggtgataaagcctgaaaggtagagatccaacagcgctagcggttgaaacggtttttaaaatagagaaagcgagaggaccgacggcggctccagtgactgctgagtttccagacaagggagctctgtgcaatgaggggcgcacaggagcatgccctcaattccaaggagatcgggtagcggcaacatttattgagcgcttactgtgtgccaccgactgccctaaagccccccacccccgtggcctccgcgcgctttgagcccaatgcgcgggcccttggcaaagagaatcggccagaggccgacgggggcgcatgtcctccccggtatttgactgactcggagccaggggcgcagcccaccccgcccggctctggggagctcaccttgccccgtgcgggccacagtcgcttcccgagcgccgcctccccgtgctggccgaccagccacagctgcacctggttgttggaaccggcatagagcgaggccccagtggacacgcggatgcggtagagacccatcttgctcaaagatgtttcgctccttctggtggagaagaagggtggacgagctaaataacccagcctgagaccccgccctctcggaggtcgcttggggtcggaatgtgggtggcaggtctccaatcaactccgcctaccgctggggcccccagctccaaggagcagagcttcaaggggcagaattcagccccagtccaaaaggcggtgtcctggcgagagcagggagtggaaaccactatcttgacgggagggagaaaaagaaaaggatttggaccgaaaacacgcaggaagagggaatcaacgcctggtacagcaggcaggcgaggtgggggtaggagttatgcacgtgtgtaccacggactttgggccaagcctgggtggctgggaagccaacctccatctaaacgcacgcgtgcacacacacacacacgcaaggacacgcgcgcgcacacacaagcctcacaagttggattgcaggagagggtgaagtgggcgaggagacccagtttgcagtggcatttgaggaaggtacattcaggccacggaattcattcgaccagctttgcacacttgccttctctgtgccagccactgggactcattccttttgagcataaaagccgctgcctccctgttgtctgcagaataaaagtccaaatgtttctggcattcaatgcccttgctaacctgacctgctctcctcacctctcatcccactgcaccctggcatctcctgtgctggagccatgtgttccccggaaccccccctccccccgccgcccctgctgttctctcaaagaactcacttctgggttagtctggtcatgcttctaaaccctaattcgtctccagtttctttttgggctggagccatgtgttccccagaaccccacctgctgttctctcaaaagaacttgctcctggattagtctattcatctattcatgcttctaaaccctagttcacctccggtttctcaggaaagtcttacccggtactttcaccccccaccaccccaccagagtgaattagctttccttttttttttttttgagatatagagtctcactctgtcaccctggaatgcagggtggagtgcaatggcacgatctcggctcacggcaacctctgcctcccgggctcaagcaattctctgcctcagccttccgagtagctgggattacaggcgcctgccaccatgcctggataatttttgtatttttagtagagacggggtttctccatgttggccacgctggtcttgaactcctgaccttgtgatccacccacctcagtctcccaaagtgctggaattacaggtgtgagccacggcgcccggcccagctttcctttctaacacttttctccttgcgcacacttctactgttgcacagttaatactgcagtgtgagcatttgtatgtgtgtatcccccactaatgtgagcccgtcctaggcagggactacacacccagcaggactctcacttttgtttcccctggagacggcacagtgtcagggtttgtgggtgtcaataagtgtttgctgaaacacactgagctgaaaaattcattataaatgaatgcttcccttgggggagacaaagggaaacaagttatcaggcaatgtaaacaaaaggggaatactaacataaacttcatggcatggattacaatcagcctggtaacacaaatgaagtccaggaaaatatgtctgtgatgcatattttctggtttgcttgttttttgtttttggtgtttttttttttaatgagatggagtcttgctctgttgcccgggctagagtacagtggtgtgatctcggctcactgcaacctccacctgccgggttcaagcgattctcctgcctcagcctccagagtagctgggattacaggcacccaccaacatgcccggctactttttgtattttcagtcgagatggggtttcaccatgttggccaggctggtcttgaactcctgacctcaagtgatccacctgcctcggcctccccaagtgctgggattacagccatgagccatcacgtccggccctgcttgtttactgggaagtacattcatgtgattcaaaattcaaaaggtacaaagtgatattcactagtttctccctcctcttggccccaagccacccagttgctccactcccagcaatcacagttaccagtctcttctgtgcactaatattactgagcaaatacacgcctatctttgtctttttctgcacattgtagcatgccttattctgcatctcgtttttccatagtgcaacaggaggtcattccatatccatgcataaagagcttccttgttctttgctaaggctgccatttgctgtaacgccataaattctactagtctcttgtagtggacacaggttattagtaatcttttgtagctatgaaaaagtgctgaaagaaataaacctcgcatatacagcatttctcgtatgaaagtatctctgtagaacaaaaccctggagatagaatttctggaccaaaagcatatcgaatttaggcagaaactgctcaattgccctctgtagaaagttgtactgatttagactcccaccagtggactgtgtatgagaatgcccattcttcctcactcttgccaatggtgtgttcataaccttaccttagccaatcggataggtgaaaaatggtaccctagttttaattttaatttgcattacccttattatgagtaaagttgagctttttttttttttctttttttgagaaggagttttgctcttgtcgcccaggctggagtgcagtggcgcgatcttggctcactaaaacctctgcctcccgggctcaagcaattctcctgccttagtctctcgagtagctggaattacagtcgcctgccaccatgcccggctaattttttgtatttttagtagagatgggttttcgctatgttggccaggctagtctcgaactcctggcctcatgtgatcagcctgcctcagcctcccaaagtgctgggattacaggtgtgagccaccgtgcccaaccaaaaggttttttttataagtgaaattcagaaaaatcaaaatgtggtgggtaaaattcatcttccatagaaatggcacaaacccagtaattttcttgcagattaaaagtgtgattgaagagttgggaaggcttccaaaagtaattcacagtaacttgtgggtagactgagtgaggttagattatgatgnnnnnnnnnnnnnnnnnnnntgaaggaagtgacgtttgcgcagtttcacaaacatcagcggccccagatactccggtacttccaccttgagttctgtctcctgcgggcgacagaagaggctcagccccggtggggcctggcgggaggggcacccggctgagccctgctccctccagcgcccacgcccttcctcggagcctctgagaggaggagacgtatcggggtggggggactgagccagagagagagggaccgcgccgagcaggtggccccaggactcggttctgaggggacggggacggcaggtgggaaggtgcgctcctgccttcactttctcctccctgtggtcactgactgtgccaagcgctgggctgagcgctgccgcgccctggacgagcgcgctgtggagcccggacgcgctggtggcaattcccgctgtgcgacccctccaccccaccccgcccgaggctgaggacctgcaggggccccaccggcctggggacaaccttcccggagacctggaggcggagagggctcagccagggagagtgacagaaagggaaggcaggggaaaggcgcgcagaaagagagcggcggggaagggagggcgagcagcatcttggagctggagctcagagcccaggtgtggggggtcagcaggtccggaggctctcgaaggtggcgccaggggctttggatttggtcccgagaacaagcgggagccgttcgaatgtgttaagcagggggagtgaattagggagaaatcattccggcttcagaagggcttggaaggtctgcagcagaggtggcgaggccgctggaggtttgaaatggcttttaaaatagagaaaccgggaggaccgacgaccgctccggcgaccgcagtttccaggcaccagagctgtgtggaatgaggggcgctcaggagcatccccttaattccaaggagatcgagtagcgggaacatttattgagcctttactgtgtgtcaccaactgcccaccatagggaggaaaaaagggaggagggagcgcgcctttccaccttccgtgccccgtcccctcaccatggagtcgcggggccacctgctccgtgcgcattttctctcttcctggctccctttgccccgctttctcggaagctcggagcaagggcgtggagtgcggggagcagggctccgcaggttcaagaggacgcgggcggtcgggggcgggacggatattgggcagggacgcgggagatgctcagggtctagaactgactgcgccggattcttgtttagagggaggtgaagagaggaaggaggcgcgggtgacaccgggggaggcaggaggagagggctgggaggtggggagaggggaggacctcatccgggcatgttgctttgacgttccctgagacagacatccggatttggggatctgggagagagctagagcagtgatgggaatttgggctttcgcggaagaaaaaaagtaacaggaccgggtagaacacccggtagatatgacatgagatatgacgggaggtgggtcgggaaatcgagagcgttctcctgtcttgactccccatcccttccctctcaccacccactccaccccaggtgataaagcctgaaaggtagagatccaacagcgctagcggttgaaacgttttttaaaatagagaaagcgagaggaccgacggcggctccggtgactgctgagtttccagacaagggagctctgtgcaatgaggggcgcacaggagcatgccctcaattccaagaagatcaggtagccggaaaatttattaagcgcttactgtgtgccacctgcgtgttttctgtccaaatcagaaaaggatttggacagaaaacacgcaggaagaaggaatcaacccctggtacagcaggcaggcgaggtaggggtaggagttatgcacgtgtatgcaagcctggatggctgggaagccaacctccatctaaaggcaagcgcggacatgcacatacacacacacgcctcacaagttggattgcaagagagggtgaagtgggcgaggagacccagtcagccgtggcatttgaggaaggtacatttaggccaccgaattcattccaccaactttgcacacttgtcttccttgtgccaggctctgggactcattccttttgagggtaaaagtctgcctccctggactcctgcccctcaggcgctcccacagcccggcaccgccccctcgccattccggagccagcgcgggctaagcgggcctggccggggatgagcggagccaccgtccccatattcctcggtgccccgggaycgcaagagggagccgtggtttccggaactcctcccgcccctccgggcttttcctctgttaggcaggtggcgatycgctgtctttgcctgttatggccgctgccgtcgccctggagacaggtgagtagcgctctgagcctggagtcttcgcagatagaactctccttggcccagacctcttctcccgcttccckkgcctccttccaggcctcactcccggcaggattagtatttggacagggaggagagaaggctcttgcagcgtctagaaaggctaaggtactctgcagttttcctaatttgktttgttcgcacayctttgctattcaaacacgaccccaccagcttcccagcgtgggcgagactaagggagaggacttgtgtcttaaagcgtgtcctccttgtgtcttaaagcgtgtccttgattggttttctgcttctcacatgagcttgcatacgtttgaaatatcgtcgccagacctgtgtatcattgtgttacttgtgattcttatatatgcatatgttccatcatcttttaggctctctggagtctcttgttcagcttgcatcctaagtttttcttaactgattcagcacgtgcttttgcgaaacttaatcactgttaacaattgttacaatgcattattaaaataggggaagccacagttattacagcctaccttagagatcactgttaaaattyctacatagtggcccatgagtggtaggtattgtgtctcrtttgtgttgctgttttctttgatgatttctctttacttttaaaggtaaccctcttccatgactgttccttaaagtggtgcgctgtcccartrgaccatgctctagctttccaagctgctagaactgtcagtgtttctcagccttggcactattgacattttgggaccagtgattcttcatcgttggcagaggggagggtgttgacctgtgcactgtaggatgtcaggtggcatccccggactctacccgctaggtgccagtagcacctaatgtgccacccaccccctcccaacaacttttcaaccaaactaaaatgtctctagaggttgccatatatcctctgggggacaaaatcacacttagttgagaaccactgtcccacattctacacacagaagccaaaaggatatttttwaaatgtaaatggcatcatgtcgttcccctgttggaaacccttcaatgttttcctgttgaccttagaataatctcaaattccttactgtggcttagaagaccttctgtggactggcccctgcttgcttttaactcctctcttccgttctgcttccatgtctatataattgcttctctctcactccagccacactggccttctttctgttccttgaacattcaaagctggttcccatccaccctttgtatttgctgttcttctgcctagaatgcacctgttccagatcactgttcattcacacatatctcagattacatgttaactaatcagcaaggccttccctgaccattttatcaaaagaagccacttacttccattctctatcacattacccatgtatttccttcatagtgctaatcacaatagaaaattgtcttgtttcatcattgcttgtctgccttttcaccagagtgtaagctccactagagctgggactttgccttttttactgctatagcccaagttcccagaatacagacagttcccaacttaagatggtttgacttatgatttttcgactttacaatggtacaaaagtgacattcagtagaaatagtactttaagtactcwtasaaccattctttttcacttttagtacagtatgcaataaattacatgagatattcaacattttattataaaacaggctttctgttagatgattttgctcaactttaggtgttctgagcatgtttaaggtaggctaggctaagccatgatgtttagtaggttaggggtattaagtgcattttcaaattaccatattttcaacttacaatagtttyaacgggaggtaaccccatcgtaagtggaggaacatctagtgcctggcacagagccggttctcaataaatataactcttctccatcttcttcaaacctcaggccaggtttcagtgacctcctctcactttytaagattatttttgcttgctggtgggtttactgtcatttttaaccacatctaacctaccttaaaaaagtgtatggatgggggtgccaggtacaaagacttagcataaagaaaacgaccatttactttgaaacataaacaaaggccaattaataatttatgagtctgttccttgyccctcgagtttttakcaggcatggartcattccacaggtcattatttcagtttggtctctgttcctaaggggtgaaggttttctgagggctgtggatcccaaactcacctggctcagaggctcaaacagcctctctttgtccatcaacccgatttagacagcatcctgggcctgaaaaccttctgtgctggcttcaagtgaaaatagttcactgggwcaaaagtaggctggtccaagacgcaggacggtcagtaaacgttggctgtgttcagaaactgcggcttggctgtttcttacattgatttatggtttgtttccatgaaaccgaaaatgattggtccacctggcagctggctggctggctggcaactggaggcctttctgtcctggctgagggccctggccccttggtggcctttgggaarcagcatctcatcgggccgttttttcgttctggcgggcggccggcttggcccgcggggtcgggctctccgcgcagtgcagagacgtctccaccctcagggacgaggctctgacgtggcgggaggtcgtttccgtgcgctgcgaggaggattccacgtgccgggaggacgcctcgaggatgcgagggagccgcttccccgagggggagagggagggcccctcgctgcggcgctgggaggtctccacccgccgggacgacgtctccacgcggtgggacgaggtctccacgcggaccgtggacgtctctgtgtagcgggtggtccccacccggggcgaagactgcttggcccctcgggctgaggccattctgccggcgtgagggggccagggaggcctcggggcaccctacagcccaatggtcaccgcaggcagaagagaggaaaactacggtactgccatagccgggagcgccacaacacgatgacgtggaagcaccatggtccttcgaaggctaaaacactggactcctgcccctcaggcgctcccacggcccgggccccgccccctcgctattttggagccagcgcgggtggagccatcccagggctggtcggggatgggcggagccgccccgccccatatcccacagtgccccgggaccggaagagggagccgtggtttccggaacttcgcccgcgtctctgggcttttgctctgtcaggctggtggcgttttggtgtcttcgtttgttatggccgctgctgtcgctatggagacaggtgagtagctctctgatcttggagtcttcgcagatggaactctccttgacccagacctcttccccgtggcctccttccaggccttactcttggcagggttaatatttggacagagaggagagaaggctcttgtagcgtctagaaagactaaggtactctttgcagttttcctgatttggtttgttcgcacatctttgctattcagacaccaccccaccagctccctggcgtgggtgagactaagggagaggacttgtgtgttaaaccgtgtcctccttgattggttttctgcttctcacatgagcttgcctaagtttgaaatatcgtcgccagacttgtgtatcattctgctactggtgcttcttttttttttttttttttttttttttgagacagcgtctggctctgtcgcccaggctggggtgcagtggcgcgatctcggctcactgcaagctccgcctcctgggttcacgccattctcctgcctcagcctctcaagtagctgggactacaggagcccgccaccgctcccggctaattttttttgtatttttagtagagacggggtttcactgtgttagccaggatggtctcgatctcctgaccctggtgcttcttatatgcatgcgctgcatgatcttttaggctctccgcagtctcttgcatcctaagtttttctttactgattcagcccctagcgtttgcgaaacttaatcactgttaacagttgttacaacgcattattaaaataggggaagccacagttattacagcctaccttagtgatcactgttaaaattcctacatagtggcccacgagtggtaggaattctccgtttgtgttgctgttttctttgatgatttctctttaactttagagaaacttctaacttactccttttaatcagggctccgcttttcttagatttcgaaggaaggtttatctcctcccactcctagtttaggaagaccatctcaacattagtcaggtttctttattgctctttccttactacaaatcagtattatatacagtgacctttgttttccatgatttttgctgtcttgtctcctagatgatgctggaaatcgacttcggtttcagttggagttggaatttgtgcaatgtttagccaacccaaattaccttaattgtaagttgttaagcacctcattaaattgagtagctattaatgatttctgacagaagagttgcagttcaaaatagtatctacttttacacattctcagttgaatgacattacacttatgctggtatatagatataattgcgtactgggacttgtgttttgaatccaatgtgtgttggtggtgggggtgttatgtaaatagatcctttatattaggggtaacaaatcacagtttaaggattggtttgacctacagatttttttttttaatgcttttcagttcttgcccaaagaggttacttcaaagacaaagcttttgttaattatcttaaatacttgctttactggaaagacccagaatatgccaagtatctaaagtaagtttaatttttataatcctaagcatgtgtatactttattatataatagatttcttagtttcacattggcaaaaatgtatttggaatctctccacttctttttgttatcaccgtcttaatacaagacaccctcatctctaacttgtaacactgcagtaatctactccctggttatctgtgcttccacttttaccttcctgcccccatctccaccccaacccaaaccaagcaaaacagctttctacacagaaaccagcttaatcttttaaaaatataaatcagaacactttactttcttgcttagaacctttcaatggctttccattccatgcagaataaaatccagtcttttttcttggactaaagccttatacgatctggccctgccttttctgaccttgtcttttaccacccttcccatctcaccaggtttctggtccctaagaactcacaatctgtaaatgtagtagcataagccatgggctgaaattaaaagagggtatctgtaaggaaggtgtttctggggttatttgaaggaggtgatcttacctgagtcttagagttgctgtcttttatttaaggcctcttatttgccaggaacagtgctaaatgcttcatatgcattaactcatttatatatatatatttaccattcaggtcgttcagcagacactttcatgttaaggcttactaagttgcaagaaacatattataaccacaaagcaattcccttttaatggttaaaaaaaaaaaacaaaaaaaacaaaaaaaaccaacccaccttgaactcacacccctgctttgtcttaagcaggtagaaagcaataatgaacctttaaaaaaaaaaaaaagtttgagaggaaaatgtttcaaacttctctcaaagtcacttttctgtgtccaataacaattgactcacgaagcacatacgtcttatgttgcctgcaggaccgtttgcaccttttctggctttttatccatttaataatccaaagaacagacttttaagaaaagtagacttcaacgaatattgtatgtatgtagatttacagactcagtgttggaagccttagccaccaacaagtttaatcttacccacaacgttgccgagagatggtcatctacactctggaggtttccattgagcccgtgttactctgtcagggacagctgattcgattgttagccagatattagaaagttcttccttatattgtgatataatgtacctccttgtagccccagtctgtttgtccctggatgaagctagaaccattctataccctcttgaggacaacagccttccagatatttacattcaagagagactgcaaattagccccttttgggcgttttattcagtctgcagaagattttagtttttttaatacttgccaacatttaaagatcagaaagttgtatataacaaatgcagatttccagctactttttcaaatctggaagatctagtaaccatagatcttaattctcccaagtcaacaactgggctgaagctgagagcagctgtcactactagctgctttccacctggtggaagagacactttctaccacttggcctgcttcattgatagccagtaggtgccactataacatctctcttccatctatttttctcaactaccctctgccattgtgccatggtgtccagagttctcgtgagttgaggttccctcctttggatatttggcagttgtactttatgcagttcagccaagaactaaacacaggccttcaggtgtggtcagagtacagtgggccagaggtcctttcttttcttcatgtggtcatacacctctgttaattcaacttaagtttatattacttttgggggtgggagtggggaagaggatcacattgttgacttgctggaagcattatgtcaactaaaatccttcagttcttattttcatcatgctgttgggttctccctatgttgtttctttttaaaaacaccaaatgcagaacttcccttttatactgcttctatttcatcttgttgacttgtagcctatcagagtatgattctttattgtcatctaaggtattctgatataatcactgcatgtctaaattctagttattgactaaatgctacttgagaccattctcttggttgtcacattattttacagttgaagaaactgaaccttagagaggttaagtaccttgttaaaggccacctggctggaacataacatcctggtcattttaactactaatgctgtcatgaaagggagttagccagggcaggtgtgaatagagcattctagcataagcagccaacaattagagcaactgtgtatttttagtgtgtggatagcaaatctttgctgtcttggaagttactatcttagaagcatggtattaagccctctattcaatgtggtgttcacatcagtagcattggtttcatttgggagctttttagaaatgcagagctcaggccccactccaggcctaaggattcaatctgcattttaagaagtgacccatatacacattaaagttttagaagcattgctgtagtatcctattttccacactttagtcatttgcatatcacttgtgcaactttggctttatctgcatacttcctgaagggggcctgcccctccacacctgtgggtatttctcgtcaggtggagatgaaagaatgagaaaagaaataagacacaaagtatagagaaagaacagtgggcccaggggaccggcacactcagcatgcgaggacctgcaccagtgccggtctctgagttccttcagtatttattgatcattatttttactgtcttggcgaggcgagtgtagcagggcaacaggtggcgagaaggtcagcagggaaacgtgagcaaaggaatctgtatcatgaataagttcaaggaaaggtactgtgcctggatgtgcacataggctagatttatgtttcactttacacaaatacctaactagcagagagcaacaaagcagtattgctgccagcatatctcgcctccagccacagggcggttttctcctatctcagaatagaacgaatgggaatggtcgactttacactaagacattccattcccagggacgagcaggagacagaagccttcatcttatctcaactgcaaagaggcctccctctttcactactcctcctcagcacagaccctttacaggtgtcgggctgggggatgtaaggtctttcctttcccacgaggccatatctcaggctgtctcagttgggggaaacctggacaatacccaggcttttctgggcaggggtccctgcggccttccgcagtgcattgtgtctctggttaatcgagaatggagaatggcgatggcttttaccaagcatactgcctgcaaacatattgttaacaaggcacatcctgcacagccctaaatccattaaaccttgattcaatatagcacatgtttctgggggcacagagttggggctaaatttacagattaacagcatctcaaagcagaacaatttttcttagtacagatcaaaatggagtttcttatgtcttccttttctacgtagacacaggaacaatctgatctcttttccccacacttcctatatgttaatgtattttaattgtctgttagcttttatgtcttttcaacttgaaataatttcacttacaaaatagctggaaaaatagtaaagataattcctgtattttgttcacccacgtattccaaatgtgtaacactacaatcagcaaaaatcagcacattaatattattacctaatctacagacctcattcacattttgccagttgttctgctggtgtgctgtatgtagtgcaggatccagtctaggcccgtatgttgcattttgctgtcatgtcttcttagtctcctttcatctcagtggtcttttcttttccatgactatgacagaaatgatttgtatccttcatatatctgcagtcacatgaagtctatttgtcccactactggtgacgtaaatttt

SEQ ID NO: 94855 - DNA, 14362 bp, Homo sapiens
agcctgggcgacagagtttatgtatgtattgattagtttagaagcgtgggtagactctctagttctgatgtggtctgtgccttgggcttccttcggctgcagggaacttgtgtttttgttgttgttgttgttgttgtttgtttctttgagacaggatcttgctttgtcaccaaagctggagtgcagtggcatgatcatggcttactgcagcgtcaacctcctgggctcaagggattcccctacctcactcagcctcctgagtatctaggactacaggagtgtgccaccatgctcagctaattaaaaaaaattttttttgtagaggcggtctcactatattgcccaggctggtctcgaactcctggacttaagtgattctcccacctctgcctcccaaagtgcggggattacaggcatgagccactgtgccagtcctgaactagtctttatccctgtatctggaggaagcaataggattccagggatttggacaggagaggctctgccctgagagggttaaaggcaaatccggtttgatttctggcctctgttacccagaccttgccaggctgggcaaagcaggatagggcagacctccagctccatgaaatttgaccctgcaggctagaagtccagctttctgtccttgggcaaacatgcctggaatccagccacaatctgccacctcacttcctgttctagcctcagtttttatagctggcaagtgaggactagtcaccaaggtggtgtcaggctgattcatccactgaagccctgggccgggaggctttcctctaagatctgtgggaactgcgcagggccctcctcaatctaggcctcagaattccccctgaggtttggagttgagctagacagcctttaagagaagctctggctgtattcccactggtacctcactttcctcttgtgaggcaaggaggtcttgtctacatgaggggcgggcctgaagttggattctggaggggagccaaatggggcctcaggtgggtgaaccttctcaacctcctccctctccaaggttgccagcaggtggaacctcagcctcgcctccattactatggtgactattgagcctgttctgctaccacccccgtctccacctatcagaggacagagtgttctaggcacccatagcccagaaaggaaataggaggctgggccctcacctgcctgttttcaatcctagctatgtggcaggaccctggcagcagtgagggaaagtcttgcccctctgcccaccctgaggatatttctagaacccctgatctcctttatatctgcccaggtgtgcagcctggtcctagctatgcatatcccagctcccatttttctggctctagaggatgtttccctccttacaggatgaggttttagactccctagccaataaagagggaagtttctcggctcccatccttcttactcagctgtgtggtagtaagctacttgccagcactgtttaaggcctgcctgacctctctctccccagctgtgtggtgcagccctgttggcagtgggcatctgggtgtcaatcgatggggcatcctttctgaagatcttcgggccactgtcgtccagtgccatgcagtttgtcaacgtgggctacttcctcatcgcagccggcgttgtggtctttgctcttggtttcctgggctgctatggtgctaagactgagagcaagtgtgccctcgtgacggtgtgtgaaacccagctccacaggctgatgaccaagagtcccctcgcccttgacaccaggccctgggattcccaaaccctgctttggacccccctaggctcaggcttctgtctcacttttccggggggggggattagggcaaggagggcatgagggactgtctctccctaaaacccagacccctgttccccactcagttcttcttcatcctcctcctcatcttcattgctgaggttgcagctgctgtggtcgccttggtgtacaccacaatggtgagacactgggatggaggaagggaagaagattgggcaaaaccctgggagtgggctgtggcctgtgaatggccaccttctgtaccagcccctaaacactggcctgcctcacccaggctgagcacttcctgacgttgctggtagtgcctgccatcaagaaagattatggttcccaggaagacttcactcaagtgtggaacaccaccatgaaaggggtaaggttggctgggggaggttttagggtggagagaaagaagcaaggccccacctccaccctcatcttgtctccagctcaagtgctgtggcttcaccaactatacggattttgaggactcaccctacttcaaagagaacagtgcctttcccccattctgttgcaatgacaacgtcaccaacacagccaatgaaacctgcaccaagcaaaaggctcacgaccaaaaagtagaggtgtgggctggcatgagtgggtggggactgttttcatggcctcagagtggcaaacggggatgggagtagggcagctgccaactataaatgctcttttctcttcctgaagggttgcttcaatcagcttttgtatgacatccgaactaatgcagtcaccgtgggtggtgtggcagctggaattgggggcctcgaggtaagcagatgaggaggctgggactgggacatgggcatgagaccagggctgctcaacccatctgaggcctctctggaggaaacagacttctaactgggcctcaggtagggtgtctgtgggacaggcttcaggatccctatcatgttccctcatctctccctgttcctccctctccagctggctgccatgattgtgtccatgtatctgtactgcaatctacaataagtccacttctgcctctgccactactgctgccacatgggaactgtgaagaggcaccctggcaagcagcagtgattgggggaggggacaggatctaacaatgtcacttgggccagaatggacctgccctttctgctccagacttggggctagatagggaccactccttttaggcgatgcctgactttccttccattggtgggtggatgggtggggggcattccagagcctctaaggtagccagttctgttgcccattcccccagtctattaaacccttgatatgccccctaggcctagtggtgatcccagtgctctactgggggatgagagaaaggcattttatagcctgggcataagtgaaatcagcagagcctctgggtggatgtgtagaaggcacttcaaaatgcataaacctgttacaatgttgccagttggactcttcatgtatccttggggagaggggcctaaactggccacggattcctgtggggctgccaactcagaaggccctggaaaggagggaagtagggtggggttgggggtcagaagtggttatttctccccttcatttgggttccaggccttggagggaaactaagagggatggctgagagggcatgaagaagtacagttgggttaggccagtctgcctccttataaaggggagaactttggactgaaactaccccctcctgggtaggggcactggactggaaagctatgaaaataacaagcttgtgacgaattcttaccagggcaatgggaaagggtcactccttaggttctgggaagcccttcaggagcccccttcctagggtccaggctgcctgcctttcccactcaggcaaaaccccagatctgtccctgcttctgggatctcagcaagcacttcattttttcgttgctgctggcctacctggtgttcttcagacctcacctctttttcttttcttttctttttttttttttttttttgggacagagtttcgctcttgttgcccaggctggagtgcaatggtgtgatctcggctcactgcggactctgcctccgggttcaagcagttctcctgcctcagcctcctgagtagctgggattacaggcacctgccaccatgcccggctaatttttgtgtttttttttttttttttttgagagagtctcgctgtcgcccaggctggagtgcagtggcgcgatctcggctcactgcaggctccgccccctggggttcacgccattctcctgcctcagcctcccgagtagctggcactacaggcgcccgccacctcgcccggctaattttttgaatttttagtagagacggggtttcactgtgttagccaggatggtcttgatctcctgacctcgtgatccactcacctcggcctcccaaagtgctgggattacaggcatgagccaccgtgcccggccacgcccggctaactttttatatttttagtagagacagggtttcaccatgttggccaggctggtctcgaactcctgacctcaggtgatccacatgcctcagcctcccaaagagctgggattacaggcgtgagccacctcacctgacctagacctcatctcttctttagccctaactatccctatgctccaggtaggaaactagggatcggaaaggccaagatacttgccccagtcccacaggcttctgtgaagagctcagcctagatttgggcccagaactccagcacctggtgtagtcctggctgacatggtactagttccacttgaaggggcagctggccagaatgtctgatatagacctgatcactgttgagccaggagtgagaggcctgagggaggctatggcaagagggtacagtgtctgctaccaagcaaagcccagcctaacaaaccagtccccctccttacttccctttgacccctgtaactctcttcctgagcttttccagggcagcccagaaccaccacccccttgctgagcccagaaaggaagagggacctggccagaaccaaacagtgccttagagctggtctgtgagggccagaccaggagcctgctagggtgcgggacagggggaggagctagcctgcctcaccccttcaccaccatactgtgcctctcacacttctcctctgccgtgtgcctgtgtggaggctgcatgggatttgtttgcccagggcgggcctctacctcatcatgggctaattgctgctcaacctggctgttgtgccacctcaggcactatatccagctccaacaaacactgaaggcgtcagggtggcgagatatgtccaagcgacataccacccatgctgtcaccgagttgggctccaagcacctgtgaaagaggcagggcagagagcaggcaggagggctggagttccagctggagttctgtacttgtacagaggcaggcagaccctttctgaagaggtgctccacactcatcctcctgacattaggcccttcacagatcccttaaatgttcttttccctgccgtaggctttctcattcactccctctggacaatcccatccattttctggtgcccctatgactaacttagatcttcctaacctctttgggttactggctatgtgagaatctgatgaagaccatgacccatttctccacaaaaatgcccagatagagaattctgaatagcaaagtgctctaagggccatagacacccttgctcctacatctccatctgcaccctagcccgtctcttgaatgatgcctgcccagtcctgtcccatccacttccttcccacccctactatgcacacctgctctctcatttcctcttccaactccccagtatccctttttgttctctcctgctctgtctctggggacaggtgcccggcccaggcaagataagcaggaacccggctggtggttaaacggtggggaagaggtagggtggctgctccaagcctcaagtagggcggggctaaagtcaagctgtcctagggtagagttggggaaaaaccttggagtttgagactcaggcatcccctggtggccaaatggccccaaatggaagataaactctgtggaggacagtaaggaaaactcaccatccaacacaagtattctctccaccacttccctccagcacccccctgacacacaaaatcacaatcacaagacatccccagagggcttctccttttttaatcaatgaccaacttatccagctttggaaatctggacaaagagaaggctgagaggaggcctggtccagtgtctaagggtctctgagtgagtctgtgtcagcatgtgggccccagctgggcctgyccatgggttgggcacagcagtttcctgagtaagagccagccccaccctcagggcagcattccagcccaaaaagaaatccaggccctccaggttcggcctgttttcaaggccctcaggacagtcaataaataggttagattctgagccaggcctggaaagtgagggtattcaaagggcaggatgagctgctagggatcgtaatgattcccaggtactctcctgcccttctccaacaaggaagtaaataaatagacttttaactcaggaacggggtgttggagcaggggaaccctccccttggagttagtaattaagtctcatgttaaaaacaaggtagccccagcccctaccagcatctacaaaatcctacaggatggagggaagggctagccagcctgggggtacacagtacccagccccgcagggtcctggaggaggtctcatgtctgttctggggctcctggggctccctcctcctttgggggtggctccaggaaaattggggtgactgagggtggcttcttcactctgggaaaataatacaagaatgtatagagaagaagccattagctatatccctggatctcactaggcctcctgtttcccagggcagaaaagggtcactcacgagtagggggaagccgggacccccaccaccaggaagtggttcttcttccgaaacaatctccacaggccccgatggttgccacgcacatccaggtcccagatatggaggcactagtgagggtgggatggagacagagacatgggtcagagagctgtagggaggggtcactgacgaccctttggcccagcccccacccctcctcagaaaccacctcaatttgtaagagatagcatcttttagaatatgaatttggacaaggaggttggaagaggtgttctaagagtataaagaggaggttctgaggttgaagattccagagcaaaggctccctggatcttggggcagtatgtgtgtgagggggagggkttctccagggtgggcatggtattggagcaccttggcaagctgggtccaggtggtgaagtcatcatctttctccattcgaataaaggccacgtaggtgtggccctctgtgtctggcaggaaagagtcttcacaagggttcttgctgtggtccagaacctcagcctcactgcagtagagggtgggagaatatagccaagacagggcccacttcatgggtgtgtcccacaggaccctgtacttggttgaatgctctgctgttgccaccttgaagttctttttttttttttttttttgagatggagtcttgctctgtcgcccaggctggagtctcctgcctcagcctcccaagtagctgggactacaggcgcctgccaccaygcccggctaattttttgtatttttagtagagacagggtttcaccgtgttagccaggatggtctcgatctcctgacctcatgatccacccacctcggcctcccaaagtgctgggattacaggcgtgagccaccgcgcccggcctgaagttcctaatgtttgagatgagggccctgattttcattttgcacaggaccctgtaaattatggggccaagatccccagtatttgactctttgctccctgctacaccccaattgtcytaggccatacytgagcagcctgtgaacttccacttcataagcttctttcttcagactgaagaggagggagaaatgggtcaggggagtgggcaggccctcaggtcccatgggtagcactgagcagggcaaggggtcacatgggaatctgtagccgcagggctggagtaaacacacaggcccagcattggaagggactttcagggactggcctccaaatctcctagatatccaycccttgccctgctgccagccccaacctgtccacattcctgagctggacacctggaaccgtgttgaacttgtgcttcttgaagtaggcctcctggagtgggtatgaragtgaaaatcagcacctcacattgtctggcccacacccacttgctgaccagccagacatctataagacacacaaatgaagtcctagacctgtaaagagccctctaatttcccaccgtcttctccatcctctttgcagcatcctcagcaagctcttactagctttaatttggcctccaccattgctggagagctcatgctgtcacggcagctcacactactgcaccacagacccatgaactagcagtccctgcctcttgtagttctccctgggcctgctgttctagagccacagatgtcagaaacaggccctgcaggaggtggtgggcaaagggacgggctgggctgggaaggaaaaaactactttgactctggtactgagagtgacctgagggaagcgcctgcccctctctgggagaggaatggggctcgcgtattagtcagcctctgagggacctctggcttctaggaggttccaagctggacgctattcattcctttgggctgggctggctcaaggcctcccttgctgtaactggggaatggtcctctgaatgcagccaggtgggttggcggtacctaaggacttccctgttctcctcaggctgaagcataggctccagcacttgccaaaacaggaaagggcagagattgcagggctggaccagtacttagaggcagaaatactctccccagacacccacagtctagtgctaaaaatagtaaaaataaaaacaataccagctgacccttatatatgtttataattcaaagcactttacatatattgactcatttaaacctcaaaatatcgtaacccagtgaggtagtagtattttatcctctttttttttgagatggagtctcgctctgtcacctaggctggagtgcagtggcgtgatcttggctcacagcaagcttcgcctcctgggttcacgccattctcctgcctcagcctcccaagtagctgggactacaggcgcccatcaccaggcccggctaattttttgtatttttagtagagatggggtttcaccatgttagccaggatggtctcgatctcctgaccttgtgatccacccgcatcggcctcccaaagtgctgggattacaggcgtgagccaccgcgcccagccctttatcctcatttttcagataaagaaactgaggcaaaaataggatagctctttccccaaggttacatggctagcaagtagcagagctaagattgcttcagagtccatgttcttgttcttgactgtcatgccacactgtgccctgctccctgcctcccactcacgtgaaagtagccattcatgttgaggccgacgatgccaaagtggtaggatcgggaaacgtcagggatgatgcactctcggccccggcgttgttcaggcatccgcatccacatgtcccaatcccagagctggcagacatggaccacgatgaaggttaagatgtttcgagttggtaggggactccagccccctcaccctaccctgacagttaccttttccggtgtaggccacttgggctcaagctcctccttgtacaaggacctcctgagcacccagcccagcccaggcatggtctccacacggtacagtagtgctgggtcctcagccgtgtgttcatacccctggggacagggtgccatagtgggaggtattagctgaggcctcataaactcgcctgctaaaccctggtcattccagcctacctggtcattccaggcagagatgcagtacaggctgtcatcctcctccagtaggtggatggattggctcaggaaactgagagaggcagggtcaaagagttcagggagggacaaggataaatctagtcacacagagatgctagaattgctggagctgggtctcaggagcacctccttcctggagtacctccttcccccaaatccccactgtctccattcatccactgtaccttcaacagcagccccaacacctgccatcctacctttgcccaggcttcgcccccacttgtgagctcatgtcctccagaaagctctctaggacacctcactgactctttccctgcagactgagggacctcaactgaaacctagagactcccctcacctgaaaaaatccacagcaatgtccaggtcctcttccagaaccacagcaaacttggcctcctagaaggggaatgggacatcatggtcccaaaggggtctctccatcctgtgatctcctttgcccccaaccctcttcttgcaggcagcattacccccattttccagatgtgaaggatgaggcccagtgaggggaagagcttgccacgtaacaggcccagaccttatgcccatgtttcccccctcccaggcccaagagttgtatccttagtactcaccggaaacaggttgaaagtggcagtgaggctggccttgtagtgctgggagtggggtgggaatagggcacatgagctttagggtagaaggcagagccaggtgtctgccccatccccacttgcctatgcagtacctgagacacgcgggcattcttgatgctgatgggagtatgctggatgcccctcagaccaaacagtgccaccacatccatgggttcctgggggacatggccactgctcaccatgtgaggtcactttccctctgcccacctctgcaatccaaggccttcacatttcacagcccttgcctgggcggtctcccttgcccgtccctggcaatcactgctgctccatgttgtactccacccgaggcaccccccaagtcctgctcacctcatagtagccgtcaatgaaaactgttatcatctgaggagacaccccctgggctgaaagcagagagcgcagcatcctggggagcccagggataggttagggtcacttcatcacccctcaactcaggttcccctgtgtttacagctgggcccagagtccctatgcttacccacagaggtgaatgcgtctagaatctattgcctttctgcccacctcaagagttcctcctggaggtagatgacctaagcaccctcctgttcagtgctgggtatagcccattcccaggcttacctgtacaggtaattgggtcggttccctgcaatgacagccacaggcacattgaggaccttgttgtctgggagctgtgggagaaatagcgtttagctcttgccttattcccccttcaaactgggatccccacctagggaagacttctcaggtgagggtaggtgcagactggagtagacagggaagggatagaggatcttccctgttctgggctctccacacactcagcccaactctagcgctgagctttactcacatggcctgccccttcaccccagccctgtctttcagagcgcagtgtaaatcctgcccctggttctctcccaggctcaggtagggaaagcccaacctagatcattcctggggcccccctgctgagctgggaaggagtccaaacctcactgtcttaaggccccactcactgggtcagggctgaactcgatgggtgtggggtccttgcagctgcatacacttccatagccctcaactttgctgcagaagcgccggcggcgacggttcagctctgtgtctgcccagtggcactctgcctctgagggaaggatgcggttgtcatggaggcatggggccagcaaggtttgaagagccccaggcacacaatcaaaggaataaagctccacagagagatctaaatgcccacccccagcccaggccctgccccatccatgctccactaactccaccttctgctgagctcaatggcacatctgtcttcagcaggactgggtccccccaggaagagagggcaggtgatttagaatgtttctccccgaagacaggacctggcaggaggcaggaatgagggccatgggggcccagacaccagtttgggggctttttcccatctccctgcctactttcatccaacccactgccactggctcctatttgttccccaccccaccccatctcctagggttctgctcctcccaggctcttgatactacagagtggatggcctctgatgccggcacctccttttcgtcccacgaaggcccatgtgtccctccagcccagggcagggccagcctggctgcccaggctcctcagcagagccttggctgtgtccttgaggtggaaggagccctcatcctgggggaccagagaaggcagttagcctgactggcatggttccaggagacctggcctcacagagcacgaactatgtagcaaccttttacttaaaatagctcattacattattgcaataaccctctatggttactctctttcacagataaaataataactgaaggcttagagattctaaggtcatccagctaataagtcctttccacaaacccacacgatctgcacctctctctcccgccactctctgccttcttttccaaccactctcctactctcctcccttattctgctccacctcgactagcatctttgctgttcctcaaatatgccgtgtaccttcccactataggggctttgcacttgccattctttccacctggaatgctcttcctccagatactcacctggctcactcctcaattcctcagctttctgctcacatatcatctccttgcaggggccttctctttctaaaatgtcccctcccctctatcattcattatcccctgctttattttcttctttatacaagttatcatttactagcattatccacatttacttggctgtttctgttgacctcccactgctggaatataagctccatgagggtggggactctgtcttgtttcccattgtatcttcagcacccagagaagtacctggcatacagctgttgctcaataactatttgctgaattaatacaaatgttaaggctgagattggaacctgagtaaccttccttcagagaatcttcccactatgttatatgaggggcagagaagccggggctagaagcagggttggagctagggagtaggggtcagggtcaggacagaataactgaccttgacagtgcagatgagcactcggccgggcgctaccatgttgaggaatagcaccatggcctcatcctcatgaggtgagtacgtgtcaaacacacgttttgccatcacgtggccctggcaggggatatacttctggtgagttggtgtcatcagcaagagcccagctccagccctctgggtcacccacccctagaaactcaccgtggcctggttgaggacaatgacatggatgccccggccctgctcccgggcctcatcctccagcacctacacagtggcagagacaaagtccagcttttcactctggcattcaaggtgtctctgtcttaggggtacttaaaacaccagctgcttgaaacatcacctcctgcctatgtttctgttcacacagttcttttccaactcagctcgaaggccacctcttccagaaagcctctatagcactcccatcagaagagatcacgtctttctacaaccctcccctccatgactttcatggctcttagagcctctgctgtctctgcttcatcctggaagtatcacaatcctccaccacactgaacccctcaaggtagggccaggtctgattactttcaggtccccagtgcccagcacaaggctgaggccaaagaaaggaccaggggatggttataaaataaatcaatgaattgactgcctactattatgaatgattacttttgagatcccactacatacaagacacttcacaaacttttcattgaatcctgacaagtagaaatcattagtcccagtctatagataaggaatcgaggactccaaagtcacacagctagaaactggcagagttgcagttcccacttaggcagtagaccctgctgccagtggaccatgccctgagcagaatagagtgactgtacaccagaccctggcccactgaccgtggtgccatccactgccacatatactttgctgcgacttgaatacacctctacgtccaggacccgccggggaccactgcctctgcgccgtgggggctccaggcggcctagggcctcatctgtggggtacaacaggtcatggagatagtctcctcagcagagtctcaccgcttagggtctgcctgccactccagctgtgagatccaaggccccctaccccatccttagcctagccctaccatagtcttgctctggctctgggtcttcattggcttcactgatggctcgccgagtgtccaggatcaacttga

SEQ ID NO: 94856 - DNA, 15771 bp, Homo sapiens
gagatcaagtgtgtgcccgaagtcatataaccaattactaactctactttgcagactcgatgaccttcatattactgaagaccttgccagggggctactttaaatagcaaagcatttactcctttaaaatcatgttgtaatttttaaagttgatttccttggagctttttggggattcacctggtgtggggtatctcctgtctctgtgtgcctggcctggctacagtaactccacattcagtatctaccaagtcttagcccctcacagtgccatgagacccaaatgtctttctgacagttactctttcaacctctacatgtcaccattatgtaaaattatttcctgggccctgacaagattttatctttaataaaactgaattaaaacagcaagcacaggcacaccatttcagctgaccctcctggttcaaaagattagaataaagaagtatgaattctcacgaagagaaagaactaaatgcaaggttgttgccaataaaaattaagtttcatcctgaccagaaacaatgattgtgttccattgcccattttagatatactctccaaatttaatttcctgccctgtgtctgcagtgagagggaacttctatgggggaatgttaaggaggccagaagcctcctacaaaacagattatacaaaaattcctggctgggcacggtggctcacgcctgtaatcccagcactttgggaggccagggtgggtggatcacgaggtcaggagatcgagaccatcctggccaacatggtgaaaccccatctctactaaaagtacaaaaattagctgggtgtggtggcacgcgcctgtaggcccagctactcgggaggctgaggcaggagaattgcttgaactcaggaggcggggttgcagtgagccaagatcaggccactgcactccagtctgggcaacacagggagactccagctcaaaaataacaacaaaaaaatcctgacccggaggcagaaagacactttgtgtaaaaacaaacaaatgaagaaacagcttgtagtttcgagccttaaagcatgatgtagctttggccctgttaaaatcattactgtcccaggattccaggtttggaagtgatccattcagtatcttggaggggaggggtgtctcctgactgcagagggagggggccaggaccatagcctgcacagtgagggaggacagggtggaactgccacctgttccctcagccacaagagaaaagtgagttttccaacccagtgaacacagtgagagacttcaaagtgaacctgactaaagctcgctttgtgctcaaaacacttcccaaataagtgccatctccagattctgtttcaaagttagttgttctctcttccagacatggacccaccagggatgctaagcgactccactgagcatttgtaaaacacaatgttgaagctcaagttggaaaacagccacaccacttgccgacaccacgacgctgagaaattgctcacattcaggttactattagggttgtttaggaccatgatcagcatggtgtctgcagcatacaataaaaatactaccctatgctaagttgctgagtgtggctctgtgccataacagatttgcaataagcagtagcacattctggctattttcaacctcaaagactcccttcctgctctactctgtgcaagaacattctaagagatcttctgcgaagctcttcgctcactttctcttcccccatcctgaggatgttttcctaagcactgttttccctgtgcttttgtcaattgctcctagatgaaggttccttgggtttgcaaactccagaaagaagcatgtcacaatgatcaagagaaaatgtgaactctgtgttaccagtctgaagcaaactacttcaccggtgagtctcagtttcaacgctggtaggatggggctaatagtacccaccccagaggactgagatgatacatacaaagtgcttagcacagtgcctaatgatagaagcacaagtcagtcctagatatgtctgccacactgttttgctggagccaattaacttccgtccagtccacctcattatgccatttgccaagcttcacatcaaagatatgcatgatttgactttgctgcaggaaaacttggtcattttactgacttgtctgtgttccctttggctggtgttgactggactgtgtcaaacaatgttgcttctggtctagattctatcaacttactgtgtgagcactggtaatcttctcttctgtaaaacttggaggcagaatactaggtgacgcttaatttccctctgaacgacgcataagcttcctcagagctaaactttctaacccatgattctttgacatcttaaaaagactgtctggctggggagagactgcccctcctggcactagtcaattcttagagatggcaaaggactcagccaggagcctactttgatatacacactaattaatccagagccatgccttctcaatctggcccatacacccttgcaagcaatattcctctacctaactcatcccagggactgataacagaaaactaaggaccactcctatagtttagagcccagtgaaattatccagactattccattatcaatgctaaacagttcaccctgccctgccctgcctttccctcagaagcatcaataaatgctccgacccaagcccccaccacgctcctgtcttctgcctcctgaccacccctgtgtctttcccatgtggccctgtgtggggtgtcccatgcctcctgtctctacgacctatgactataataaattgtgtctcttctgtggccacacctgactggccatcacatgaaagcatacaaaacacacacagttgtttcacacttgccggcctacaaaacacttccgccttcattaaacctaatttcatcttcaaaaatccactgtgcatttgcccctatgccatacggagaacaaccatgcccacagaagtgacatgatcagctcagagtctgcatgcgcacaagaaagccagctctcagtcctaggtttactgaccaagggatcagtttaaaggactgtgtaaagctcacacacacaattcaactcgggcaagcctccttttcatagattgagggctaagaagcacctcaatgccaaactttgtggtgtaagtcacccaactgcatgcgagctatgccagcatctacagagatggctagacaatgacaaggctcaaggcagccatttcccattgtagaaagaaacatctccaggtacataaaggatctaagcactgttacctgaaagcccagctctgtcccgtttacttgatcactttaacacgtcctggaggaaaagccactttagaagggcatttatcacccatgccctctccctcatttttacttccagagtacactgtgtagaactgtgaaatgcctgattgtgccaagtgtctagagcaagggtgctcaaacttcatgtgtatcacaatcacctgaggacttgttaaaatacgtattgctggtctctgggttggggctcaaagtagttgcatttccaacaaattgctctggtgatactgaaattgcccaggtgatactgaaatttcccaggtgatactgaaattgcccaggtgatactgatgctgcttgtctgataaccacacttgacaatcactggtctagacagagccaccgtattccatggctccttaaaatcctcactgtgggccgcatgctgttctacttttcccttgctaggcgaagggagtcagcactcccttcaccaccacgcacacctagaatcatgaaatagaagtgggatgtttgcccaccatttcaacaatggagaaataataaagcaagtaaattgggcctcaaaccctccaaaagtaggagaagagatgggctttgtaggattctcttttcgagagagattacttggggacaattgggctatttctgagctctccccaacaagtgctaagattggttcaagaagcagaagttagatgttttatagtgcataaacatttccttacaagtaaactcaaagactcttaaaattctcaggtgataaaaacctgaatatatattcttaaggtagatttgttctcaattccagcaggattccttgtcactagcagctgcagagcccatggatacagcaaccatatagtctattatgcacacctagactcttctaagagtcaaagagggcattgttaataattacaaagaaaaaggagggtatgggcataggattagcccaccagtaaggagtgaggaacaaggtgaaatgcacactcaggcatgctacctctgctcttgccttagggagtcacctcacttctactaagttctgtacgatgtatcttggctatgtaggttgggaactttcagcaggtggttgagggtgtgtccacttgcgttctttcctttctgattgtccaccaacccgcaagacaaaagaggaaagatgttttcccagagggctggaaattgcgtttgtccactcatttactctaatcacctgtcacaggtagcccactgccagcagcaaatgctagcttgtttcgatacagtttctttgacatgggcacaggagtgagtcagatgtcaaaagctgacccagacgtgctcattgcctagttaaacatcaccagtcttcatcagatatttgcctcaagctctagtcctgcctaagtcagatgaccaaggttagctttctctcccctggggattgcctactagctcctcctggaaggggcaccttgaaactggtcctttcatgcttctttttcctaggccaaaagatacaaactggcagttgacaagatagaaatggcctggaaaggcaatttacttgatccatatatgttgttggaccattgtgtaaaaattagatgctttcacataaaaatacaaattccagattacactgaaaaaaaatttttttttcaaatcagaggatcaggcaacaccaccaggactatctggtaagggatgggaggcaaggaagagttggagaagcacggagtcgtgacgggagacaggagacaatagggccatggaaactgaaggggcaagagaagccaggtaggggtgtcaacaccacaagtgcccttgtacatgtcaaggaggtatgttggaattttactagctagatgtgtagaagacagcaagggcttaaaaaggaaaatgacaggactaaaattagagagtagactaaacaacgagatgagacttcaaaattaacatccacttacctagtggctgtgaaagttagaatttagctacaataaaaggaaggtaacctttggcagcagcaagagagttgctaatgtaaagaatgaatgtgccagaataagggcacagtcacagcaacatcacagagaaaatcagaagcgttcaagtaggaagtttagggagagaggctggctggagaacggatgggatggtcttgggcgtcaatcagtttcacagccatatcatgcatccaaaggacacggacatcatcagcaggcacacgtttaccaccgtttctagaaggaacactctggagatcaggctgtatttgagaactttcaaagaatccacaaaatctgtgctctgataaaagaaataattttcttgtcaaaaaagtaaactaatattgtttgagcaactgtgataaactagtggagaaaacactttttataaacttaaatatataaaaatataacaaaaagcaccaagcttaaagaaatctttacaaaaacccacagaatctccctagaatatgaatatttactaaataaaaggagagcaatagctaagaagcagacctacatctccaaatgcttgatcaaatttggaaagctgtgggtcaataataaaagcatgaactgtaggttcatacatttatgtaaggtatcgttaagcattttaataagttgctatataaagtcagaaaacaataattgttcgtataatgaattatgtaggaaactgttttaaatacaaatcaaacacatcaagagtatgttcaatttttggtttattaaaacaaaactacattttctgtgtttcttgcaatacactaacaagcataaaaatcaatcagcatttccaagtatgttttgctcacaaaatcgcagttatttcacagtaccttatagtaattcttttcacgagtcttaacatttctttgtacaacaggcaaatagtttaataccttccatcaagacatttcagagctctagacgtttagaaataaggtcaagaatctctttcaaatgcaatcattagtttgtattaaactaaaatgccagacggcaagtctcaggtttctaaaatagttttaaaaaacaggtttacagcccatagtaagtcttagaaacctcaacgataggtcctgtcatgtctaaacactacaactatctgtggataaaaatctgcattcaaacrtacaatactttcttctagatctgaattaaaaccttatttaccccaattcatccatgtattctgatacgttcagtgaaaaagccaggatcattggggctgttctctctatcaaaggaaagagctccgatcacctacattataattttctgtgcttattttctgcaggggaggaaatacacatctattcaacgccacactggacgttacaaaatgcatgcatattctgccccagtgctatctgttcattaccgttttgtctccttaaagaactatctaacatagtgtttcccaaaatgttctccacaggacattagtgagaggttcataagtatcccaaaggagaaaaaggtcctggtgtcaaaatagtttgggcaatgctgggttagacagtttttcactaccggatgccaagcccttactgcgctaaagtgcattgtaagtttccaggtgcaaacttggtttcccagcaacaccatttctataaaacactgatgaacatctcacagagcactcatattacatggagtgctatgggaaatgcttttccccatccaggttactggcaattccacaatttgggcttacattcattgtaatcccagaaatattttctccatttaccctcatgactttgtgaaatttaacagattccagaaggaagactcgaagccrtctcagttaacagttctacacatttcccactagtttttgcctttgtttttcatgcattttcagagtgcacaacttccctcctctcttctgaatcacttaggacattctcattttcaaaaacagactgcagtttcatgttgtttaatattgttttttttttttaacttgaccacagtcttcccctgaagaagggcatgcatttcatgttacagaaatgcgatagagtaaactgtaataaattatttacaagcacctagtttgtttaaccttatgtggaagccatcactgttggaaaacaatgagaatgtatcttttagcaaaacggtgctatctggaagcttcattgtgaagatgctttcgtttttttgttttttgttttcagtcatgaggcactgaagaatgagttgtgctgaaattaactcaaaggtcagcttgtctggatgagcataactttggttgagatttttctcccttaaaaaagattttcaaagcaccagttaattacaaaaagcatgcatatttatcctcacagtgagttaagtggtgagagagctagcaaatcatacatygcattccccaaagcatctgaacgtacttctagaaaacaaaccaaccaaaagggaaaataatgcaagagaagccgtattttctttgcttaggttggcaaagcagcagctctttgcagcaatgacaggcagggcagagtgtcgactgggaagcgagtcccaatcttgaataatggtgagcttgagtaatccttaatttacaatttaaaggatgaaaaaaagagactagtgaaatgtttgcttccccagataaggaacacccaagactccctgggtatcctccaaatgtagccaagaaaagtgttcttctaccctagtcagtaaaatggaatgctaaaacatgatatctcattcaacatcagagctactacaactgacaatgacttcatggtatacatcaattcctataaagaaaaaatatattttaaatgcagaacttgagagggatcacaacagcatagcattattgctatgagtttcaaacatggtatttcatacaatgtgaaatatcaatcagcatccctccctctcccaaaacacacattactcatgagatactatcagtgtttaaaatccaagcttatggaagtacaaacttaattctcagtacttttatactaaattcaaagaatctatgtaacactcatctggaaaaattcttaattccataatatcttggagataagcaacagtaaactgttagaaaacgttttaacattacatgatatttaaaaaatcaccataattaccataataaaccaataattatgctccctgctcacaaaaggcacctaccaattatgaacagaccatttttcataattatttaccactatgtggcataagggtttaggcatataacccataaaaatttgttaaaagtcatggtttttcctcaaagctaaaaatccataaatgcctctaaccattaccagtcagtagggccaccacatgcatatactggacaggttgtgcacggcacaactcgagtgggtaccagtcacctggactggggtgcagtacacaatctgtgtgcagtacagaaagccctcatcagctgtggccagagaactgtattctaacagtctgtcagctcaagctaatcaagttaggaaaactgctatttggttggaggatttccaagaaacagctgtacctgtgagaggcaggtattacctgaggggtggacgaggtacagacataaaacaggaagggttctaaatatatttgctggtcatttgaaactcaatggcacttgtttatatgagcaaaagccttcaacaccagttttctggccaagtttccctagaattttgccagccaaattaacttcctgatgttaactatttgattacaatatctcagttcccgacctaaactaatattgtctgttttcacatagctcttaaaaacatttctaaatctgacagcaaaggacagcacagtgatacctgggtgtgatatatatcagtccactcaatttataaagcactttgggataaaaggtgctcccattaaaaatgtagctactattgacagataaaactgaaaaagagtgaatggatgactcaattatttttaaaggaagcattaaccactaaccagataatataccaacaaattacccagcagcactaagtataccatgtaagattcagttccagaacacagctacatttctgtgtccatcacagtaattagtccttaaaagttgtacttaaaatgtcaatctttaataaactcaaaaataatttattgagatttcatcttgtagtctacggattatgagttgcgaatagaggctgaggtccccccaagtgttatctgcaggctgctgtgttgatgcagagctgggaagatcacagatccatggagggagaaggcacttgtcttccaggagatcacttcgggacagggcaggcctgaccctgcgayggcaccttcaactcttgagccagaagctggtacctacaaggaactcatctcatgaccttcatttgccagcagtgccacacgttacctacagcaccacaaaactcagaatatattctagaagtttttgtcggttgcattgaggtagaaaagtgctgctcagttctaaaacagacactctcttttgtttggtctccttgaaaacctaaagaaaaggtttagattaaattaaaggcaaaaaataaaaaataaaaaaaatttccattaccaacctgacctgtggtgtcctagacctcagaaggcagtaaaggcacaaaaaaccatatcctggctttaagtaaatgtatgcctgggtgtgtgtgagcatgaggtgggagtttccaatgcaaacaaggttttctttttctattttttttttttgttttgatggagttcaaccaacattaactatattctaaaatttcaaccaacataactatactctaaaatgacttagaataaagtcacaaacagtccctcacaaaaggccgctagtatctctatagaacttacattccccatgaatcatgaaggtaaaggacacctgaggatacttctagaaattcttgtaaaaatacaagaaagtaactaaaaatcatatggaataattaagagccaagattgtggtcctaatcccaaaatcaaaaatctgaagtactccaaaatctgaaagattttgaacatcaatatgatgctcaaaagacatgctcatcagagcattttgggttttggattagagacgctcaacctgtaagtctaatgcacatattccaaaatcccaaaaaaatctgaaatccaaaacatttctggtcccaacattttggataagggatattcaacctgtagcaccttgaaacatattgataccagttatatatagcagcttgggaataaatgtgaaaccagtaaaattccagaacattcaaataaatctacactgatgggcttcaccttcaacatagcccaacccatcctacatgccccgttcccaaaaatgcctttatcattaagccagcagaaactgcttctctcggggtccaccccaccacaaaggtagctcaaacagactagatctaaagagaacagaagttgagatagcttttataccataaatggtggacacctaccccaatatccttaaacattttcacagcattcttcacaagacaatatgtggcactctcagctgaagagagagaataaaaccctgtcaaatggttacgctcaacaaatcatgacaatcccagcagccacagtaagaaagtatggggagctaggaagagaatgagggcaagtcagcagacaagggtggggccccacttccaccactggcaacctgtgagttctcagatgacttgctgttaaacctactttgcttacacctactttgtcctatattgaggtaaataagaaagggaaggggaaagaaaagagggtgtagagagagaaatagggagaacagagggaagtagaaatacctaaaacatccattttccaggactgttgtgagaatcaaatgagatagtgtataaatattctttaagctacccagtggtacacagatgattgtacatcagtggaaccagagaaagcacaggcctcgaggttaggaaacaagaattctgatcccgagattacccattaattagcagtgtgacctggggtattttcctcaactataaaatgaggtgattagattagattccttttggctctaaaaagtgattcaagtagtttcagctccaaactacaactgtataaaatagtactcccaccccaatcacacctcctaaaacaaagaagacggagcgctggccaagatgtgcagcaagtgaaacacacactgttgtgggagtacaagtaggtataatcccttggaaactgtttggtggtatctaccaaagccgaatatacccagagcctacaaccaggcaattctgttcccacatacatgctgtatataggggcacagatattcaccaaaagacatattcaaatatgctcatagcaacactgttcaaagcagctgtgaactgaaaacaacccaaatatccatcaacagcagaatgaataaaatgtggtaaatatttatacaatggaacactacacaacaagaacaaaggaacaactatatgcaacatgtatgaatctcaaaaataacgttacgtgaaaaaagccagatgtaagagtgtataactgtatcattcaacttatataacatgccaaagaagataatagtaatactctacggtgttagaggtcaggataagtttgcatttttccaattttctacaattagcaaatttctgaaatccaaaaaaaaaaaaaaagattttaaaagaataaatagtgacttaacataccatatactgcaacatttctttctgttctggttattaggtatttgtgcaacttttgcagatactcaggttctggaacaggaccactgaagttgtgaacaaagatggcagcagagctgtaggcctccagcaaaggcccaaggagtctctgtaagaaggtgataaactgctggtgctccttggattggctcacctgagtgtgcaaaagcaggagatgaagtcatgaggaagggacaagagacacaaggcaagtggacagaggactttctctggagagccagtaacgtgagaagatggccactcacatcagcactacatgaaagcggccccctgcccctcatgcagagaatctctgctggaaacaactgctggctttcaaacacattctttattgtaatcattcacttttttatggtatttgaggcttgtgttcattgaacagccacctagaagaaattttcataaatgaatgccctacttgtgatacgctgtcatcactaaaaatagccgctcctaagaccaggccctccatggtttgaagcctgggctcaacagtcactcaagtctgcagaaagaccaatgggagaccaccaagattatctcactccttctgcagcacctattccctgcctcccctaaatggcctttgcccacagtccagcactgtggggaatgatggccactgtgacggcggtgctttatggccgagaggctctcactgtacctacccaaaacacactggttcggtcaagcccctctggagtgtgaaagcaagatcactgccccatcttgaaactaaactaataccacccaagtgaaaaagaagacaatttctaaatgtcaaaaaagagtaatcctcttagagtattcagaaaagacgggtcattattactaagttctaaaattataaattagacaaaattgatttttctaaatcagggactttttttttaatctcaattttctcctataatggtatttgttttaattgacagcaaagagcttaatatatgaaattttgggagggacagcaagagtgactcaaaaagagcagccaggtcagtggcagctcaatagcaaaactgctgcctcatgaggggtgcaggtgtaggtaaacaggtatgcacctgtgtatttcataaaaggatggtgaaagtctcacctatgacattcatcttcctgacttttcagactctcctttccttttctacttaaactgctattaattcaactcaaacagtttgagtgtctttaccacacagaaggtaccagagctagttgggggattctttagataagaagacatcaccaggactccagctgatctcactgcagcataaacctcaacatatccctgtaatatccaccagaattcttcacccaagtaccttcaggtagcaatctcgctgttcctccccaaagtcactgtcttcatcttcttcatcacttctccaagacaaaggttcaggaagcttcttgtcccactgctgctcagcaagactaggactgatatcttcctggtcatcgtgctaggccaaggagatgatggatagtaaataaatatgcactggcacacaaacaactgcccagtggagccaggacaaggcagtcctcttctctgacccttcctggctcttctctgtttagccactcataatgtcagtccacttcccttccaaactcaaactcagtcaggagacagcaggagacaaaagaaagggcaggtgggaggggagagctaccagaaagaaagatcaaataaaagtacccccacatgttctaaattgatatgtacttttccaggccatctcctctacactaaatctaccaaaattaaaatagaatctcaaaaatgaaaactgcagatgtgcaagctgcaagcatactgataggtgtaacgtctcaacttagcatacaaacttctggatgtcacggaatcaagtcaggatatgttttagacaacacaacttacaaataggaaccaaaatattaaataatcccaaaggacacttattctccccattcttattttttgcttctctacatctgaacatgactatataccaaatgtaattattggtttgtttacttatttatgagactgagtctcactctgtcacccaggctggagtgcactgacatgatcttggctcactgaaacctccaccactccgattcttgtgcctcagcctcccaagtagctgggattacaggcgtgtgccaccatgcccagctaatttttgtatttttaggaaagacagggttgtgccatgttggccaggctgctctcgtactcctgacctcaggtgatccacccgccttcacctcccaaagtgctgggattacaggcacatgccaccatggctggccaattattggtttaaataagttgtagaaaaggtaagggaatgaagagtaagtataaagacaaataaaggaaagctctacctcttacctctgccactgtaagaatgccatactggataaactttcctactgtttcatggcagacttggtaaaatgtctggcaaggctgaaaagaaaattcatttaaatataaatgccaccattttatacttctttttttaaacgcagaaaacatggtacaaggtagctgccaaagccttccattctgttacctccatcaccccactgagcaagtcctgtgattcccagtgcccactgtcttgatacacacacggtcatggacaaagcccaagaaaagacctctgtcacttaaagttggcagagcacccaacactgcaccacctgcaaggggtactcctgagctcaattctctccccacacccacagtgtggaaagccctctgaagactgcttatcagccccccaccatctatttcttttactttataagacaatttctctgcaatagttatcttataataaatactgtacacaaaagtggtgattgaggaaaggcaacattggaataagtaaataaataccagagaaaggacaaggtcaatcttggaagtcttatctgccctcatcccttccatcccaccacccaaggttcatgcaaaacagattccccaacaggaccacgagcacacctcacacaaagcatggcatggagggggcggtactcctaacacatgcactcatctcgtcaacatctcaagacacattcatacaaaagaaaatatcggaattcaaataaaatatgaattctacatgttgatgactttgagaagaaggaaatctactacttaatacatatgtctcatgataaatgcctaaaagtgtttgggtatataatataaatgctcattagtactgctgggcttggttttcctcatttgtaaattgagaggtgttgagcagatgattttcttttttttttttttttttttttgagatggagtctcgctctgtcactcaggctggaaaacagtggcgcaatctcagctcactgcatcctccgcctcccaggttcaagtgatcctcctgcctcagcctccaaagtagctgggactacaggcaggtgctactacacctggctaatttttttttgtatttttagtagagacggggtttctccacgttagccaggatggtctcgatctcctgacctcgtgatctgcccgcctcagcctcccaaagtgctgagattacaggcgtgagccaccgcacctggccgagcagatgatttttaaggctgcttctgactcttaccatctgtggttccatcatctacaggtgggtgtgttaattatttacaaaccactgacccagtgcctcacacaca

SEQ ID NO: 94857 - DNA, 27432 bp, Homo sapiens
cacccgccctttgcaaggtgtgctccaggtgtgtggcacgtggcaaagagtcctcacatttacactgcccttgagaaatgcattctaaaagcagatggagtttgtgctgaatgtgttccaaggcgccccccccggcccccctgctttaatcccctctcaccttgtcccacacctcctcagtgacatccattatgcttccaaagaaagggttgacagcagcattggagactaggatatcgatacctccatgaagcttcacagcctagagagaggggtaaggtctggaccagggctgcagtaagtaagggaggtgcatttacccatgttgataaaaacttccttctgggcaaggagctgtggctcatgcctgtaatcatggcactttgggaggccaaggtgggaggctcacttgagctgaggagtttgagagaagcctgggccatgcagcgagaccttatctttatattaaaaacaacaacaacaatgacaacaaaatcttcctacttaggaactatcgtcaaaataacttctatttcttaaaacatcttttttgaaaactaccctaagatctgccgctaaccatttaaggttggcttctttcttttttagacggagtcttgctctgtcatccagactggagcacagtggcatgttctcagctcactgcagccttgacctactgggttcaagccatcctcttggctcagccccccaagtagttgggactacaagtgcgtgccaccacacccgggcaatttttgtattttttatagagacagggtcttgccatgttgcccaggctggtctggaactcctgggctcaagccatccacctgcctcagtatcctaaagtgttacaggcgcgacccaccaggaagttggccctatttcttttgcagtgttttcttcccacctcctattcttccaaggctgtctctgacgctcttttctttacacttcccctttgggaagctccttcattctcatgatttcaagtctcaccccaaaatctatttccagacccctcctcttcctttcacactgagttccacccacatttctccaagtgcttactgtccagttctccttgaataagttaccattatctcaaagtcaatctgtccacacttacctgaatggaaaaactggcttaaatagagctgtagaaagttaccctggaggggcctttgagatcatctattccagtgtccttaaggtggagatgatgaaacaggttcagagaattttctcaagatcttatagttcagtagtggcacactggggctaggtaagaacaggaggcctgcttattctgtgtttgggaggggtgaagtgatgttttcagggcacaaagctagttagtggtggaagaactgaggtcagtctcccactttgtagcacagagctaattcataagagccctctgaaagtgagttggggtcatcaggaaactggttgcccaggagagccgtgatgggagaagataccagcctgaatttaaagcaattccatatttggttatgatgtcattttccctgtctctgtctctctcttttgacctggaggcatgaaagattcaaggcagaaactgaaatttaaattgagaaggcgaagaaaggcaacatctcacctccttaataagttataagtagatagtgaggcctgtgctagagtaatgaatggccaagcagaatctgccaacaagggttttcagtacaaagccaccctgaaaccagactttccgtttgcccggaactggcaattttgatgccttgggcaagttgcagtacacgggccctcggtcaactttgtgctccggatttggcacacagaggggtgttactaacaatgtacaccatctgctagcttcccgttttaactaattattcttgttaactaggtgctaagctcagttgtttctagacagttgaaggaatgctgggctgtcaatgtgtaaatctaacaaaatttacagtcacataatcttttaaaaccagtattaatactttcttgcaccctttaaattttggtatcctggcacaaagccaagtcacctgccttggctctgtgtaagtctcaccaatggacttgttactagggaggtgcagagtaagttaataagtgatgtgcgccgtgctcagtacacatgtgtttgggctgggaggagacaatggattgctctagaatcacctggagacattttctactctgctgtataccccatactcctctccttccaggtctgtcagcacagagatgggaggaggctgggttttgattgaacagagacagcaaaccataaaagatgaatgaggctgggtgtggtggctcacacctataatcctagcactttggtaggcccagtggggaggaccacttgaggccaggagttcaaaacagcctgggaaatacagccccaactctacaaaaaatttaaaaaatgaactggtgtggtggtgcatgcctatagttttagccacttgggaggctgaggtgggaggattgcttgagttcaggacttcgaggttacagtgagctatgatcatgtcactgcactgcagcctgggcaacagaaggaggccctgtctctggaaaaaaaaaaaaaaggaaagtcttctaagtcttattctaaattgtgtgatcactacaccaaagcggttaggagctgtttgttctgtgttctgatagttatacatttttaagaaaaaatataatcaaggagataggcagctactctggtttccacttacaacaccagtgagaagcttcgtggtgtccagatgaggaggccactgggtagtatccattctcaggaaagtggcttttctcattgcagggtaacatgtggcaactggcagaagacatttcaaattgctgacaagtattctatcattctcctctctgacaatggtcatacaaactacttgagagtcatttttgacttctctatttcccactttttgacatggggttggaaaatcttggttcgtttccactgaatgtctcttgggcacatctattccagtcccaccgccactgctctaaacctggaggacagcaacagcttcctcactgatgccctggattcggtgtctcctctgtatatccttcctaccagagccagattagctttcctaataaccatctttctcttgctcaaaacctcacatggcttcttatttgctacaagggtgtgtaaacatatccttttaagaggccatatccttttaaggtccttaacgtatccttttaagaagctatggccgggcacagtggctcacgcctgtaatcccagcacattgggaggccgagggggtggatcacctgaggtcaggagttcaagaccagcctggccaacatggtgaaaccctgtctctaccaaaaatacaaaaattagctggacgtggtggtggatgcctgtaatcctagctgctcgggaggctgaggcatgagaattgcttgaacctggaggcggaggttgcagtgagctgagattgtgccatatcacttcagcctgggcaacaagaatgaaactctgtctcaaaaaaaaaaaaaaaaaaaaaaggatatggaggcccatggcctctatctttccaatgcagccccttccccagcagtactcctgagcctgtgctctccactgtggcctgacagtgctcctctgtttccttcagttcctccttggctgtctgctcattttgcagagttatctggaacctcatcactattccatctgtccattcccatccattccttaaggtttagctcaagtaccacctctgggccaggcctgtaggccatgttaagtgaacctggtgggggccacaggatgtttttccgggaggattttcacattacattgctacatgtcatatggttagtgctaattgatccagactcccaaacggctccttccaccatcaggatcaaggccccaatcttggggtctgtccatcagcctaagccaagcttttttggactcacatttgtgactttcttggactcatatttggctctttccaatgcacatttgagcatttgccagacagttccttaaaaatggaattaccctattctgtctaccatactactgtctactattgcttaagatcctcctcttctaagattatgcaaattatttctgccaaccttccaatctgttagcagaatcctgtactttccatttttgggtagattctcccttccactctgggaaataaagtgtatgccgtgagcctcaagggaagaggagcttcctttgtgaatgcttcatatttgcttcagcagctgcaaggctggtgtccactactaattctgacatcgacttatatactttctttgagactaaagtccagtacccggtagtccacaggcagccaataaaggaagggagcctgggaggtctgggtctttccttactggctgtgggaccttgggaagttgctccagctatctgagccagggtctgcagactgagagaatagtccttgccttgcttgggttgttgtcaggtctagagataacctgtgtaaggctctgaacacaggaaatggcacatagtaagtggctgaaacatggtgggctgcttcctgaggttcccagggacttgactctataagctgaagaagaggggaatgtttattaactcatgggtgggaacatgtattttgtgattgtatttacccttcacatctgttcaattagattgaaaattactgcagaaccagtaccagctgtttctttggggtactcaagggatgatgcagggttgaagcattagaatgttttaaaattctctgactgagatgggatgattctctgacgttagtatatggacataatagaaaggcacacagtaaaaatgtgctgctgtctaggaaagcagggaaggaggctcaggctggctccgttttccacctcctggctctgtgcccatttccctgcagctcaccgtggccaccagccgctcccggtcctccgccttccccacatggcacacggtgcccgtcacgctcagcccctccccctgcagcgtggccaccgcctggtccacattctgctgcttccggctgctgacgaccacatgggccccgtcctgggccaaacgccgggcgatggcgaagccgatcctgtgagcagaaagagacaaagactgctaaggcctgtgcaggggaagaggtcgacagtatgagctctgaagttaagactgcccgggtttgaattctggctctttctctatataacccctacgtgtgcctactatgtgtaaaacaggcttaatggcatggccatttttggcattcctttacttgtttttattatgacctggaccacagcctcagttcccaagaactgacatcactttctacagttcccaccatgggtgacaggcttcatcccctcttgggactgagaggtgagaaatgagctgggtttgcagcagcagccacttccgtgatttgagggtctcactcagaacagccctgcccccaggtttctttcttactcgtctacatcattctcaaaattctatccttagttattttttggggtgcatgtgaaaagatggtctccggtcaaaaatgtaaatattgccttgggaggaagagttacacattttgcatttgtcagctattagcattttacctacatttgtattttagttttgtgaagagctggcatctagcaaagtcctgtagaaatgaggaccaggatagacaagaatggtgggtgagaaacaggctgggcaaggtcggcccagatgtaccgacctaaacaaaaatctcgacatatggctctggtgtcccatctaggtaagggggaggggttccgggggactttccggtgcccaaatagaatgtctggtacattttcaaagtgctggaggccgtgggatagtattttgaaatccagatttccttggatttccagtttctggtcttcccagacgctaggtggcgctggttgactggggcagcccagaacactggggagactagatcgatagggctgcacagaggtggcacagttgtgccagaggtagcagggacaggagggctggcaagggagggtccagggctaggggattcggagtggcttcaggcggaccacgtggctaccttttttccagggccagactttggcagcgtgtaaggtctgaggacaggggcaccggaggccgaggatgagaggccagtgcctgtttccaggcagccagggcctcagaaactccggccggagcactcacccgtcggtggaggccgttaccagggccaccttattygcgagcgggtcccggygggtcatccyggagctggccatccgcaccgamttccaagcccdggcacagaggcctagcagccycgycttgtgcatggmtcagaccagcaagtatgggttccactcttcccaggggcggtgacagagtagggcgaggggcaggacgaagggcgggccgattccctgcccgccctgctccccgccccggtaccgctgtgagcggtctgtggccctgggcacctccatccgccgcggcgcccctccaccatctaccttccgcctgactggggcttgccttyccgggctggcgggtgagctctccgttcaagttgcctgtagggctcgcccctcccctggcccytgcaggaacccgcaggctttggctgctgcctttctgcatctgcttgcccaccttttcttctctgggaagtgggggttttgagttggttgcttttgcttcttcagaattccttctccaagaaagtctgggtctatgtgtgtgacagcccacaggagggcaaatgttttgagactgcccatggaggtgaggcctgtggtcgccatggagtccaccaggtgaggctggaagagcctgggagagagacgtgatagggagtagctgcgccaggcctggcactgcccttcactctgcccaaggtctcttccatcttcacgggccctggagggcagactatggtcattggccaaacagcattctcatgtccgttgacaaagggacttcctcctttacaggggctaagtggtagcgaggaggctggacagtccctcaagcagtggtggaaatgcaaagaactcggggcactcaagttctccctaaccactctgtccccaggtcttagccgccatcttagttcaataaatatttgttgaatgcaaaatctctttatgaactgtaagctactaagcacatagtagttactgccaccatgtagtgattattattggtgccctgggccagactcttcatctgtaaattactgagggtatggatgatgaataaagtccttgccagctataaattctgtgtccaagacttcagtctgcacttctgccaagtgggctgaaatgatctccctcctgggtttccgggagaatgaagaaatctggatggcttatggtacagtgtagaaaggccscaacagacccaaatgcaagcatctgaattggtttaacccactggcctccaaagccagactgagaagcagtgctggttcatggcagcgttttcactagttcaargcaaaatgagaaaaggaaacaattacagtgagtttcataaagctaagcttatttaacagtcctttattgtggagtatacstttscttctttttgtgtgtgtgtgtgtgtgttagtgttttcttttagaaaagatgatgaaagcagatgggtaggtttagagatgtgttattggtgaaatcaccagtttggcagccttatgccagtccctacaattaraggggaaagaatcctggtttgtgaaatccagttctaggcatgacttttgaatagaattcatgtttgctcaagattcatttagtatatgtgcaggtaagctgagcagctgaaaaagggtttcaacattcaaaagggggtgtatggtgagcaagtaatagaacggcctgcactggaattctagtgttttcctcagccaagaagttacagctgcaatactctgctttgctactcagcagatcccgatgagacaggagagcttcagtataattttccccatgtccagggaaggctgactctgactggtgctcctcagtctgagcctcatgaattattgacagaggctggaagcgccacactgcttgtcctcttgcactgtttggagctaacgcactgtgggaacccttcccagggctctccatctgtgtgtgcggctgggggagggtacacaggaggacggctgcgggggttctcagggcttggttcaaagggacaggcctgcagggggcgtttgatctctctttcccttctcttcagaggtagacaggtggactcaggggctgaggttggcaggaaggtgaggaagactacacttcaaagagcaaaggattctgggaagagagaattgtggcttgggtgcttggtgaacattacatggcccttccttgtgtgggcagggttgctatttggcctctagcactatttcttttgtggagagcacaggggacattagggagggggcctgtgagcagaaaaggatggaaggaagtcaagaagtatgggactctctagcactactcctcatcaagctcgcttattggagataagaacaggaaatcttgggctgggcatggtggctcacacctgtaatcctctttactaacaatacgaaaattagctgggcgtggtcagaagttcgagatcagcctggccaacatggtgaaacctcatctctactaaaaatacaaaaaccagccsggcctggtggcatgtgcctgtaatcccagctactcaggaggctgwggcaggagaattgcttgaacgtgggaggcagaggttgcagtgagccaaaatcatgccattgcactccagcctgggcagcagaatgaaagactccatctmaataaataaataaataaataaataaataaataaataaataacgggaaatctttcagggaaatacatgcatatgtgggagtatctctttgaaatgggaactgtaacaggcaatgggattgttcttacatggaggtggtaacatctgcctatcttgagggacaaatgccttcatgagtgagggcactactcccatccttttcaagggctgcctgcggtccagaagagatttcacctggggtggaatttaagtcttgcgttttgcaatagctgtcctagattgagtcgagtcctgcatcactgacacaagtcagaattaggcaatgtgggagggctggtgtggggttaggacaactaccaagcagagaaagtaatagtaagagtgttaacagtatttattgagcacttccttactaaatgctggcaagcgttaagtgctttttataaattttattgaatatttttagtctggtgaaatgggtgttttaatgtagggagccaaaggcctgagggtcgtgaccaactcagcattccactgaaggctgtatgatctaacagcaaactgtttatcatgaatgcagaatgtgggcaaactcacttctgcgcctgctaccagaaggtttgctgagggcaatgactccctggtgctgtgctccttgaggttatctacaggaacatctggagactactgttcaaagaatgcagtcatgcaagcctgcactaagccaagcagctgactgacaactacccccttctccctatctcctttactcaataaatacaaagggctatagaagctcagggcccttcttcactagaagcaaggagcctcctgaccccttcttccaaaatactcttttgtctttgtctttattcccacattcatcttcttttgttaagtccaccaaggactgtggcattttaacttcttcttctttttttttttttactttgtgacagagttttgctctgtcgccaggctggagtgcagtggcacaatctcagctcactgcaacctctgcctcctgggttcaagtgattctcctgcctcagcctcccaagtagctgggaccacaggtgcataccacctcacccagctaatttttgtatttttagtagagacggggtgtcaccatgttggccaggatgatctcgatcccttgacctagtgatcttcctgccttggcctccaaaagtgctgggatagcaggcgtgagccactgcacccaattaggtgttttaaattctctatgtgaaatcagagtgactgatgacaaccttgaccactgtgtgtgttgcatagttacacttcagttttctggcattgttgggcaatccatagttttcatagaaatcaattttctctcaactggaatttaaactttcaggatcagtgtgtttttcaaatcaacacatctactcattaaattatataaataacacattattttaaaaagggacagaaaattatttgaaaagtaaaaggtaactcttccctatggttcttttaccttcttcccatatagctcttggctttgtgtatccttccagaagtttcctgtacatttacatgcatttttcttttaaaaattttttccacaattgaaatgacactatacatactgtccttcaaatttcttttcttttctttcttctatgctccaatccccactttttaatttctttttttaaataattatactttaagttctgagatacacttgcagaatgtgcaggtttgttacacaagtgtacatgtgccatggtggttttctgcacccatcaacccatcatctacattaagtatttctcctaatgctatccctcccctagccccccacccccctgaaaaggccatggtgtgtgatattgccctccctgtgtccatgtgttctcattgttcaacttccacttatgagtgagaacgtgcagtgtttggttttctgttctttcattagtttgctgagaatgacggtttccagcttcatccaggtctttgcaaaggacatgaactcatcattttttatggctgcataatattccatggtgtatatgtgccacattttctttttccagtctatcattgatgggcatttgggttggtccaaggtttttctattgtgaacagtgctgcaataaacatatatatgcatgtgtctttatagtagaatgatttataatcctttggatatataccctgtaatgggattgctgggtcaaatggtatttgtagttctagatccttgtggaatggccacactgtcttccacaatggttgaactaatttacactcccaccaacagtataaaagcgttcctatttctccacatcctctccagcatctgttgtttcctgacattttaatgattgccattctaactggtgtgagatggtatctcattgtggttttgatttgcatttttctaatgagcagtgatgatgagcattttttcatgtttcttggctgcataaatgttttcttttgagaagtatctgttcacattcttagcccactttttgatggtttttttttcttgtaaatttaagttttttgtacattctggatattagccctttgtcagatagatagattgcaaaaattttctcacattctgtaggttctctgttcactctaattatagtttcttttggtgtacagaagctctttagtttaattaagtcccatttgtctattctggctttttttgctgttgctttgggtattttagtcgtgaagtctttgctcatgcctatgtcctgaatggtatgtcctaggttttcctctagggtttttatggttttaggtcttatgtttaagtctttaatccatcttgagttaatttttttataaggtgtaaggaaggggtccagtttcagttttctgcatatggctagccagttttcccaacaccatttattaaataggaaatcttttccttattgcttgtttttgttaggtttgtcaaagatcagatggttgtagatgtgtggtgttgtttctgaggcctctgttctgttccattggtctagatatctgttttggtaccagtaccatgctgttttggttactgtagccttgccgtatagtttgaagtgaggtagcatcatgcgtccagctttgttctttttgcttaggattgtcttcattatattggctcttttttggttccatataaaattcaaagtagttttttccaattctgtgaagaaagtcaatggtagcttgatggggatagcattgaatctataaattactttgggcagtatggccattttcacgatattgattcttcctatccatgggcatggaatgtttttccatttgtttgtgtcctcacttatttcctcgagcagtgtctgtatttctccttgaagaggtccttcacatcccttgtaagttggattcctaggtattttattctctttgtagcaattgtgaatgggagttcactcatgatttggctctctattgtctgttattggcgtataggaatgcttgtcatttttgcacattgattttgtatcctgagactttgctgaagttgcttatcagcttaaggagattttgggctgagacgataaggttttctaaatatacaatcatgtcatctgcaaacagagacaattttacttcctctcttcctgtttgaataccttttatttctttctctttcctgattgccctagccagaacttccaatactatgttgaataggagttgtagttgtgagagggcatccttgtctcgtgccttttttcaaagggaatgcttccagtttttgcccatgcagtatgatactggctgtggctttgtcataaatagctcttattatttagagatacatcccatcaatacctagtttattgagagtttttagcatgaaggggtgttcaattttatcgaaggcctttctgtatctaaataattaatcatgtggtttttatcattggttctgtttatgtgattgattacgtttattgatttgcatatgttgaacaagccttgcatctcagggatgaagtcggcttgatcatggtggataacctttttgatgtgctgctggattcgttttgccagtattttattgagggtttttgcattgattttcatctgggatattggcctaaaattctcttttttttgttgtgtctctgccaggctttgttttcaggatgatactgacctaataaaatgagttagggaggactccctctttatctattgattggaatagttttagaaggaatggtaccagctcctctttgtacctctggtagaattcarctgtgaatccatctggtcctggactttttttggttggtaggctattaattattatctcaattttagaacctgatattggtctattcaaagattcaacttcttcctgattttctcttggaagggtctatgtgtccaggaatttatccatttcttctagattttctcgattatttgtgtagaggtgttctctgatggtagtttgtatttctgtgggatgggaggtgatatcccctttttcattttttattgtgtccatttcatttttctctcttttctgccttattagtcttgccagcggtctatctattttgttgatattttcaaataaccagctcctggattcattggttttttgaaggtttcttttgtgtctctatctccttcagttctgccgtgatcttagttatttcttgtcttctgctagcttttgaatttgtttgctcttgcttctctagttcttttagttgtgatgttatggagttcattttagatcttttctgctttctcttgtgggcatttagtgctataaatttccctctatacactgttttaaatgtgtcccagagattctggtacattgtgtctttgttttcattgatttcaaggaacatctttatttctgctttaattttgttatttacccagtagtcattcaggagcaggttgttcagtttccatgcagttgtgcagttttgagtgagtttcttaatcctgagttctaatttgattgcactgtggtctgagagacattttgttgtgatttctgttctttgacatttgctaaggagtgttttacttccaattgtgtggtcaattttagaataagcatgatgaggtgctgagaagaatgtatattctgttgatttgtaatggaaagttctgtagatgtgtgttaggtctgcttggtctagagctgagttcaaatcctggatatccttgttaattttctgtctttttgtctgtctaatattaaaagtggggtttatagtttcccattattattgtgtgggagtgtaagcctctttgtaggtctgtttgaactttctttatgaacctgggtgctcctgtattgggtgcatatatatatttaggatagttagctcttcttgttgaattgattcttttaccattatgtgatggccttctttgtgtcttttgatctttgttggtttaaattctgttttatccgagactaggattgcaacccctgctttttttcactttttatttgtttggtagatcttccttcatcccttcattttgagcctatgtgtgtctttgcatgtgtgatgggcctcctgaatacagcacactgatgggtcttgactctttttttttccttttttttttttttttttgagacagagtctcgctctgtcacccaggctggagcgtagtggcacaatgtcggctcactacatgctccacctactgggttcatgccattctcctgcctcagcctcccaagtagctgggactacaggctggtgccactatgcctggctaagtttttgtatttttagtagagacggggtttcaccatgttagccaggatggtctcaatctcctgacctcatgatccgcccgccttggcctcccaaagtgctgggattacaggcatgtgccactgcacccggccgagtcttgactctttatccaatttgccagtctatgtcttttaattggggcatttatcccatttacatttaaagttgatattgctatatgtgaattggatcctgtcattatgatgttagctggttatttcacccattaattgatacagtgtcttcatagcatcaatggtctttacaatttggtatgttttttgcagtggcaaaacaaaaaggttcttcctttccatgtaaagtgctaccttcaggagctcttctaagtcaggcctggtgacaacaaagtctctcagcatctgcttgtctgtaaaggattttatttctccttcacttatgaagcttagtttggctggatatgaaattctgttttgaaaattcttttatttaagaatgttgaatattggtcctgactctcttctggcttgtagggtgtaggaagaccccctgaaactattgctatggaataaaagatgaaatgctcctgattattgtaaatacaaaattgcatgcaggattgtctaaagacaatgccaggttggactgccagaatgaaccaacagcacgygatgtgcttscctctgcagagagcctatkaatggacatgcagtcagggaggtttyacatcaccaagattcctatcccagaaargcagatgttcatagctctgggaatggaatgcggcccttgtggagagcctataaatggatgcatggggggcacctgtccatatagataagatagggctataaatgccctcatcttgccatggctcttctaggcctctttagggttaaggcatactcccttctgaaaatttctggtctaaccggttgtctagcttcaggtcctgtttctatggattgttcgtaaccatcttttgctgcaactgttactgctgattaatatcttgctaatcatgggttatgaaaagactgtgtttctgttttaaggctctgttagaaattactgatgtacacactatattgtaaatccttatccctgtatactgtacttctgcatacagatgttatgttaaagaattacttcatcaccatgtgaccatctcacatcataatcaaatgaccctaaatccctcactaacctacccccatcctcactaaacttaataatagatgctggtatatccagtgcgttgttggcaccacgggaccaaaaggcggtgaccccctggacccagctttcactgtcttgtgtgtgtctattatttctcaacctgctgatccacctgggaactaagagagagccctgttgcattgcgggctgctggccagatcccgcaatagtagggtttctgctgaaatgtcccctgttagtctgatgggcttccctttgtcagtaacccaacctttctctctggcttccctttaccttggtgaatttgacaattatgtgtcttggggttgctctttttgaggagtatgtttgtggtgttctctgtatttcctgaatgaatgttcctttttactctttttgtctctaatcttgtcttctcacttaacttcattaatttgatcttcaatcactgatatcctttcttctgcttgatcaaatcagctattgaagcttgtgtatccttcatgaagttctcctactgtggttttcagccccatcaggtcatttaagctcttctctacactggttattctarttagccatttgtctaaccttttttcaaggtttttagcttccttacgatgggttagaacatgctcctttrgctcggagaagtttgttattactgactttctgaagcctacttctgtcaactctctgtctaattttgttccctgtmtggccaggacttgtattcctttggaggagaagagttgttctggtttttggatgttttggctgttctgctctggtttctcccatctttgtggttttatctacctttggtctttggtgttggtgacatacagatggggttttggcgtggatgtcctttttgttgatgttgatgctattcctttctgtttgttagttttccttctaacagacaggcctctcagctgcaggtcttttggagtttgctggaggtccactccagactctgtttgcctgggtatcactagcggaggctgcagaacagcaaatattgctgcctgatccttcttctggaagctttgtcccagaggggcacccacctgtaggaggtgtctgtcggcccctactgggaggtgtctcccaatcaggttacacaggggtcagggacccacttgaggaggaagtctgtccattatcagagctcaaatgccatgctgggagaaccactggtctcttctgaggtgtcaggcaatgatgttgaagtctgcagaagctgtctacttccttttattcaggtacgccctgccccctgaggtggaatctagagaggcagtaggccttactgagctgtggtgggctctgcccagtttgagcttttttgccgctttgtttacactgtgatcatagaaccacctactcaagccttagcaatggtggacgcccctcccccaccaagttccaccatcccaggttaatctcaaactgctgcacttgcagtgagtaagcctctgtgggcatgggacctgctgagccaggcacgggagggaatctcccggtctgctgattgcgaagaccatgggaaaagtgcggtatttgtgcaggagtgtaccatttctccaggtacagtcactcatggcttcccttggctgggaaggggaaatcccctgaatccttgctcttcccaggtgaggtgacgccctgccctgcttcagctcaccctttttgggctgcacccactgttcaaacaatctcagtgacatgaaccacgcacctcagttggaaatgcagaaatcacctgtcttctgtgtcaatcatgctgggagctgtagaccagagctgttcctattcagccatcttggaagcgactcctagaattttgtaactctgttgtgtagcttactcaaatttttggtttttcagtttttttcactgagtgccaagtatttaagcagttgtttgtgaatactggttggaaatatcccagtatttgcatggtcctagcaggcagaatattcttataaaacaagtatgggcttctctttcccctcatgcctaggattgctttcttctgctgtatttgggaaggggtggtatgggaagggggtttgtctgtgcagttccacagtctattttcaaatagcaggtggctccatcttgggcctcagcactctctggggctggccacttctgggaactccaagattatggcccttacattatttctacatggatgctgagatgcaggctttggggcagggatgagatggggaataccatacttcctgatacagtttggatgtttgtcccctccaaatctcatgctgaaatgtgattcccaatattggaggtgagcttggtgggaggtgtttggttcatgggggtggatccctcatgaatggcttggtgccctccccttggtgatgagtgagttctctctcttttagtgcatgtgggagttggttgttaaaaggagcctgggacctcctccatgctggtactgtgcttgtacagcctgcagaactgtgagccaaataaaccctgtttcaatatgaattacccagtctcaggtattcctttatagcaatgtaacatggactcacacacttccccagctgcctattctttattcctcacaatgccgtggcactaagaaattcactgaagatttgggggcagaatgaatcacaatacagagggacaaatccaccaggcatagcatgcctaatataagttcccattgggtcttttattggcaccagcaaattcctagccctgctttcaaaactgaggtttcctctgtcctccagagatagtccctgtggcagatgtggagacgcaggtcaaagctcaggttttccttctagacaggactcatggcccagctgctgagagcctgattagctgtgagtgtccagctgttaactccttctggtctacttcagcttctggaaggaggttacrttcttctcagggcggctctggccatttactgagcaggacagtgtggtcaaggacctcactatttctgcccaacatgtggcttctctaaaggtcctctttgctttggagctctcaggcatttgtcagacctgcatctcayggtctaacactttcttctcaatcctgcttccttccttttcctttcacaggtgccacttcggataaaccctttggactcctaactccaatcaggtgtctgctttgttgaggactcacagacacagtctcctttcttcaagatctttacaatgcaasacctcactaacacacagggatggtctcccagagggtctgtgctgttccttcactcagaacatcaagatgcactgaagtaaggatcctctattctacagttcctgctagctgagctattccatgggggcttcagcaggaaattccaaggttggctttgacaagctaaggcyggctggtggagcacatcgagttctggaggttcatgtgtgttttcatgaagatctgtctgcccgtagcagataaagagttgttgccccactcctcctggggtcttctattttcctgggaggaatttctggattaactgaacacacacacacacacacacacccttttgaagcatcaacagtaattctgagttcttagggacaatgcagattaaatccacaataagaaagacaactatggccaggtgtggtggctcacgcctgtaatcccagaactttgggaggctgaggcggatggatcacctgaggtcaggagttagagaccaacctgaccaacatggagaaaccccgtttctactaaaaatgcaaaattagccgggcatggtggcaggcgcctgtaatcccaaatactcgggaggctgaggcaggagaatcacttaaacccgggaggcagaggttgcagtgagccaagatcgcgccattgcactccagcctgggcaagaagagcaaaactccatctcaaaaaaaaaaaaagagtactattgatccagaggtgaccagactagcctcactggagataataggtgacattattatgcaaagtggtttcagttcccttgtcttgtttttggaatagtataagaggcctacaatacgaataaataaggcccatcacaagcctcaccaaaggacaaaactaatccacttctgaagaaggctctttgttgggccagatcaaatccttggacagaactgtactcttaatctctgtagtgaaagtggggggtagtttaagaatttattaaccttctaccttgagcaatccctcagaagtaagaggtgtcaggcctctgagccgaagctcagccattgtaacccctgtgacctgcacatatatgtccagatggcctgcaggagccaagaagtctggggcagctgaaaaaccacacaagaagtaaaacagccagttcctgccttaactgattaaccaacattacaacattccaccattgtgacctgtccctgtcctaccttaactgatcaatcgaccttgtgacagtcttcttctggacaatgggtcttatcatctccccaccatgtaccttgtgaccccctcctctgctaacaatagataaccacyttttactgtaattttccattacctacccaactcctataaagcaaccccttccccatctcccttcactgactctgttttcagactcagyccacttgcactcaagtgaataaacagccttgttgctcacacaaagcctgttggtggtctcttcacacagatgtgcttgacaaaagggaagggtggatttgtccttctggttacatatgttctgctcactcattttgaatttaattaaacaaggattgcccttaccttttcatactttgtaagaaaccataaatacttatgcaccatgatttttttaaagaaacactttttattttgaagtaattatagtctcataggaagttgcaaaagtagtacatagagtccctgagtactcttcccccagtggtgacaactgtagtataatatcaattctgggaaattgacattggtacaataccaaatatactatgcctttttctctaaggcatgatgttgcagtagcatccttgtacatgtagctaggagaacttgtactaagcccagataaatagttgaagtacaagggcraggagtgtgtctttgatattttaatagaaatcacctattgccctctagaaaagctgtacccttttccagtggcagagaaccttcctgaaaggcagtcctgtgtaatggtgtccatttcatcacacccttaaaacactcagctttaacaaacatgcagatttttgctgatgtgggagaaaatattaattattaatgatattaaggtgattatcttttcgtatgtttatagatatttgtatttctttttaaatgaactgctcatgacctttgtctacttttatttgggtttacttctttctcatttattcctataaactctttataaaaggaaattaaccatttgattgtcatatgttgtgaatatttttaccattttgacttttgaatttatgtctttttaatgaattgtagaagtttaaaatctttatggaataaatttatttagttttttgtttatggcttctgagttttgtgtcatgattagaaaggcctttcttactccaaaagtataagatattcaattataagatttcctgtagttattcaatgtgtgtgtatgtatgtttaaatcttttggccatctgatatttgtgcttgtgtgggaagtgagatagaaatccgggttagtttttttcccaaatggttaaccagttgtctcagcactgtctgagtaactcttccatgccttggtttctttatcattaccatatgtatttgagcctatttctggactctagttcattttattgatttgtctgtctgttcccaagtcaggattttaatagatattgcaaagaggaaaaagaaagtgctaaaattgccataaaataacttcaaatagaagagtatggcagttcagaggtgggagagagtatttttagttggggtctgaaaaagcttcatgaaagagggacatttaaggtgaagcttgaatgacgagcactacgttgggcaaagggaataaagaacaaagtcatggaggtggtaaatatttgtgcacatttgcatcgtgtctctgcgaaggaactcatgctccaccactggtgtttttatgcatgcgtgtcttgagcacagttaagaggataaagaaattttcatgttactcttttgaggcattttgaggacacatttattaatcataatggctacacgttgaatacctactgttatcccatagacataggggtatctatgtcatttttaattttcaccacaatgagcaaagttgatattcccattttagaaatgaggaaaatgcctcaggcagtttaaataacacctaaaagtggctggattgagattaaaatggatgaccagcaatttaaaaaatcagaatagaaaataccacaattcatcacctatggttagggtgtttgtagcagaagctgttcctgctccacctacgtcacctgggatccctctgctatctctgtgtagaccagttgaatcccagtgtgcattctttcccaaaagccagcatactgttggaaggtacaagagagccagaagtgcctgggaatttatgtcccttccctcccctcatgcctttaaccaatgactgatgggggtggggatagacatactctagctcttttgccctctcactggatgactgaggtgtgacctatgatgttccccaagccctctgagggaatgtatcaaaattgccttccatgggacttggcttgatgttgtacccttacttggcccctttctactcctactttctcccatatgtcttttctctgggaatagttcctaataaatcactttcatgttcatcttcctctagggcagcactgctttaagaagcttctgttgtagtgatgtaggagagagagagagagagagagagagagagtgtgtgtgtgtgtgtgtgtgtgtgtgtgcgcatgcattccgttatcatttaacatgtatttcttagtgtggagccagtttgaaagctctatactggctgttctatactacattaaactgcctgtttgggtatagttcactgagctggaaattcttcttgatgcccccaaataagcactgcagatcagattccaaatcttattgcttatttgagtacagtgacttaaaatacgttaataaaaatctaggctggacacggtggcttacatctgtaatcccaggactttgggaggccaaggtgggtgggtcacttgaggtcaggagtttgagactaggttgaccaatgtggcaaaaccccatctctaccaaaaaaaaaaaaatacaaaaaaattagctgggtctgctggcatgtgcttgtagtcccagctactcaggaggctgaggcaggagaatagcttggacctgggaggcagaggttgccgtgagctgagatcgggccgctacagtccagcctgggtgacagagcaaggctccatctcaaaaacaacaacaacaacaacaaacaacaacaacaacaacaagtgttagttatggctgtaaagaacacagtcaattttgatactattggctaggctggtctttgacttcttgggcagccaaccctactaaacagtttccaaagttcaggcttccctttgccaaagttgataagtgtggtgtaaaggtcatgttagttgagtgttaatttttttgcagactagcagaaacgagaagaccaggtttgccttgtagcagagccagaaggtgtgcctgaccacagggcaggatagtcatgccaggactctgaccctcagcttggcttagatggagagaggcaaggtgtacagaattgctttgcatttacccccaaagacaaggtagttaaaagaagggaagataacacaccacatactcactaccaaccaatgagacctagcaaaggcgtcacacaaatccttgtcagatttgtggggatcctggggcagtcctgactgccagaatccaccggaggccatgagtggagggctgaggacatcatttctaagtacagtggaaatgaaatctggaaggtagtgcaaaggaaagggcaggagactcatcttctcagggaagtcgtgggatccctgccatcacatatgtccgctgatgacccttatttgtcagtgcatgacgtaacattgtctacacgtttagaaaagagcaaaaatatgttcaaaaatctgatggaatgattaagacacaaggagggagatctaaactcatcaaatttaggatgaagatggctgtgagttaagaatttatagggagttgggcacagtggttcacgcctggaatcccagcactttgggaagcagagatgggaggatcacttgaggcaaggagtttgagaccagtctgggccatatagtgagactcttatctctacaagaaataaaaaattagctgatcatggttgcgtgcacctgtattaccagctactcagcgggctgaggaggcaggatgacttgagttcaggagttggaggctgtagtgagctatgattgtgccactgcattccagcctgggtgacagggtgagatcctgtctctaaaaaaagtggaatttttagagtttaatattgtcccaaagaagatccatatgttctggtaggcatgaatattctggacatcccgaaggtgtgatgcagcgtggagagtgggtgcacatcagcatcaccagcacctctgttaagcagaatactgtgcatgggtattaatccctggtggggaattctgtgcgactattaagaatcccagaggagaactctaaacaccttgccagcttctactaaggttcctagatctggcaggtttctagatctggcaggaggttttgcccaaacccagctgccagtgtatgagtttggtgagacagagcacttgtgcaacatgtcaggcaaagcaagtttagtactcccaggcagggagcaagggccaacagaagtctaggatccatgatgtgctggtcccccaaggcttagggaggctgcccagggtggatgcagtcttatctgtatgtgctccactatacatctgatatagtttggatatttgtcccctccaaatctcatgttgaaatgtgatccccagtgtggaggtggggcctggagggaggtgtttgggtcagaggggttgatcccccatgaatggcttcgtgtcctccccgtggtaatgagcgagctctcagctattacttcatgtgagatctggttgttttaaagaacctggcaccttctcctttctcttttgccccctctcatgccatgtgacatgctgcctccctctttgccttccaccatgagtgggagcttcctgaggacctcaccagaagctgaggagatgctggtgctaggcttcttgtagagactgcaaagccgtaagacaaatgaacttcttttttgtataaattgcccagatattcctttacagcaaaacaaaatggactgatatagcaccactactgagggaccctgaaagcattctgctctggttttatacctcagaggccacttggattggtgagccaagcattgcaggctgttctaggaatgacggagacaaagcctgggctattctgggcatttcctcctatctcagaatgttgcattctctgtacattctgcccaagaattgcaagcaaaggagggtcagccaaggctatttgcaggcttgtcctcctgtctggttgaaagatccttcagtaccagccaactctctctcctggttccatgttcactctgctactttctaattattactccaggttggagggatggatgatggacaacaacttttctcatcactggaagggcatgttccccactgaaactgaatccactgttttttgtttgtttgtttatttgtttatttttgtttttgagacagcgtctggctttgttgcccagactggagtgcactggtgcaatctcggctcactgcaacctctgcctccggggttcaagagattctcctgcctcagcctcccaagtagcttggactacaggcacgcaccaccatgcctggctaatttttatatttttagtggagacagggtttcaccatgttggccagactggtcttgagctcctgacttcaagtgatccacctgccttggcctcccaaagtgctgggattacaggcatcaggccactccactgggttttgagaatcagtcaattttatgtgtgtttaggttacttagctgcattcctaaagtctctgaaccagtcagccaggagcttggatatcaagaccttggagggagtttggtgtcagttttcagcatcaaactccctccaaggtcttgatatccaagctcctggctgatctgggagccacagcaggggtcagggccctgtgatccccagcctgaaactggcagtcagatttcacaggcttcagaccacagaggagcactaggaccccaccagaggtggtccggaggctgacctgaaggccctggggatgggctatgcaagctgattgctcactgcgagtagcaagaggtgagtgttgctgggactctagagttcagcagcaaagcgttgctttcacatgggggtagcatgagacaaacctctgactggagggggcagcaggggtggaaaggagatgggcggtcagtttctggtttgcctgctgttcccgaagagttagatgagaaagagacttttgggctgtttccaggaggagctctgctaaattccagcagtgaggaggccccctccccactcagtattctgtttctgtccaattttcaaggtgggtggttcccatgaagcatagcagggcaggatgtgggggagagctttggctcatagtgcacaagtattaaatattttaagctacatgatattcatacagtacttcaacataaaccttaactgtaattgttgcaaggatacaccattttcctcccaagcagattctaattaatcaacaatatgctgatcaagcatctgcaggagaagcagtgtgctaaacactgtagaaaattaaagatttacagcataaacttcatctttgcactgaaggaatttacaagctagctgaggaaataggacgcatcagtgaaacacctagaaaacaactgccaaaaaaagcactaaactaagtgggattcatcagcacctcttttccacccttccactgcatctctcccacagagtggctcaaccttgccccagtcggcagaactctgggaccacgaggcagatcatatgaatcttccctccagtgtcccactctttctttatcccatggaacatagtcactgttggtaactagttcctctgcaccccttcactccttcccacagggctcagtggactgagggtgggggagtgtgagggtgatgaggggagaagctggttttgtgtggatatatccagaaaatggacactgcaaaggcgatcatgctagataaaaataggtttaatttcttcggttgtcttctgctaaaatggaatgggtctggttagttggaggggtcagatatctcttgttaaattgataagcatc

SEQ ID NO: 94858 - DNA, 15539 bp, Homo sapiens
  misc_feature (1)...(15539): n = A,T,C or G
ttcctgccaaaaattcacaacctgaatctaatcttgaggaaatatcagacaaacccaaagtgcacatcattctacaaagtacctggcctgcattcttcaaaaatgtcaaggtcacaaaaaaggaaaaaccaaggaaccgctccagattgaggaagactaaagggaaaatgtaactaaatgcgtgcttcatcctgattggactgtggaccaaaraaggaaagggttattgtaaggatatttttggagtaaatggcaacatttgaatggggttcgtggatcaaatggtagaattttatcaatgctggtttcctgattttaagtactgtggttatgtaggagtgtccttgtttttaaaaagtatacacttaagtatttagtactaatgggacatcacaattgcaacttagtaacaaacagttcaaaaaataatgtgaatacatagctagagagtggtatggaaaatatggcaagatgttaacaatagaagaatctaggggaaggatatacaggatcttttgaactattctacttttctgtaagtttaaaattatttcaaaatagttaacaaataagacaagtagtatttgagctgttaggaatttgtcacactgagatttttgttgtttttgagacagggtctcactctgtcacccaggctggagtgcagtggcgcgatcattagctcactgaagcctcaatctcaagggatcctcctgcctcagcctcctgagtaactgggactacaggcatgagccaccacacctggccaatttttctgatttttaatagagatgagttctcactatgttgcccaggttggtctcaaactcctgagctcaagcaatcctcctgcctttagcctcccaaggtgctgggattacaggtgtgaaccactgtgctgggcctacactgatttttatactattagaaaaatctctacttaacggtttcattatcttaggtaaaagtattcaatagaatagctgaaataaatgtgaagcttttcttaataggcagtaattagataaaatgaacaacattctcaatcctcctcatgccacataattctctccctgcaagtttgtctcaaaaaaaaaaaaaaaaaaaaaatcacatataagaaaaaccttaagaatttgaatttggtttttccttataactgataaagaatttacacaatctctttagacatttatgttttgatatttaaatatgaaatttcaactataccatgacctatgggtgaagttggaaattatagtaaccttataacttcgtcatcatctacataatttgatactttataaaagtataattccactacttgtattttagttatagtctgatattaaatagttaatgtaaaattaaaaaatcaaccacggtagcaaatgtttgtcctgagagggtttttaaagtcctttttcttttttagggggtgtgggggggtcatgtagtaacaagtggcaatgccacatgaggctgagaccacaatgtgtttctaaaataatttacaatattcctaacaagcttattaaatagacctgaagagaaatgaagttccaaaaatatttaaaacaagggcagtggcagcacccttggaataaagtttcccacagagttacgtctgatagttttgactgtacagtatgtgcttctttttgtttttaacataacaattgtcagagaaaaaagaaaacacctatgatacattggatattaaagtcaacataacctcagaaaatgaggtaggaaggcctcacgagtcctttatatattctccacttgaaattatcattatcaaaaattttagtaggatcatggaatccttaacaatttcacaaaaaaagcacatacatttttggttctctttgactatatggagagagaaagagagatggattcattcattcaagactcagtgcagtctcaacctccccaggctcaagtgatcctcccacctcagcctcccaaatagctgggactacagccaccatgcccagctaatttttctattttttgtagagacagggttttaccatgttccccaggctggtcttgaactcctgagttcaagcagtatgcctgccttggcctcccaaagtgctgggatcacaggtgtgagccacggcgtccagccacgaggagagatttcaaactctccaaacttctattttgctctttggaatcccattttgacttcaagagctaaaatgaaatggagtgaataatgaacgaaaagcaccaaaaaatagagctgtgtgtgcatgtgcgtatagtggtggggaggaaaagggaaaagccaagaagataccctcacttccagcaaagccctgggtttttaaattttggtaatttttggtattttcccataaacacaaagtgcttcaagtgagacaaaaaccaaagaggaggtaaaaaaataaacatttgcttggaacttgcccacgtgggaagatttgaatgttccttctctagccgctccccctgcccttttttttttttttttttggagacagagttgcgctctgtcgcccaagatggagtacagtggcgtgatcttggctcactgcaacttccgcatcccgggttcaagcgattctactgcctcagcctcccaagtagctgggattataggcacccgtcaccacacctgactaatttttcgtaattttagtagagatgaggtttcaccatgttggccaggctggtctggaactcctgacctcagatgatccacccgcctcggcctcccaaagtgctgggattacaggtgtgagccaccacgcctgaccttagttcccattattgaatccaaattcattctacattcattctatggttaccagaaaaaaaaaaaaaaaaaacctgcaattaacctctcaatcactgaattactacccactgtttataccctttaagtgataatcagtccatcaatattttaaaggacaataatcttctgataaaactctagactcttacattaatcaaagaaaagtacagaagaagataagatttactctttctcccccgacctttactggacacagtatagaatagaaatcaatctatttctcagcatgccactgtcctaaataacagctgccattcttagagaagataaactgaacatatcactcctaagcaaagtgaatgtacactagggaaccaaagcaataatgcagtgtagaagcaacaatggattctctaagacttggttccaatcccaactctgcctttaaacagctgtgtggatctcaagcaaatccctttccttgtacagggtcattcattcaatactaaaataagtgggttgaattagatgagctctctagtccctttcagcactaacattaaaagactctaagttataaatgtcaactgctttttacctcctattaaaaatgagtgggcttttttgcagaaattggtaagctgaatcttaggctgagtatggtggctcacgactgtaatcccagcactttgggaggctgaggcagccgggttacttgatgtcaggagttcgagaccagcctggtcagcatgatgaaacctcatctctattaaaaatacaaaaattagcctggcatggtggcacgcgcctgtagtcctaactactctggaggctgaggcaggagaatctctcgaacccaggaggcggaggttgcagtgagctgagattgagccatagcactccagcctgggtgacaaagcaagatgctatctcaaaaaaaaaaaaaaagaaaaaaaagaaatcgataagcagaatctaaactcacatgaaaatgcaagagacccagaatagccaaaacaatcctgaaggagaactaaagttggggaactcacacttccccaatttcaaaagttactacaaagctacagtaatgaagacatgtggtactagcatagatatatagatcaatgaaacataatttcaagtccaggaacaaacccatacactcatgggcaactgattttaaacaggggtggcagaaaaaaatcaatgaagaaatagtcttttcaacaaatgatgctgggacaactggatatccacatgcaaaaaaatgaaactggacccctacctcacaccatatacaaaaattaatgccaggaatggtgactcatgcctgtaatcccagcactttgggcagccaaagtgggagtattgtttgagtctggaagtttgagatgaccagcttgggcaacagagtgagaaactgtcttcacaaaaaaattttaaaaattagtcaggcatggtggcacacacttgtaatctcagctacttgggaggctgaggtgggaggactgcttgaggccagaaggctgaagctgcagtgagctgtgattgcaccaatgcacacaagcctgcgtgacagagtgagaccctgcctcaaaaagaaaataataataatgataataattcaaaataaatgaaagacctaatgataagagcctaaactgtaaaactgttagaaaaaaaaagagtgtaaatcttcatgactttagatgaagcaatggttttttagatagaaaaaaattaagtgtaaaccttcgtgactttgaatgaaggaatagcttttaagatataaaaccaaggccaggcaaggtggctcacacctgtaatctcagcacttttgggggccaaggttggtggatcacttgaggttaggagttcaggaccagcctggccaacatggcaaaaccatgtctttactaaaaatacaaaaatttagccaggcatggtggtgggtgcctgtaatcccagtactcaggaggctgaggcaggagaatccctttaatctgggaggcagaggttgcagtgagctgagaccgcgccactgcactccagcctgggtgacaaagcaagactccatctcaaaaaaaaaaaaaaaaaaaaaaaaagatataaaaccaagcacaaagaactgaagggaaaaaaacaaactggactttatcaaaattaaaaacttttgtgcttcaaactacactacgaagaaagtgaaaagacaagccacagaatggaataaaatacttgcaaatcaatatataatggtttagtatccagaaaatatataaaaaaactcttacatctcaacagtaaagataaacaaattgaaaatggacaaaggatatgaacataaacaaattgaaaatggacaaaggatatgaacagatattactccaaaatatataaaaagtcaataaacacatggaaagaggctccacatcatcagtcattaaggaaatgcaaatcaaaacctcagtgagacacttcttcacccacactatgatgactaaaatttaaaaagggagtaataaatgttgtcaagaatgaggagaaaatggaaccctcaaacacatgctggtggaaatgcaaaatgttgtagccactttggaaaacagcctggcagctcctcaaaaggttaagcagaattactgtatgatccagcaattctaattcttagatatatatccaagaaaattgaaaacatatgtacatacaaaaaaaaaaaaacttgcacatgaatgttcagagcagcattcttaatagccaaaatttggaatcaactcaaatgtacatcaacggttgaatggataagtaaaatgtggtatatccattcggtggaataatattcagtcacaaaaagggtactgatacatgttacaacagtgatgcactctgaaaacattatgctaagtgaaagaagtcaaacataaaagttcatatattgtattattcaatttttatgaagtgtccagaaaatccaaattcaaggagacagaaagtagattaatggctgccaggggtcataggaagggggcatgaggagtgactggtagtgggtatggtgtttctttttggagtgatgaaagtgttctgggattatatagtggtaatagttgtacaactctgtaaatatactaacaccaatgaattgtacactttagaagagtgaactttatggtatgtaagttgaatctcaattttttaaaaaagccaaatggctcaccttaaaaaattgatttcctcacttctgtttcaggccacccaagatatttctaaaaatatagaaatgtttacaatgatatttgacatttataatcctacagcaacaaatactacaatcaaatttcwttttaaccaaattatttgcagatatcagttgatagtccacgttatacctatacttgcttctaaataacaaagatctgaaaattccgtctacagtcataccaccctgaacgcgccccatctcmtctgaaaattccactgagttcatgatttatctcatagtcatctttaaaatttatattttctgaagtaattgaagctaaaacaaagtcttcatttgagaaattttagtaatattgtcatctagaaacaggtaaaagtattgctcttgcaatgattattatttagcacagccatcttaaggcaatactttaaaatttaattcctgttcataggacaaggtgaggcaagaaacaatttttcagtattggtattcatattagtctgttctcacactrctataaagaattgcctgagactgggtaatttataaagtaaacacgtttaattgactcacagtcccacaggctggggaggcctcatgaaacttacaatcatggtggaaggggaagcaaacacatccttcttcacatggcagcaggaagaagtgccaagcaaagggggaaaattcccttacaaaaccatcagatcttgggccaggagcagtggctcacgcctgtaatcccagcactttgggaggcycaggcgggcggatcacctgaggtcgggagtttgaggccagcctaaccaacatggagaaaccccgtctctactaaaaatacaaaattagctgggcgtggtggtgcatgcctgtaatcccagctactcgagatgctgaggcaggagaatygcttgaacccaggaggcagaggttgcggtgagccgagatcgtgtgccattgcactccagtctgggcaacaagagcaaaactccatctcaaaaaacaaaaaacaaaacaaaaaaaaacacccatcagatctcatgagaactcaccatcacaagaacagcatgagggtaaccaccaccatgattaaattactgcccactgrgtccctcccacaacacgtagggattatgggaactattaacacaattcaatttggtggggacacagccaaactgtatcagtattacaatacaatatgcaaaccagatgctttaaatcataaaacaaattcagattttcgttcccctggaatataaatagcattatagggcttaatctatacagtaataagagtttaagtgaaatttttccaaagcactaaaaagaaaacatactctttatatttgccttttgtaacattgttttatctggttttccatatcaaaagtctgtaaactttgcattaacactataatctacaatagtagctttataagcatttgaaatagaatgaaatagtaattcgagtctgatattactgggttgttccacacatagttaaataagatcgatccttccaaaaatctaagggtaggctagttgtggtgattcatgcctgtaatcccagcactttgggaggcctaggtgggtggatcgcttgaggtcaggagtttgagaccagcctggccaacatggtgaaaccctgtctctaccaaaaatataaaaattagccaggtgcagtggcatgtgcccgtagtcccagctacttgggaggctgaggtgggagaatcacttgaaccctggaggaagaggttatagtgagccaaaatctcaccactgcactccagcctgggtgactctgtctcaaaaaaaaattaagagtaaagaagagggcttaaccatttgagaaataaacatcaaggtctgccattctaaaaaagcattaatggattacaatagtttcaatagtttacatggttttcactctttaagttcaatgaaaattgcatatattgtttttactcttgaacacagtggttaatactatatcagggtggttagtcacaagaaagacgcaaatacagaaaggataaccttatccaacttcagtattattttagtagtaatgtgtataaaatccaaccactgcttgggtgaccttaggagacagcaagcctaagagatgaaamcatttacaccttttaattaaattacactgtcaccacataaaagtgtgaggttcaacatttgttttcttaaaaacagagcactaaacagtttaacacaggacctaacttacggctaagatgtttctaaaatgtatgcagaacccttaagactatactgcatcaagtagttcttttgaattatgtatactcaaatgatggtgttataatttacattgaaatgccacaacaaaatcttgataaaacaagatataggagaaataaaaattaatttctgaaccaaatgtgtactaccttaccctagagtaaatcactgggaaatacaggcagaaaacagacatcctgcctgtgaaaacaattgcatattcaaactggagagagtcatagcacgtatgcttttaaaagtaagtttcgaaaaactgttttatcagttttgttttttttttggagcatgtcttttctaaataattctcacttatcattccagaaaatataacaaacagtttgtaagaactcatgcaaaaatgtttctctaaggccataaattggtttgctaagttgcattgttttattcaagtaaaaagcccttctagagaacaaggagtctgtaaagaaaaccaatcaccttcaactcttgggcctgtacacctgttaggagctctatcactctgaaagccaaaagatagaatgctcatttgagcatttgcaaaatgttctctatttatatttttaaaaatctgatacatgtaagkttttctggcagattctttttgtatgttacaaaacaaaacatcaaaagctcagagtaagataagaatccctttttcttagaaaggtcaagcagatacttcttgacatcatgtcctttatacaatggcatattgttcatataaaaggtctcttatcctataaaaatcttgacaaaggcagccttctaatccaatgcgtccagtttccgtctagaaaccaaataaaaaaaattctttagtacrttttctattcattaatatgcagacataataaccgaaatatatgaaatagattactttatgattggtcaggacatgggttgctctgattcacagcatatggatataatattgaagtcatgaattttacatagacataaatgtcagaagattcaaataattaaaatttacaataaaattatatatcatttcttcaagagtctttcataagccttcaagtcaataagacttctgtaagcctttgaggtcatgatcntgaatatamattactgatcttcagttttgtgaaaataccaawcaagaattacagaatttcaaaatgacaaaacatcagacgtatgtgttcaattcagcccttattgaaaacacacttactctgcggactgctacttgattgttgcaaacaagtacacctcctacaaattcagcttgaatcccctcccgtaagagaacttgcttgaagtctgacagccttggttcattcataaaaactgactgatgtccaggaaccttagataaggtcaaaggggaaagaataacttcaagtaaaacaccagacatacaactgtactgaataaagtaaaatactacattatctctaagagattttctattattccctgaagtcctttgacagatcatttcaagactgtaaatcacattccaagttgttattctaaattttaccccattatttaacattatttaacaaagcccttcacattttctgtttcacaatcagttttgttagtcatgcctcatcataacagagacgtttggtaatgttaggctcttcactcacccacttgcataatggggtcaactagcgtgccatgggcaggactgaaccaaaaattcattttctagatcccagtcatttgcttacttcaaaagacgtttcctccccaatcccattttccctgtccctccttcctcagagcaaatgtaatggatgccataggttctacaatcagtaacgaaagtggttcttgcctaatgctgctgctttctgctttgacattactttgaagagcattagctttagcacagaagaaaaaaatattcttattcctcctcccaattttgagggttgtactagaagggaatccaacaacagaggctgtctctctattcttaatttcatagtagggctgaagacatcacttgacatgcatgtaggattcatagttttaatatttttccaagtttaattacctagaatcttgctagttaactagatacctctcaagaatatgtaaatgctagactaaattatatctatacttaaagatttctaactatatcaaaaccaaaagttatttgaactgaataacataaaaaaatggaggtatgactattggctgggtgcattggctcacgcctgtaatcccagcactttgggaggctgagatgggtggatcacctgaggtcaggagttcaagaccagcctggccaacatggcaaaaccccgtttctactaaaagtacaaaaactagccgggcccagtggctcatgcctgtaatcccagctacttgggaggctgaggcaggagaatcgcttgaacccgggaggcggaggttgcagtgagacaagatcacaccactgcactcaatcctgggcaacagagcgagactccatctcaaaaaacaaaacaaaacaaaaaaaaaacagtatgactttcttagaaaactataaatctcctgactggaagcaggcaggtgatcctcacaatcatcaaacttaaaatttaaaaatccagaccaaaaaaaaaaaatcatgaaacaattatgtaccttaaaagatttgctaaagatatgtcattccttagctatatagaattaatatatacacagagacatacacacagaagcatgtcacaagttctcttttttaaaaactccaaaatcagcccaaatgtgagacatattttatgttcaagacagggtctcactctatcatataggctagatgcagtggcacaattgtggctcactgtagtctcgaactcctgagctcaagcaatcctcctgcctcagccttctaagctgagattacaggtgcatgccaccatgccgactaggtttctgacagggtgtccctataatcaggctgatgtagagctcctggcctcaagcaattctcccacctcagcctcccaaagtgctgggattacaggcgtgagtcactgcccccagctgacatatattttaaatggttaaaaatataaaaggttccacagacccacttagttttagaaggggggaaaaaaaccaaaagacatgaaaactagaaggatgacaaattcaggaagaaatcaaaaaagcacatgctttttttacctcatgaggtggcaagggttccaaagtaggaatgatctcactttcttcacctgtttctttttcatcatctccgaacagacttttcatggccttttgttgtgctataacgctagaatctgagggagcttccacttgcatctctgagtcttctccatcatcctttagttctccttcttctaaaataacccctgtgtccactttggaaactctcatatctaagacaccatctatccaagctaattcagcatcttttgccttacaaaactgaagagagctgacaagtgagtcttttaacctcacctagacatgcaaaggagggggagagaaataaaacccacagaatacatattaacaaattaaatataacctattatcattttctacctctggtaatatgttaaaattggaaaatctttcactcatctgagtcccacaatgacctgcaatgacctcattacctgcagatcattgggcccctgcctactttccaaaatagagattcttaaccctgactacaaaatggaatcacatggcaattaaaacaaaaagtatatcagagcgtcatatccagtgtttctaacataactggtaagattaagaccagaaaaactgagtccctctgaccctcacgaagctccccagatgattcttatgtgcagtcaaggttgagaaccactgatcactcccatcctctagtacttggcatacttcagtaggtactgaactgcttgtcctttcctgaatataccacagaatttcacatctccatattcttggaaggttgcttcttcttactctgcccagaataaatttcctgcctggtatgtgcacatccatttcttccagatatagacatcactctggccttaaactgacaccatctcccattaccagacaaaatttatctctctactgtgctagtcctatatttggtatccatctccatttgttccaattaggagtagaaccttgatatccgggaattcttctaaaacttttgaattcttaatcattttcctcacctctgtacttttgcaaatatggttccctctgcctagaacgctcttccccccctttcctactctgtctgtcctgacaacccatctaaacatcagttaggattagttatcacttcctgtaggaaaccttttctaaacctctaaatgtgggtggtttcccctcttgatactctcatagcatcctgtacttcttctctcagtggcacaacaacatgataaatggtatttccttgttctaagccccataccctatgaggtctgctagggcaggagaccatccatgtctgtctcacacatctcggtatttctaatgttatctgtcctaacctgcaacaaaaagtacttatttctactcaatggcaactcctggcatgtttacctggtagatgtgagtttcactagtggcatcaactgtttcatgtagctttggcatgtacactttaatatctttcccaccaaaggcgcgacagcactctgccagatcttgactggcctctggtgggccatggacgatgatcaactgtcgtggtttcatctgattaatgatttttttaatggaatccccatcagagcgtccttcatagtctatgtaggtaacccgggctctgtaattagatatgattattcaagattacttttctcataattctaaaaaaaaatggcttttatcatgtatacaatatataacactaggatttgagaaatacacatgttatagtatctgtatgatttattttatttttgtttttatttttctgagattgggtctcgctcttttgcccaggctagagtgcagtagcatgatcttcgctcattgcaacctctacctcccaggttcaagtgattctcctgactcagcctcccaagtaactgggattataggcatgcaccaccacgcagggataattttgcattttcagtagagatgagatttcaccatgttggccaggctggtctcaaactcctgatctcgagtgatcagcctatctcggcctaccaaagtgctgggattacaggcatcagccaccgtgcccggccctatctgtattatttagattttatctacacccaaaaatatatactaaatgatattactggacaaataaaaaactttgttctctgatgacttaaaagaaattccaaaatgatcacttactggtattatttaactaagtagaaagcgggagaaaaaaggtttctaactacttcagatcacaacagtattttccagacattagggtcttagagatgtttaagttaaggagtatattttatgaaacaagcagttactcagaaaaattaaactgtgagtcacattattccctttcacctgcttacagaataaaaaggccaaaaataatttttcttcatataaatgtacaatttaatgttacaatttaagcaccccccaccaccaccaattcaattactttggcattcaaataccattaatgaagagaaaatatcatgccaccatacttcacaagtctcttcatacaaaaataaaattttaaaagcacaaacttactaaagaatattcagaaattttgcttgacataatgtaaattatataattcaaatgcttgaaattttatcttataatctattttcaaaatgtcacaaaagcacttactttatttcaatagactctgttgtagaaatacatttagtaggaacatcagataaatcctgatccataggttcatctccatttgtcaaaccagattctaatttgcttttttcttcttcagtagcttgaagctctggcactaagaaatcctctggtctaaataataagtctctaattagaagcagtaaaaagcaagctaatactacataacatatatgactagtaggtggcataatttttggagtcctcacatatctcaagatttaaatatacatttcatccaaagctgatgcaatttcatatcaattaccagatggctgtatgtattgcgttttttggttttttttgaggtagagtctccctctgtcacccaggctggagtgtggtggcgccatctcggctcactgcaacctccgcctccctgttcaagcaattctctgcctcagcccccagagtagctaggattacaggtgcctgccatcacgcccggctaatttttttgtatttttagtggagatgtggtttcaccatcttggccaggctggtcctgaactcctgacctcatgatccacctgcctcggcctcccaaagtgctgggattacaggcgtgagccaccacacctggcctgtatcatgtttttctttttttattttccacacaggatagtagtgttttcaaatttgcaattacaacatgtgattgcagttgtttttctaatagtcagtatagattttgtagatttttccatgatttcactcatgctatctcacattcctcttaatctcataaaacttgtataatacttaagacataatccattggaaatgcaatcaccagccatccaaagttctttttttttttttaaagatagagatgggggtctcactatattgcctgggctggtctcaaactcctgagctcaagtgatcctcccatctcggcctcccaaagtgttgggattacaggcatgagccaccacacacagccccaaagttcttcctatcctacatcttcctctctttttaagtgggggaaaaaagtcttgatcacgtgatcatgtttttaaacctttacacaactaagtcataaactgccagttttctctcaatattctctagatgtttctcagcatctctatttttatgtttcaagttacaagtcttctgtgtcttcaggctgaggtactcagaagctaaccccatacatgtgactagaaagatcaagtgaaagatcaaattcactgaaatgaaatgataacacagttaatacctccaatttgtaagagagaaaagtttgttttgctcacatacttgataatctctccatattcatcccatttaattctttcttctggggcaggaaacataggataggacttttttgcctgtttgaaaaaacttcctttacgactg

SEQ ID NO: 94859 - DNA, 13607 bp, Homo sapiens
tgctctttctcccccttaacctcagagtcctcagttggccctacacccccaaccctcagcatcagtacatggggtctaggcctcccccacatctggcacccaccctcccctccatctcatcccccactacccctaaaaacctcggccttcctgcctgtatccaagtcacccgccacccaggaccgtctccccactcctctcctgcagcactatagcctctgctggctcctggactccctaattggacttgtgtgaccatctgggagacaggtagggtactggactttatgccacagggtcctgacgttgaacacactgccctgcacaaaaccattctggcccattgtgatggcagccagccaagatacactgttatgaataactcagccatacattaactgagattttgtgattggaagagtattggcttactatgttataattaatattataacttctgacctcagtttccattgctgccttcatgaagtaagacacttatttaagcttttgtcagagaagaaatctctgggtagtggctaaatcttgcaccctttaagatacaaagccatctggagaatcaaaaatcccaactgttaccagaagagctttatatgttagtgtggcataataagaaatattggtctttattcatggttcccagcacagagctcctaaaacccttgacatttcctgactgatagaaatgtttttgttattcaaaatgagactcttttgaccacacctgaacttatgcaaatgaggcccaggatggcctcaagatgggactgaacaccagaaagaccaagtgataagaaggatagaacctccagccccacccaccaactctggtaaagaagaaggaaggggccagagattaagctctgtaaaaactcttgagcaagatttgttgagcttctggggtgataaacatatcatgtgccaggagggtggtgcactccacctccacaaggacagaagctcctgtgcttgggaaccttccaggccttgccctctgtacctctgaatctggctgttcatccatattctttataatatcctttacagtaaacatgagtaaagtgctttcctgagtcctatgagccgctatggcacattatcaaacctgagtagggtgttgtaggaacccccaatttgtagccgagtcaggtagaactgtgggtaccctccggatccacaacttgaggttgacatctgaagtggggcagtcttggaaactgagcccttaacctgtggggtctgtgctaactctgggtggtgtcagaatggagttgcatcattggaaactcagttggtgttcacagaagactggagaagtacatagcatggaaaatccatgcatttggtgtcagagaaacagttacccatttttaaccttcatattcaaaattccttaaatcccttatcctaaatatcttcgtgtgtgtgtgtgttgttcaaattgtatcaacatctacactaaaatcaaaagtgacaagaatgagattaggtgcataaggatttggaaagaattaaattaagccccaaattaaattgtttaaagttgatttaaaaagcagatggtgcttcttatagagcaagccttctgggatttatgaaacaaaacaaaacaatttctatctaacagggatggtattaaaaccctccatcttggtctcagaattggacagaatcatcactgacatctattaaaataagaaccacctactggttcttattttatctaggagcaaagcaagcaactatagctcgcactttgtaagaatatgtcctcctcactaagaagtgatgctgtcacaagtggtacatcacagtcctagccccagttactgagtgctcactatggatcaggcaaggttgcaggtgtctccctgtgtttatccattgaatcttcatgctacagatgagaaactgaggcaaggagatgtgaagtcacctatgcaagctcacacctattgtcaccagagtccaaggttagggtcacagatctttttggaaatctgaagaaaactagacaatttctttcttcctagggaaaaaacaaaaagcccagaacacagaattttatatacactttctgaagactcacaacacgctccctgccggtccccctgcccaggtttgggatatcactaatgtggtcacaccaggtgacaacggcacaaggggcggcagggaggttcttggaaataaaggaaaaagaatcctcctcaaacataacattggcctgtaaggacttatggcacaggtaggaaaagtcagtttaacaaggcaggaagactcccagacaggaagccctgatgtaaggaaacactcgatctgaagaaataacacatccgtcagatggcggggttggtcagaaatggaaaatgcaaagacaggttcaggaagatgaatgccgcagagcagctgaagccgtgggtccaccagctgcgaggcctgcgtccactcaggagcctcccttttgtctgctcccaggacatggacatgctggccacagggacagatttcccactacagattcattagtgagttaattaattacaaggctttcctatttctgcatcaacactgtgaatatagtaacacgatctgtgttcgttgaatgagtaactggagaactttaagctttctcatacatgtcagtattcacagacaagttcagtcataaagaaagaaaaacttctgtaacacgaaaatctgcttagtgataacattttaccttcatatctggatccatctggatatataaaagtgccttgaccgtgctttttatttctaacatattctccgatatatcgagcaccatttttaaatttgtagatcccctgaaacacattgattatatcattcatatcattgctgaatgtagcatttgctaacagagtattaaatagagaaaaccatccagtcaagtcaacggttctgacctggccatgtcttttaccgaattcgtagctcccttcgtaggtgtccccgttgggtagccgtgccctcccacgtccgtgcctttcgcctgcctcattccgacccccctcatattcctgggtaatgaaaattgacacaattacagctaccattcattaagcgctaaccaggtgctaagcattttgtaaatatcatacccttgagtcatcccactatgctaaacccccggcactatactcaattgtcccacctttcccaccttaaagttgaggtaggtaacaacgcctgggctagatgaggcactggaccaaggccacaccccagcacatgtccagggcggaagcctcgttccctccctccaacacagagcttgcaattcattgtgataatcctttaccctgtaagcaaggttaaccaatttgtgaaaaatgctagatactctaagctgtgttcttagtaggaacatgcttgaaatagtacatgcgggtagaacagttcaagtccacacaaatacctccccgtttgcttccttcagtaatccaggatttcaaaggcaaatgcccagagagaagcaactcttccctcaaatgatccctggggcggggtgtggcctgaagagacctttgccctgcaaggaatttccgatggaagggacaggttggagggcactgaggagtacacagggctcccttgctgattaagtttatcttatttttaagacccctagcaagagacttaaggttcgaacactcatgacccaatgctgcaataattatgtatctatctgtggtttgtttttgtttttgagacagggcctcactctgttgccaaggctagagtgcagtggcacaatctcagctcactgcaacctccgcctcccaggctccagtgatccttccacctcagactcctgagtagctgagactataggcatgcgccaccattcccagctaatttcaaaatttttttgtagagacaaggtctcactatattgccctggctggtctcaaagtcctggactcaagcgatccttggcctcccaaagtgctggaattacaggtatgagccaccatgcctgctcaattatgtgtctatcttaaaagtaaataaataaaaaatgtgatcaaagcttgcaattttcctatccttcagaaaataaatgttccttagcacctaatacatgggtatagagtgaatatagtaaataataaaatgctgaaagcatccagtaatgatttaacatgggtatctcataacatcacactgtatttcttaaatatacataataaaatttattaaaaattaaaattaagaaattgaattggatgtatatagacttattataacacaagtactgacacactacattgaggacttcagaaataaacgtctgtgcaattcttgcccttttctagcactgtttggaccactaattcctgcctagaatataaggtaaaaatctgcgacctcacagatttgtttcagggttagtttacatcaaaatgtacaaaagtcccctccttctatccaagaggcttcccaatacacccaacactgagccgctggggtggctgaataagacagaaatcctttaaaatgaccccaaatgtgatctgaacctaaaaattataggcactaaaaagttacaaatcagtggggccatttgaggagacaaactagaaatcttgctggtcaagtgttgcaggttgggttcacctagaaacagaccctgaacaagtgatttttttttttttttgagacagagtcgctctgttgcccaggctggagtgcagtggcgtgatctcggctcactgcaacctctgcctcccgggttcaagccattctcctgcctcagcctcccgagtagctgggattacaggtgcccgccaccatgcccggctaattttttgtattttagtagagacagggtttcaccgtgttgcccaggctggtctcaaactcctgagctcaggcaatctgcccacctcggcctcccaaagtgctgggattacaggtgtgagccaccgcgcctggcctgatttttttaagtgctctcctgggagaaagtagtaaagagggcagggaagtagacatgaaagggcaggcagctaaggaaggatgcctttgcaggtgaagtcccagacttggcctaatccaacagggactctgggggcatcaatcgcactgcagactttgtcctgcttcttgcactagctactggctgtctggccggatgtgaatttcaggcacttctggctctccatactgggcaggtagttccagcgcacagaggtgatagcttgagtagcaaatcaggcggaagctgggagatgagtgcccagagctagcaaaaaggtctgggcaggcactgacagcaccactgcagagtcgctagatttttcagttaattctgaaagtacctcaactctgtactgtgcatgcagaccatagtggctgaggttccctatctgtcagccatggagaggtcactctctggagtagggaggaactactctctgggtgatagaaatattcccacacagaacccagctcacaggctggatgtgccctctttctcctctctgctgcctaactcaggaaataactccaaagacctgggtcagttcagatggggactgaagaaagcacatgtgaggatacgcctataaggtaatatcttcaggaaccctctcctgagcccagggcctcctcagcatttcttggaggctgccaggaagcaactatcctccatgcatctaaatgccgggggagcaaatctcagctacagaaatgacttattcaagggcagtatggcagcgtgggatgatctgctcatccgagaaaactgcctcgatgggaattaacacagggaggaggaaacttccaaagccttccgctgggaaatctttgcctttaatgggaggcaggatgggggtgggggaagaacgaggcggcatgtggtaaccagacgtcacagcgtttcacttttcaccatcaacttccaggacgcacgcaggtgtgtctggcgtggccttcgtccctgccggggatcctggggagctgtggctcagacctctggtttctgcgcctcctcactctccaaacccaacctcgaggttcccccgccgctgcgcaccctgggaagccctttctcaccaggagctctcaccccaatatcattctctccctcctcctccaactcctccgagcccaggtccgacatggtctcgccccagcctggatcacagccgcagcgcctctagcargtgggtagcaaccgcctccaccgccgcgtcccgcgtcgccatggagacgcggccggtcccgcctccctcccagcccggaagatggggagcggggacaggcgacgcggacgaagcgggaggagccactggcagcctttgcgtactgtcatagcaacgggaagggcacctcgaccaatcaccgcccgggaatacggaggggcggggcggaagggacgaggtggagccagtggcagcactctggtgccgtcatagcaacgaggggscgcttcggccaatcactgctcgggaagcgagggggcggggactgggcagggcctgagcgggttctgtgcctggctgcccaccggctctctgacctggacctcgccgtcgctggcccctgaaatccatcacttttgtcggctgttctgtgacgccacaacgaggagccacctgggtactgggccctcaagaggaaggacgcgggaaacgcgtccgggccaactctcgagagggtttcacccctgcccagtgcgggcactgcccgctcccttccgcccccaggcctcgcaggcccctccggggrtgctgcccacccccacttacctttctaggctctgctgacccttcgggattcgcggctagctgtgatgtgtccgccaagatctcttctcttgtctgtaaacaacttcactctcaaggaggcagctctggcctctcagcaggtgcggcctacagygatgtccgtccgggttttacatccttcccmgacctcgacatgagtcccagccccctcgggcctctgactctcaggtgtcccctacgatcgccgtcctctcctctcgctcctggctcccctacactgtcacacacccacacaatcacagacgcacacgcatgtacacgtgcaggcttggaaatctgctttacctgacgcactccgcctgccgaaggcccctcacatctcccatttcctctgccatcatcccagactgcaaagctgtgttatttgttgttgctgcaggagctggggaggagtgactgaataactataggatttggtcttgatgggagaatcccagaagccaaatccacgcggtgaataagctgctgatcttccagagcacacatcccctagagattcttcccaatgctaatatgaaaggttacaaccataacccatcatcaggcccaaatatattacttactgaataaatacacaagttacaacaacacacgagattccaaaattatgtcgttttttagatgcaaagataaaaatgttgtaaacaccaaaatttaacagcttttcttatggggaaaagtggggagttagggataacagatgattattattttcttctctacatattggcagttacccagttactacaattaagcatgtcctatttttataataaaatgccagaagcattttaaatgttagaaatctagaatggtaacataagtatatgcaaataaatactcgttttttacatttaaaatgtcagaaatttagctttcaaatttgtcctaacaatgacagtaaccagtgtttactaagttctgacactgtgtgtgggcactgttttaagaattttatgagttatcttattaaatcctcactatcattcctccattgaacatctaaggaaagggagttatagggggttataaactaaaaataacctcctaagccccaccacagccaactgaatggacccctcttggccaagagggccccagaaaccttaaaaactgcgttctcagccatgatgggaagggaggtcgaacatgcctcactaatacccttgtgcagtttagacacaacaactaacaagcattaatgttaaaatagagatcataagactgacagaatggacgctgtggcagtaagataccaacttacaaacaggacctaaggccatgccaggcatgagttaagtcatgcatccctacacttaaaagaataaactatattttaactacctggagaaggtcttatgactcgtgttttacatcctgtacttgagcaaacaatcttactgtgaatctctcaaatcgtatcatgagttcctcagactgttgatgtactaattaatacgtaaactactgacactgaaaaggatactgatttgtttctgaatcatgacgtttcactgattgtcttgtgcatatgcagaaaacattttagcctgtatgttgtcatctgtagccaatgactgtaacctctatattgtccctccaatgaaaaaagacaactgcaatatgaggagtccccttcccattcctcaactttcttataaaagcactgcaacttgtaacagactttggaacacacccaactttgttggtgtgtcttccccattcaatcttcaaatttggctttcaataagcctttatcaatttccgcctcaacagccttaactttggtcgacagcagttaagatccttacccaagatcatacagctagtgggattcaaatcaagccagctgacccaagagcaactgttgcccatcactatactgcctcccagatctgtgatataaagaaataactatagttttctggcagtgactaaaccatctaccaagcagaggaccactagttcaaatgccttggattgcaaacaccagagagtggcttaagcaaaccacatggttaagcaaaccctgttctggatcacatcattagcagctagacgtctagctatagctattaaatcctaaggtttacaatttgatttctatcccatacgaattagccagggtcttccctcccaaatctttcagtcaatctatagtaatttcaccacactgtgggtttggcaattatccaaataattgacaccaaaggcaagaaggggtgaacaacaggatgggcctcccggcatctcctgcagcagcacctggactggattctaaattcctccttccagaaagaagctgcatcccagcccagatccagctgagagccacagctgccaagaggcagtcggagctctgggcacctctctgtgcacccaggaagccccaggaggacttcatcaagccaagtcgatgcctcactcagagccccaggatccctgactcctaaccccacagtgacctggaaatgcctggtgatgccagaagcagcgctttccaattctgaaggccctcaaaatgcttgttcagcccaccttcctcctttcctggggcgtgggagtggtggggagatgagaggcagaaagatgaggacatcatcaggaggtttttccttactggaaaatgagaggaaatcctctttcactacttaaaaatcaaaaggggctgtccatattcctctggcaggggtctcccatcatcccccgcgaggcattcccattatcccctgcggagctttcccatcatccacagaggcccttcccataacccccaagtgggaagttcgcgcaagtgcggctctgcagggaggagggagggccgaggggaaggccctcgagagagtggagggcaacagtggccacggttcctctgtacttcgtttcttccgtaagaaatgatcttcttgtccttcttaagtataaatggagcgatccatttccttttacccattaaccccttcaaaaagaagaaaaacagtcccaggctggccatggttgatctctgcaggggcgctggtcagggtgccttctgcttcctggtgggatggcctaggccggggaaactgttgaaaccaccctggggctgccttctgtattttccacaaccttccaggcccacctcccagctggaggccctgcagcttggcagttgccatggcgactgagtccctaagtgtgtctcttctgagctctcctggacagtgtggagaaaaggccttaagaactgaggggcttcagtaaaatgcaaacagattttttttttgtaggcactgttcagataaaaagcagggactttcaacaaaatgagttcaggtccatcttaactatagaactatgaggttgtttattagaataattgtactctggtaaatttaccaatttcatatatatgcatatttataaacaaacatattagagtatatagatagaaaaagttctatctacatgtagaatcgaaaactttttaaaatagtgttggtagtatcacacattgccatttagtggatagagacagacccgagattggagccctagctccgtatacttctttctgaagtcagtctactcatctgtaaaatgggctgttgtgaggtcaaaattagatattcataatgagagtagcatagtgcctagcacaaagtaaagcacttagtaaatgggagctattactattaattgtactgctgttaatcttacaataggttaagcaccttttgtctatcagtatgtttgggggggaattttaactcaagtttatcttaatcgttttcagtcgtgtttttttcttgaaaagaatcaaactgccaaagatgattctgtcagttgtttgtgacaatcagaagttagtctgtgacgaacagattagttttaatgctcatattcattagcactaatatacataagggtggggagagactgaagcttctggaaatatatagacaggtagattcttaagcgtaagtaggtatttgaactgtttgtggattatgtctcataaaattggcacccagcaaggaggaaaatgccagatacacacacgcccatacctgaggtatgtaggtcaatggaaggctattgaaacacagttgtcaagagagaaatgtaaagtatttttcacccaggaagtgagattattcagtgatgcatcaaaaccagtagggaaaacagtttagtggacaccagtgtggagacgagatgtcagaaaattggatagactcgaatttcacgttgggtagcaactcaaggacatagctcagtgcttggcacatagtaagtgctcaaccaacacaggtttatcaaattaaatgttagatattattttgcaacagagctgtgctttatgcagcagtaggaaaagagaaaaattgacgtgaaattttttctttttcttgtttttttattcttaaatcacactccattttccgagggctctctcaggatatcagttgcttaactacgtctgagtgtcttctaggtcgagtactaggggattacaaggaaatgagaaagaaattacagacccattggggggcaaattctacattaatctacactgttaaaaaaatttaccagggccgggagcggtggctcacgcctgtaatcccagcactttgggaggccaaggtgggtggattgcctgagctcaggagttcaagaccagcttggccaacatggtgaaaccctgtctctactaaaaatacaaaaaattagctgggcatggtggcgggcgcctgtaatcccagccactcaggaggttgaggcaggagaatcgcttgaacccgggaggcagaggttgcagtgagccgagattgcaccattgcactctggcctgggcgacaagagacaagagtgaaactctatctcaaaaaacaaaaacaaaaacaaaactattatgccttctggctacatgttaatccttcattccaaagtggaggtcactctttcctactggtggatatgtaaggctggttctagttttgatgctgcagatagcctcactctaaccagcagttgtggtgggagatcctgtgctacatggggctgtacttttcaaggtctaagggtggatcagattttctagaaaagggacagggaaaaaggtggcatgctgaaccacgtgtccatgattttcccagaataaggctccccctacccaacttacaggaaggtcatgatcaaataagataacgaggatgaaatgatttggaagtgctatagaaatgtaacgtgtatatttagctcaggttttaaaatcttttaattatgtaacatttgatgcatgcaaaagaacacatattcacgtatgccagcaaagtaatacagtgaacacctgtgaacccctgcccaaagtaaatagatgaatgagtaaatgaaataaatattaacatctgaatgcatagatctttgtccacatctcaaattcagctctttggattgcagctttatagaattgagagattgctgagcctaaatacatgttgctgcattgcctccgagaatggccggacctatccccactctcaccaaaacagagtgtgggactcactgctccctcgcctactgtaagtcctatttttcttctttgctaatctgatggacaggcagtgtctcatagtgactttagtttgtattcatattttctcgattatttgagaagataagcatttttccccaaatgtttattcttcacctatgataacccttgttaattatttagattagttttttgcaggccactttcatatatctgtatatgttgttttctctttctgaaatgtgatgcccatgtttctctacctggtgaacaatttgtcaactttaatatcttaccagatgtaaccttcctagggatgctgtttctaactgctgccggccccttcttaccatctctctggttgtgcttctgacgcattccctacacaactggaacgtgtttccaggtcagcctccctaagcacctcccaaggcctccaccccacagtgtcgcacagaacttgacacataccagatgctccaattattaaatattactgagtacttttagaaaattgggaacatacaataaagtataatgaagaaaataaagaaaaccaataatctcacttcccaaagataataactactgccattttggtgtgaatcctttcatgcttttaaaatgcatatatatgtctatttaattgaaatcattctatttgtcacttacattatcacatgtcattatatggtgcacatgtcaaaaaaaatttccaaagtgttttaaagacaatagtatttcaccttaaggatataccaaaattattatgtcacaaatgttggataagagaatgaatgaaaatctttaatatgaagttgaacaaggtaaggggtattacttaaggaaattatactcctttttttttttttttttttgagacaaggtctggctctgtcatccaggctggagtgcagtggcatgatcacagctcactgcagcctagacctcccaggttcacgtgatcctcctgcctcagcctcccgagtacctgggaatacaggtgcctaccaccacacctggctgattttttgtattttttttgtagagacagggttttgccatgtcgcccaggctcaacaacatgtggatcaagagatccactcacctcagcctcccaaagtgctggaattacaggtgtgagccaccacacccagcctccattttgtttttaagaaaacaatgtgtcgggtgtcttttctcagtatgtcattcactcatgtttcttgggt

SEQ ID NO: 94860 - DNA, 12565 bp, Homo sapiens
aagaaggagggggagcagatttaacccaaagcctctgagatacactaatagtctctggagataaacactgttgagaggcctaatgcgtgtggctccaggcccgcttgcagctggaatgtcggctgggcacttatctgcagtcccctccctcccctacctcctcagagtggactccttcaccgcggctccagcaggtcacttctgtcattgccattccctgtgtgcagaatcaaaccaagtgcggcagttcctgtgacaacaagctggctagaccaggggccagaaagcaaccctctcattctgcctttcctgaatcttagctaggaagcatttttaatggtttttgctaacagcagttaggctgaattaaaaaaaaattaagataaggtaattaggcaggtgagaggaaaaggcctaactctgaggctgagaggaaaatggacacaagtaaaatcccattataatgattacctttatagacagagggctttgtaaaatgaagttatttcctgtgcacagaagcagctgggccgcagagtcctgactaccctgacagaacaaccacaaagagcactctctgggctgggcccacgctttgcggcacagcactctctgtagcaagcactggactgaaagccgttggcactgtgacggggagaaaagctgagctgcttacagttcattgtgcagttataaaatagcaaacatcaagaacaattcacatttgcttagctttcacaacatccatctgctcatctgtgtcattttcttcaccctgccatcctacctcacttaccccatgctggattcccgaagtgggccggtcagacacctatgtgggacccacacctctcaccgggcatctagaacaattagaagttcttttacactatctgatttttaaaaagtcaaagtagttgtggggggaaaaaaaatcagaatcccatggaacatccttagagttattttatgttttatgtctttgcaggaagagaggaggcatcacaatctcttcagtgctcaaggccccctggaattcttaatctggccctgtagccaccacaaaaagcacaaaatgagccagacaccacaaaggggaaaaggtacttcccgacatactgcatttccttgcttggtggagcactctgacccatgggctgcctcaaatgcacagtgttttctatagctaccaatctttaaatctctctcctccaaaatatattgggccttcaatatatgaggctgcaggatttccatttcaaatcttggctcagcggcttcctctccatcttgactaccatctactgagccccaggaagggcttttgcaaaagtatcctcagtcaaggtgactgggtgactaaagggttggtgctgggtatttgatgtcttggctcagaagggaatatgttccgtgcaacctgcctcccttcaaacatgtatccttcatccatttccccgcttggagggtcactggtgttaacaagctgcgtcttcaaaggatgatcagattgatgcttcactacttaaaaggcaaactgttaaattaactagggagggcaaagagagtgtgggagggagcaggtctagggtaggtggagccctagtggagaaagaaggaagtggaggagaggaagtagtaggtgagaggaggcacacaggcttggaaggacaataaaggcaggcttctgcaatttactgactttccaatatcttggagaacctgcagcacactggtaaatgatcctaaatgtatgaccctgctgttatgctgcctcaagctccagtgggtctttctcaccactgaatgaactatgacttcctctgcaggtggctcatccttgcacgtgtccccaccccactctagactggctttcaggcctgtaagcctttgtacaggctcttccctcttcctggaaagcatattccctcctcaaagaaactggtcatgacttaattctgtagactttcttctccaaagtcatctgggaccagtttggggtaagttaagagagcccacagccctctgaagataccctgctaaagctcttagatcactcaatcatttgattacctgcctgcctctccccaaagaccctgagacgtgatttcctgagggcactcactgggttttagttatgtttgtgtctctcgatgcctggcaaacagtaggtccccagttgacacttgcatgatgaagcaattatggggaccagtttataaaggtggtgatctaaagtgatccatctttgggggctcaaagattaagtgcttggcaataccacagaagacgggaaacctttttggccattttttttttctcagaagggctctttataactatacatgtcccctaagataaaaacccagatgagagatatcccctctgtgaataatataaatgacaccattagtacatctcaaataataccatctgcctatgtcctaatctccaggtattttcaagatattctaatggctagagctctgtctggttctgtctttgcaaactggtggttcttaaagtgtggtccctggaccaggggcatcagcagcaactagaaacttgttagaaataaaaattcccagaccccaccccagcccactgaatcagaagttccaggggtagggcccaggaatctttgtgttagtaagctctccaggtaattatcatgttctctgaagtttgcaaaccactgttttagactttagtgagaccacaggtacagtctcattatttgatgtacatattcatgtgaggatgatgaaatatagattcataaggacatcaacctttccacccaggcagtacggtctaagtgaacattctgcaataatggaaatgttttacatctgtgctgttgatagtgtaactactaggtacatgtgcctttgcgcgtttgaaatatggctaatgggactgggtaactgaattttaaagtttagtataaatttaaatttaaatagccacttgagcctagtggctaccacacaagacagtacagctctagaagatgacttagcaatataagaccatattcaacccagttcctaaaatcccagcaataaaaatctgtttaaaaatacattctcttagattctatcacctgtaaaatagaaggtacctatgttcactcatttgttcattcaattaagtatttgctgcttatctcaagttggttctatcaaattaatgtttggaaacttttttgaagtagtttaaagcattatgtaaactagtagtattctttctgtataatcttgacaaggctttaagcatatggtttgatctgcaattaactgggattctgggggcagtaagtcatgttgttactgtgtgccccacaatgcatctttaagatttaaagtaaaaggatacactgtaatagaagccaacctcaaaaactgccaagggaacttctctttgtggttatacatgtctttcagactgctctgttttataccaggttctgttggggtagaaaaggggtctcattttccaagacaaatacgtactttcattctgctacctaaacaagggatgagctgcccttagctgtccatcattaatgagtttgtatacaaatgattaaatctgtattatagaaagactataatcaacattaaaaaatttattttaggccaggcgcggtggctcacgcctgtaatcccagcactttgggaggccgaggcaggcggatcacgaggtcaagagatagagaccatcctggccaatatggtgaaaccccgtctctattaaaaatataaaaattagctgggcgtggtggcgggcgcctgtagtcccagctatgcaggaggctgaagcaggagaatcgcttgaacccaggaagcggaggttgcagtgagccgagatcgcaccactgcactccagcctgggcgacagagcgagacgccatctcaaaagaaaaaaaattattttaaacatgactattagcagtttagccaaatccagactatccttaaacaaataagggctcttgtctgaatgtgcactcttaagtgaggacttttgaaaagctctttttctctagcctccggggaggcaactccagcctgcacatgctgaggctctcttcaggaggaaactgcctggaagtgtgacaagggcctctagccctcagcaagaacctgggccctaggacaacactgcacaacagtggtgaccaagttctccatggcctgggactgaactgcccataccagtctcctgtactacctgtccctaaggctgtaatacttggccctgactctggccctgtctgggtcttcccagaaagagaaggttcttgttgcttggtgccaggtttgaggaagttgaatagggttcaggcactcctgccagggatgggggtgtctccatcagataggcaggtggctcagtgcagggacccaagtgctgaagtggggctacacccttgaggaagggggatactccccatgcacagcctaggaagtcccacactgtctttcatggtctccacctcaaatgtctgcacaatcactataaaggtttgagggaaataagagggaagaggacagttgtgttaagagggagagggaattggggtcaagtcaggtgagctccaggtggaactaaggaagaggaacgtgaccgggagcaggagggctggtggtgtgcaggtgtgctctgtgaaggtcaactataaaccaggatgaacacgcagatgtcatctagcccagggatgccaagcccaggctttaaaccctcccttccctcatccactgcaaacctcaccaaaggaccccagcactctttcccaccaggctgcaggcgcctcagtcttcaaaataacagccagaggacaaggctgcatcgctcagcttacaaaccaaacaaaatcttccatttcctgatctgtgccagttcctccactgtatgaaggaggactcctgaatgataacaacagcatacagatcccaaattgagccctcaccatggtccagcaccttacaaataacaattcatttcatcctcacaatgactccaggaggggagaagattattagccccatgtgggagatgaggagacagtggcagaaagaggctgaattcagccgcgaaggatgcacagctcatgagcggtggggtcgggctccccatccaggcagcgccgccggcttccttgctcaccaccgctttgctgacactgcctcccacgtggatggggctctggttttaggtttatcacagaacacacaagcacatacgttttagaatatggtatttgtagattcattaaaatctgacatttacaggatattaaagccattctaagagacaatcatggtaaaggtgtaatcgcatttgtaagcttgccaaattggagtgtaagagcttttatgaaaagtttcagaaatgtggcttacagggtaacggtttatggtcaactgccttttgatctctcatgtgaaaaatatgtacttacatatattgcaggaaacctcaccacttccttcctaagtgtcggtcaaaaacactaattacttgactaattagactgtgaaacttcccttacacatggtaaaaatgagctattttcaccccacaaatttagttgtgacataccaccaaaaaaatgtaggaatctttcaatagttttactatagacagtatgaacgatttaagcaaatcatataaaaataaattagaaactaatgaaaataatctgccctttcataagaggggaacacaggaggctggctcgtgagatgaaacccctttgatgggagactggaggccagctccaggtaccttctccccgccccatgaattcgttagtcctagcttcgtttgtgattttcatcatagcttcaggtactttctttatccacctgtagtcacaggtaggcagcactgcttccttttttttctcccagacattccctacaagggaaagtgtatgtcatgtgcacccaccagccaggatgacacggtctctctttactctgcatccacagaatttcagtctgccacatcagcacatttgctaaaagaattaaygtgggatggaatggaatcgaaccaagtgctacagctcagggaggaaatgcctccttgaccgagtgtgctcatrtgagactccacatcgyrggacacttaccagcatcgaggctgcccgtggccgctgtccagcccatgacaggcgggatggccccaaccacagctccgacccatgtgttggcaatgctgatccttttcagtggtgtgtagcagcaggtatacaggaaaatgttgaagagccccagggctcctgtgwgtggattcacccccaaggtcagaatggcaactcchggaacagcacaacaagtggcaaaggacacagctagcaaygggctggaaaaaggcagagaacstggagtgatcatctccaactcaactcaatcayactrcctaaaatcggcactgacaaagtacaaataatccacctatccagtagaggcagyactgatctggctgattcctggatatggggaatcctctttatgaaacaaacttayaataagaaagaatatgtttgtgggagctctggctgctcttcttgattttgctagctaagagtaaagtggttaagagagtcaggattagagtgttctggattcatataggttctgtcccttcctggctatagggcagctaggtttcacttactcctctctacaagagaaatgatcatcttttcctcctagggttgaagactgactgagacaatgcctcctgcacagtgttccattttatatttagtcatgaacaaacaacttcagacacaatattggaagatttgggcagaaaatactacctgaattctggaagctgttcttcccctgtatttatactttattaagacatcacttaattagtgatcatgagtagcaatgatgtgcctctgactgccatcattacaacgtctgtaatgaattacaggctcagcatgctaccggttcctgacaacagtaaacaccaggtggccgttgtgtagtaccagtgctgtaacgtgacttatggacacgggattttcaaggggaggtcgcacagtgttatttatgcaaatgaaacccatcatctaaaactctacaatgataatgattattataagcctgtttctcaaaagagccaacttctaaaagtagactttgtatagaatcttgtgaaaggctttttgagagtctagataaattggatctactagttcctgcttatatgcatgtttatttattctttcttgagaaacctaaggaggttactcaagcctgccttctcctagcagaagccataattccacttctgagtaagatatgtttgtgtagtgttcagtgaccctgctggattacagattccacaacacgtttcttagcaagcaagagtcaccagtgtgcagcttctagggtgctctggttttaaaaacagccaactccctagagaggcagactttaccctatgtgcacacatgtgagatgatacccttctatgcacagggttgcagtgttcctatggcaggagagagggcctgtatctatgagagggcccttctaggaaaaagactaacttgtagaattatgacgagttagaatttagccgggagggggccagaggagagcccagcagctggaactacagtactgaatgaagtcagggcaacagaatatgaaagctagaagtgacttgatggagaattctggccaccactctaccactctgctataggggccagcactgactctttcctacctggcctgcagcctctgtgcccaaagagtgacccaacagaatggaattttgatggaaaatgagaaaatataagggatatgttgctgtcaaggtgcctgtgacagaagaactataaattacagctgagagacttctgagtgcacattctgccttgaggtggcatttccacccacctgttcctgggccatctcttctgaaccctgtggtcagttacttccacaatactcactcaggcaccctcaataatccattctgccttgtccatccaacattcccaccctggatctgctcaataacctactgtctctgctcctgctgggaaaggcttacactcatactaactggccccatttcaaggggatggtttaacagtgcgggtgcttagccagggctgatttccattttcgttccttatagtgactattttaactcttctcctgccttctcaaggctctaggttcactctagctcccaagacgccttaacagatgcccttccctcttatacaacagtgacaaatgccctcagatttacttccttcctcccatttcagaagaggctgtcttcattccttttaaagataaaccctccacttttgtttttatttaatctcctccctaatctgtcttttatcttctatctctactgtctattaacttcctgcatcaaataaattactttcttcatatttcccccaaggtaatacccctcttgcttcaacactcttcaaagccaagcatcctgatggagtggatcacacacattccttgcctttatctcttccatccctctgtttcctatttgttcctcaactgtatccctcaccaactgctgaaacacatttctctaaggtggaggtatacaaggggacttcaaaaagttcatggaaaatgcatattctgaaaagactatgcatggatttcaaaaattttttgcaccaaaataaactcatactaacttgttataacatgtctgaacaggatctagattgaggcattaaggaggataagacatcagtttgaaaagagcccttatcaaagcaacatgaattctgctaaaacagaagcaagaacaaatatcaaatttatgctaacacttggatggaagaatagtgaaatcattgatgctttacaagaagtttatggggacaatgcccccccaaatcagcagtttacaaatggataacttgtttaagaacagatgatgttgaagattaaagtccacagctgcaaaccatccacatcaatttgtgaggaaaaaatgaatctttttcatgccctaatttaagtggaccaatggttaacggtagaaacaacaaccaataccatagacgtctcaattggtttagctcacacaattctgattgaaaaattaaagttgagctaactttccactcagtgggtgccaaaaccattgtactcagattggctgcagacaagagcagggctttcaatggaaattttcaacaaatgggatcaagatcctgaggcatttcttcaaaaaaaaaaaaaaaaagaagaaaatgaatatataacaggaggtgaaacatggctttaccactacaatcctgaacacaaagacaatcaaagcagtggctaccaagaggtgggagtggtccagtcaaagaaaaagcggacagatcaagagcaaagctcatggccatagttttttgggatgctgaaggcattttgcttgattcctttccagaaggctaaagaacaataacatctacttattatgagagtgttttgaaaaaaattagcaaagctttagcagaaagcttccccagagagttcttctccaccacaataatgctcctgctcattcctctcatcaaacacgggcaaccttgtgagcatttggatgggaaatcattaggcatccacttcacagtcctgatttggctccctctgccttctttttgtttcctaatcttaaaaagtctttaaagggaatccatttctcttcagttaataatgtaaaaaagaatgctttgacatggttaaattcccaggactctgtgagttctttacagatagactaaatggctggtatcactgcttaccaaagtgtcttgaccttgatggagattaggttgagaaataggtttttttttttaatttttatcttttaattctattttttccataatctttttgaagttccctcatacatcatatgacctggaaccatctatcttcccaacatggcacacaatatgattttccagatgaaagattacaaagatacctctgtgttgttacatctcctatatacccagaaaggaaactttagatggctaaaaagcagtgcacatattataatgttgttcttcttccaataaggtaatttatagcttataagaacagatttttttttttccctatgagactctaaaaaactagctttattttgggagggagaaaaatgtggctgataaacattttatttttcctgaattggcccttgtgtcaaaaaaaaaaaaaaaaaaaagaagaagaaggttgtttactccttcttcaagttctgtggaggccagttggattcagagacattagtgttacgaaaagcccttttagaagagcacacatgaatttaatttattgagataggccattttatgtggaagtttagtttctgacctttgttgaagtcacagaaaatgatgtggctcaattttggtgtttaaatcaatgtgcacaagggcatgaatgaaaactgggtaggctgacaagccatgcaaacgaaaatgaagctatttacccaggatgccatgatcactctcagcatccaggcacctgaaggaatccttccccttctggcacgaggagccctcaatcagtggacttcagagctttcttgtgttatgggcaaaggtactccaattgcaaactgtgtgaaatttattttcctgttatgtttcatttttcctaaaacatttataacaaaagtaatatacatccaattcagaaaactggcaattctagaaaatcacaaagaagaaattcttcatgagttattcggagaaacatactagttgatatcttctcagcctttttccaatgatataactacttaaaaaaaattgagaatatgctaaattgtggttttattccctgatttatttcaatatatcttaataatttccccaggctattaaatatattttttgcatcaacatcattaatatttataacacacagtggcttattctttggatataccacaattaattcaaccaatatactttttttcagacattcagtctttttccatttttaaaaatcaaaaagcatgttgggataaatatcttatgggtagacttttgttcacagctctggttagaagaaattccgaagataaattcctagatgtgaaactgctaagtcagatgatatgcacatgttgtagggattttgacacgtactgtcaggctgtactccagagagtttgcacaagtttacactcccaccagcactatatgagagcaccatcttctagaacctgtatcaacactggctgtgacattaaaaacaaagcaaaacaaaaaataaaatttgccaataggatagattaaaaaacagtattgagtttcttaaaaaaaaaaaccttaaaataagacaagtttactgagatagcattacctcattttagcaataagaaactgagactcaaagcaagtaaaataacttggaaacaggacctatactcaggctcatttgttggctcatcagtttaacccagagtctcccaactgtatgtggggcacactggtgtaatacaacttgctgagcctcttctttcctgggtctgctgagggcctggggtggctagagtcttgagttgggatgcaatcacctgggaggagcttcctgtgggcttaaaagcaccttcagtttactccattatgcaaatagcctaatactgcattccctgaaatcgaaacaactgtatataatgtggtgagcaagacaggtgtggtccttgtcctgggggcactgatgctgtagtggtggtcagttcgtggccaaggcaagcatgtgtggcacagcagggaacacggggcagtcaggggcacctaacctagtttatgctgggtggtggacagggggtgtttctaggaagaagtgatgtgtaaactgagacccgatggatgggtgggagatgggcggaaagggtggagaagagagttgcaggcagtgggaacagcgtgtgagaaggccaaagaggagaagaatggcaagtttatgttccacatatctggagagtagaatgagggtgggaggtgtcaagagagcacagaaattaggaaggccacatacagagacctctgggcaaatgcagactcagtgaagtcttccagattttaaaaagtggaagaaaatgatcagatctgctttttagaaggactactctgcctgccatgtggaagtcagcaaagagagacaagcatttgtttaattcacctcacaagagaggctcaagttaggcattttaaaggaagaagaatcgtgggcacaccaccacataatttttatcaaatgcttcgttgagagaaacagccttcagctagcttgtatctttaatctatcttccagatttcctaaaatgcactggtggagcacattagaagcagagagcgggccctcctctcccactgaacggctctttggtctaatgacatgagggtgatcatggtttgcactttaagttctattattcttggctccactttgtctcttcttagtcttctttttctggactattttgtcacattttacatatatttgcaagttac

SEQ ID NO: 94861 - DNA, 16754 bp, Homo sapiens
tgaggtctgtgtggtgagttacggggtttctgtggggtcaataatgggcaatctgtgaaacgaatgaatgtgtgttggtagggagagtgatgggtatcttaggagttgatggggtatgtgggaagagtgatgggggatctgtggggtggcttatcagaagccaagaggctgagtgatggaatatatgtggtaggagtgttgggggctctgtgaggtgagagctgtggcatctgtggggtgagtgatggggagtgtcatgaactgaatgatgtcctcctccccaaattcatatgttgaagccctaatatcaggggaaccagcccccaatatttcaacataatgtcactatatctgaaatagagcctttaaggaggtaattaaggttaaatgagattataagggtggggccctaattcagtagaactggtatccttataagaagagggacactgggcatgagtgcacagagaaagggccacgtgaggacacagcaagaaggtagccatctgcaagccaaggagagaaaccccaccagacaccaaccctgatggcaccttgcacttggactgtccaacctcccgaagtgtgagaaactgtttgttgtttaagccacctggtctgtggcattttgttacggaagccagagccgactaacacaggggaggattagggtctgtggggttagcgatggggcctctctggaaggtatgatcaggggataataaactgagtaatagggatctgtggggtagtgacggggtctgtagggtcatgaggagcctgtggagtgaatggggtattgagtggcgagtggcaggattctgtgggattaatgatgggggctgtggggcaagtctgtagggggagtgaaggaggactttgaggaatgggggatctgtagatggctgatgaggatctatggggtgacgggggcatctgtggggtgggggaatgactgggggtctgtaggggtgctgatgtgctagctcataaggtgagagggctttgtggtgtgagagatggagggcctgtgagatgagtgggaggcacctgtggggttagtaatggggtgtcaatgggatgagtgattagagctctgtagagtcagtgatgagtgagtctgtagagtgagtgaagtgattaggggccaataagctgaatgatccaggggtggagtctgttggatgagtaatgtggctctgtgaggtgaatgacgtgaatatgtagggttcacgatagggcctgtggggtgagtgatgggggatctttagggtttgtgatgggaagtctatagggtgggtgttgggggggtccatgtggcagcaatgcaggggaatctgtgggctgagtaatcagggcatgtgatgggggtttgtggggtgaatgatggaagatctgtgaggctaagtattagggagtgagtggggtgagcacagagcggtattactgactgaatggtatctccccaaaattcatgctgaagccctaacccccaatacttcagaatgtgactgtatttgaaaatagggcctttcaagaggtgattaagttaaaatgaagttggtgaaggcgggtcccaatccactctggctggtgtccctataagaagagattaggacaccgacatgcgcaggcagagggaagactgtgtgaggacatggcgagaaggtgaccatctacaagcctcaggggacactaaactggttgacaccttgaacttggattttccgcctccagaactctgaggaaataaatttctgttgtttaagccaccaggtatgtggcattttgttatggcagttttagaaaactgacacagattttggtcctgggaagtggggtgctgccataataaatacctaaaacatggaagtagctttggaactgggtaatgggtagaggctgaaagagttttgaggtgcatgttagaaaaagcctatgttgctgctatgatcttaatatttgtgtccccccaacctccaattcctatgttgaaacctaatccccagtgtaatgatattaggaggtggggcctttgggaggtgattaggtcattcccttataagggatgaagggaccggagttctaccctcccaccatataagggtacagagggaaggagccatctgtgaggaagcaggccctcactagacactgaatttgccaacaccttgattttggacttcccagaccccagaactgtgagaaataaatttcagttgcctataagctacccagtttatagtattttgtcagagcagtccaaatgactaagacaattatcttgaaggctactggtagaaatatggatgttgaaagtgcttctggtgaggcctcagaaggaaatgaggaatatgttattggaaaatggagggaaggcaaagaacttggttaattgtattctagtgttttgtggaaggtagaacttgtgagaggcgaacttgggagatttagctaaggagatttctaagcagcatattatgtggcctttttctccttgctgcttctagtagaatgcaagaggaaagagagaaattgcaaaagaaattgtcaggcagaagggaactcgaatgtgaagataaaaaagttctcagcctatccaacactgcaaaagctgagaatgtgttctggtgagaagacaaagggtgtggctaaacaatcatgccacaaagagatcatgggtgtgactcactgacctaatcagccatcttggcagaagccaggaatacagatgggtaataccagcagaaacacggccagctgggactaaagaggacagagatgggacaaaatgaaagaagactgtaggacttctgggattcaacaggacacgacaacagagctttctggctgtgaacatgcattatacttcaagaaaaagggagaatgatcccaaaggtggggctgtctcctcctcagttccagagggcaaagaggcctcctctgtttcagtgggccaggctgccacccagggctcagggagagacaccgcctctccagtgaaccaggaaagtggggcccccaatctggtgggcccagaggacagaacatagagccaaacaggattattctcaagccttaaaaatctaatagaatttgccctatttggtttcaaacttattcggaacctgtgatccctgttttttctcctgagacagggtcttgctctgtcgcccagtctggggtgcactggtgagaagagggctcactgcagcctcgacctcctgggcttaatcaatcctcccacctcagcctcctgaggagctgggactataggcatgtaccaccatacctggctaattttttagttttttgtagaggcggggtttcaccatgtagcccagggtggtctcaaatacctgggctcaagtgaccctcccatctcagcctcccaaaatgctgggattacatgcgtgagtcaccacgcctggactgtgatccctttcttctttgtgatttctcctttttggaatggaaatatctatctagcttatgcttgtcctaccactgaattttggaagcagatgatttatctggtttcacgggttcacagctagagaagaatttttgcatcaggatgaatcatacctccagtctcatttacacttgatttggatgatatttaggtaagacttgggactgaaagttaatgctagacttgattaagagctttcagagtggcttatggcacagtgaattatgcctataatcccaacactttgggaggctgaggtgggtggatcatctgaggccaggagttcaagaccagccaggccaacatagtgaaaccctgtggttgcagtgacctgagatcgtgccgttgcactccagcctgggccacagagcaagaccctgtctccaaaaaaacaaaagagagttttgggctgctgggatgggggtgaaggtattttgcatgcaaggacatgaattctgggaggccagagagagcagaatgttatagactgaactgtgtcctccccaaattcatatgttaaagccctaacccccaataccacagaatgtgactatatttggagatagggactttaaaagggtggttaagttaaaatgggactcatagagtgggcctaatccaatacaaatggtgccccccacttttttttttgggacagagtctcactctgttgcccagactggagtgcagtagtgccatgatgttggctcactgccacctcaacttcccaggttcaagtgattctcctgcctcagcctcccaagtagctgggattacaggcatgtgccaccatgcatggctaatttttgtatttttagtagagatggagttttaccatgttggccaggctggtctcaaactcctgacctcaggtgatccacttgtgtcagcctgggattataggcatgagccactgtgcctgactggtgcccaccccccacctcctttttttttttaagacaggctctcaccgtgatcatggctcactgcagcctacacctccctagctcagatgatcctcccaccgtggcctcatgatgcccagctaattttcaaaattttttttgtagagatggggtttcaccatgttgcccaggctggtcaaatggtgtcctcataaaaggaaatttgggctaggcatggtagttcacacctgtagtctcagctacttgggaggctgaggtgggaggaccacttgagcctaggagtttgagatcagcttgggcaacatagtgagaccccatctctacaaaaaattgaaaaaatattgccggacatggtggttcacacctgtaatcctggcactttgggaggcagaggcgggtagatcacctgaggtcgggagttcgcgaccagcttgaccaacatggagaaaccccgtctctactaaaaatacaaaattagctgagcatggtggcacatgcctgtgatcccacctacccgggaggctgaggcaggagaattgctttaacccaggaggcagaggttgtggtgagccaagatcgtgccattgcactccagcctgggcaacaagagtgaaactccgtctcaaaaaaaaaaaacaaaacaaaaattaggtataatggcatgtgcctgttgtcccagttacttggaaggttgaggtgggaggatcacttgagcccaggtgtttgagaccagcctgggcaacatagtgagagtccattgctataaaaaaaaataaatatagccatgtgtggtagtgcacacctgtagtcccagctacttaggaggctgaggcaggaggatcgctggagccagggaggtagaggctgcagtgaaccatgatcataccactgcactccagcctgacacagagcgaggccctgtctcaaaaaaaaaaaaaaaaaaaggaaatttggacacacagagagacaccagggacagggacgctagttcatagagaccatgtgaggacactgagaaggtggccacctgcaagctacggacaggggcctcaggagaagtcaaacctgctgacaccttgatcttggactccagaactgtgagaaaatgaacttcggtggtttaagcctagtctgtggcattctgttatggcagctcgagttaagaccaggggactgtggggccagtgatagggtctgtgtagtgagttatggggtctggcggggggtcagtgataggggtttgtgaggtcagaggtgggaggtctttagatgctgatgggggtctggaataagtgaatgatggtgggatctgtggggtcagtcatagcgcatctctggggttagtaattaaggatctctcagtgttagagtcaagatcttttatttcctgattttaaaaatcgtcaccatcatagacctcctggcttctcttgtatctgtgttctaatggctcccagcagtgccttcacacagcccctttattccccttcttgtgcctgcccatgagcctgagtgtgacagatcaattagctttgtccctccaaactgtgggagcaggactagactcttctggcaggcagagagctcctcctcggccagtgttcgagcctggtccaccactcctcagttcttcttgctcttggcttttgtggccttggcatccagcgtgctctgggcatgagtgaggtgcttcacagcatcaagcacarggactccaggcagcaccagcyacagggcattcatgaagacaaagtaaaaycagaagtagagagggtggcccagctctccgtgctrgaatccgtygcggtgctctgtcaggaagtagagcacatccccatagatctggcctgtgggtggcaggaggggaaggagaagccccagtgaggaaggggacactttcgccaattctctattccaaagcactttccaagtcatcattcaaggtctcagagctaagtattctgaaatcacagagctgaaaatctgagaaatcagaaaagtgagattccagacaccagagagctgagaatttcagaactcaggagagctcacaccttcagatttaaggaagttcaaaatcctcaaatccaagacagcttaggattctgggactaaagataactcatatcgctagaactaaagaaagctaacaatttaataacacaagatgactgaggccgggcacagtggctcacacctgtaatcccagtacttcgggaggccaagccaggaggactgtttgagctcaggagcttgagaccagcctgggcaacatggcgaaaccccatctctactaaaaatacaaaagttagccaggcacggtggcacatgcctgtagtcccagctactcaggagactgaggcaggaagatcgcttgagtctgggaggtggaggttgcagtgagccgagatcacaccatagcactctggcctgggtgacagagccagaccctgttttaaaaaaaatatgacagaatcttacatgaagggatctcagagccctgatcctggaggttccaggggcttcttgccaccctgggccacctcatgtaaccttcacaggagactttgtgatggagaaggaggaggaggaagaaaaatgaaccctccccacctgagagtgcaggctcagagaagggcatgacctttccagagcctcagggggtttgtcattcagtctgacttacccctggaagggcaccgttgagagatcccacccacagggatacatctgtgtctgtggatcccccatcaacccctctagtgcccagtgcccctctagtgccctttccttacccacagagaccacaagctgtagaatgaagcggaggggatgctggcggagaaaggcgatcaccacccacagsctgagtggtcccyacaggcaagctgtgatggtttccatgcacactgtgaagttgtcacccctgcaggagaaagcatgaggggacactggtatcggtgtgctcttcctacaggttagcccattagtgctccccaactcaccaccccccgaaaaccaatgccagtctccattgacagaggcaaacacttacaggatgtatcggctgtctcccttggcatactctttccctgaagaaaagaagagagagatatgaagaataaaggcagtgaaaggaacacacacttgtgagagctkggggtccctgcaagaagacagacttcataaccttcccatgcgtctgcttcctcatccgtgaaatggggtaactgtttggattctagtggtttatttctctaaaacaaggtaatatgtgtaaagcctgacacaaaacagtgtggctgtgattggtactcaagaagtgtgtgtggtataaaaggaagcaggtgtagatgatggagtgagtgaagtagccaatgagagagagagaatgtaggtgaacagatgagtgaatacaagagtgagcagagaatcagaaagaaaaagaccgccgggcacgatggctcatgcctgtaatcccaacactttgggaggctgaggtgggatgatggcttgcataaaggagttcaagaccagtctgaacaatatagtgagacccccaactctataaaacatacaaaaattagctggacgtggtggcacgtgcctacagtcccaggctgcagtgggaggatgtcttgagcccaggaggttgaggctgcagtgagctatgatagcaccacagtgctcagcctggacaacagggtaagaccctgtctcaaaaaaaaaaaaaaaaaagaaagaaagaaaaagatcatccaatataaaataggcagaagacttgaataggttcttcacaaagaggatttctaaatggccaataagtatatgaaagatgttcaaacttccattagtcactaaggaaaagcaaattaaaaccataatgagatatcactcacatctactggaatgactaaaatttaagaaacatctgaccagccgggcacaatggctcatgcctgtaatgttttttttttttttttttttttttgagacggagccttgctcttatcgctcaggctggagtgtgcagtggcgcaatctcagctcaccacaacctccgcctcccaggtcccagagattctcctgcctcagcctcctgagtagctgggattacaggcacctgccaccacgcccagctaatttttagacttttagtagagacggggtttcactatgttggccagactggtctcaaactcctgacctcaggtgatctgcccgccttcgcctcacaaagtgctgggattacaggcatgagccactctgcccggccttgtttataatggcagaagattgagggaaaatgcccatcaatactacacaagtcaagcaactgtacaatgtccatgctttgaaagctctttatgaaatcatgaggagtgacctcattaaaaaaagcagctgggtgcggtggctcatgcttgtaatcctagcactttgggaggctgaggtgggcagatcacttgaagccaggagttggagaacagcctgggcaacaaagcaagacgccatctcttaaaaaaaaaagttgttaaaaaaaaaataacttggtggggtggcacatgcctataatcccagctactagggaggctgaggcaggaggattgcttgattgcccaggagttcaaggttgcagtgagctataatcatgccwctgcactctagcctgggtgacagagcgagaccccgtctcaaaaaagaaaatggcttctttggttttcttgtaaggaaagaaagaaaaagagaaaagattagaagtatatatagcatattaccatttgtgtaaaaagggaaaagtgcaaataatgataataatagtgaacagttacatggcaaccactgtttgccaaacactgttctaagtatcttacatatagttggttattactattatcctccttttacaattgagcaaattgagacttacgtgtgtaaataaactgaaaagaaacataaacaactatcaacagtgcctaacagcgtttggggaaacttagtggatagaaagcagattttcactgcaaatctctttaaatggttttttgacccacgtgaatatacatgcaacaaaaaagttaaataaggctgggcacggtggtgcgcacctgtcatcccagaattttgggaggctgaggtggaaggattgcttgagcccaggagttaaagaacagcctgagcaacatagcaagaccttgtctctacaaaaaagtgaaaatattagccaggcataaaggtgtgcacctatagtatagtcccagctactggggaggctgaggcaagacgatcgcttgaacccaggagttggaggttgcagtgagcaatcatcataccactgcactccagcctgggcaacagagcaagaccttgtctcaaaaataagttatctaccagttttagagaagggcaaaaaacaaaaagaataataataacaatacataataattttttttttgagacaaagtctcactctgttgcccaggctggagtgcaatggcatggtcttggctcactgcaacctccgcctcccaggttcaagcaattctcctgcctcagcctccctagtagctgggattacaggcgtgtgccaccacacccggctaatttttgtatttttagtagagatggggtttcatcatcttggcctggctggtcttcaactcccgacctcgtgatctgcctgcctcggcctcccaaagtgctgggattacaggcttgagccaccgcgcctggctaatttttgtatttttagtagagatggggttttgccatgttgaccaggctggtctcaaattcctgacctcaagtgatccacctgcctcggcctcccaaagtgctgggattacaagcgtgagccactgtgcccggcctataataaattttttaaaagattaaataaaaatttaaaataaatcaatggaagaagaataggtggataggtaaacatgcaagccgatccctgcccagcaaatcccatcccacagcatatgaaagaaatcaggactcacagagttgagataagaaggcttggtctccaagcaggtcttcgtagtagagaacgaascagccctygatcaccaggtgaatgaacccacacactgcaaacyagcacagggacagtcrccgccaagtccccaatgggacaaccgcagcacgaccwgacaacagycatgtggtcacgactaagacccctgtgacagagaagaggccagccagtatatgycaggtggggcggtcattaggtacaaagttgtccrgtcttaggtgctgaggccastatgggtgcaaggggccmgcgttggtagycatgtctttgtgggctgatggctgcgtgtgtataggcaggaagttaaaaaaaaaaaaaaaaaaggaacagaaaaacctggacaaatagaaagtacagaatgagataataaaatcaaattcaaatagtttattatcatgagaaatgtaaatggaccgaatttaccagttaacagacaggattgtaacacttctaattacattccgtttttttttttttttttcagacggagtcttgctctgtcacccaggctggagtggagtggtgcgacctcggctcactgcaacctctgccttccgggttcaaacgattctcctgcctcagcctcccgagtagctgggactacaggtgcctgccaccacgcccagctaattttttgtatttttagtagagacggggtttcaccgtgttagccaggatggtcttgatctcctgacctcacgatccgcccgcctcagcctcccaaagtgctgggattacaggcgtgagccactgcgcccggcctacattctgttttaagaccatgactaaaggccaggcaccgtggcaggtaattccagtgctttgggaggctgatgcaggagcagcacctgaggccaggaattcaagtccggcctgggcaacacagcgaaactgtctctaaaaaaataagaaaatcagtcaggtgtggtgacaaaggcctgtagtcccagctagtaggtaggctgaggcaggaggatcgctttgagcccaggacttcaaggctgaagtgagcagtgaccacatcactgccctccagtctgagactctgcctctaaaaaagaaggccgggcgcggtggctcacgcctgtaatcccagcactttgggaggccaagacgagtggaccacttgagctcaggagttcaagaccagcccggccaacatggcaaaaccccgtctctactaaaaatacaaaaattagccaggtgtggtggcgtgcgcctgtagttacagctactcaggaggctgaggcaggagaatcgcttgaacctgggaggcagaggctgcagtgagccggggtcatgccactgcactccagcctgggcaacagagcgagactctgtctcaaaataaaataaaaaagaaaagaaaaagaacatgactgaaacacaaggccacagaaaggctgaaagcttgttccagccctttagaagccatattatgatgtggtagaaacagtcccggtctcagccctcgggggtcaaagtctggtgggaggcacatgggaacaacacctgatcccagccctccctggtcacagtctggcgagggagatacaggaccaggcctggtgtcttccttcaagggtcacaaactgctcacgaccaccaaacccagtcctgtgctccggggtcacggtttggtaagagacacaggaaccaggcgtggtccagttgcacaggtcagcgtcttaaaccgttcaacaaaaagctattccctcccccacgtagtcctgaaaactgcaactgggggacagaggaaagaaaacgaatcagaactacaaccctcggtgccagcgtttggaaagccagagcctccccgcgagagcgtgcaacgccgtcaacctgcagggaagagacggatattgaaaggccggtgtctggcgtgcagcgctagaacggaacacaaagccggtcaatccgaaccagaaccctccagtcccgctgcccaatgagaagacggatcttctgtcctctggacaaccgtgcggtagctgggggtctcgcgcaggcgcaaaagggcggtggggggggcgggtggcaaagggtctcgcgctggcacgccgagggctggccgcgtagccggggagagctgggggagggagcaggggccgggtggagggcactcaccaaggcgcgcgacggcagcggcctcccacgctggctccgggctctctttaggctgggtctcgcgctctgtcacatccctagttcgggctcatcccctagtgggttctcttgccttacggagcgagccaatggtgaagcgaagaaggcggcccgtgccgctcccaaccaatagacactctctttgtacctctagccccgcccccgcgcgtggcgccattttcacctgagttaggtttggggtggagactgggacgcgccaaggttagtgggcgttttggatccgtagccaatctgcatcgagtcctggcttcaatttccccattcccttatcagtcgatcaaaacggggactcattaaggtctgtacccgcttcttccgctggtgaaattagcgttgcgttgcatcctttcacctccgcccttttctaggtagagtaacccttagtataatgcaacgaaactgttacaagcagatcacacgctatacactgcaaccaccccctccccagctcttcagtgctcagaactcctcagtcctaatagcagcggtcattctctcttctcccgacctcaagtcagaagaactagttagaacccaggcctctcagtcctactgaccaattggcatgaagaccctcaatctccatatgccagttctaaaaagccaatcaaacgcctaaccaccagtgggcccccagatggagcaatcaatcagaatccagacccatcccagacctcccatccaattagaacccacaaccctcagtcctaaggataaataggcaccaacccttcatctctcttgctttctctcctctgtgtcccactcagagcaaccaatcagaatggggatccttcagttttccagccaatcaggcctcccccacatccaactatgcaatctgtccctgccctgatcaaaccaagcaggaccaggatcctgccatcttcaggctcatcatctaatcaatcataaactaaccatgaaccaatcacagtctgctctctcttcatggtttccagcttccaaacctttatccatgctgtgctcccttcctcactcattcctattcccctctgagcagtgaagaagaagcctattgaatatttcctacttttatttgacaataacaaattgtatataaaaaggaagaaggaaggcggggaggccctggatctccccttctctgtttccccaagcatccccctctaggccccagcaggcaccacccccttcctgccttgtggtggggtggggattgacaggcatgaaaatggtgtgattttgtgtgtgtgtgtgtgtgtgtgtgttgaggtgttgggggtcaaggatggagggggtcaaggagtagagagagggccttccctcatcccccatcagtggcaccctgagaggggtcttaagagggttatgagggtccacagatgtgcctcagcctatgagacggtagaagatccagcatccaaaagtgacccagtgactggcccagctgagctctgaccacttgtggacagtgtatgccatgccgtagccctgtgggagagaaagaggtgatggtcccacttagcaaggacaaagaagttcttaggaaaacccatcctttgcccaaggacatttctgtgactgctctaggcgaggccccgcagaagggcctaggtacatatgaaaggtgaccagatatagtttttgtcttcttctttaaaaatcattttaaaaacaaagtgatcccattctctgacctgttatctccctaatatataaagagctcctaaaaattaattttttggaaagaaaaattgccagagaaggtgaataggtcattccagtaaaggaaaaacaaatggctcttaaacatatgaaaagatgctcagcctcattaataatcttcctcattttatttattttctttttgagacaggctctcattctgtcacccaggcttgagtgcagtggcacgatctgagctcactgcaacctctacctcccaggttcaagagattctcctgcctcagcctcctgagtagctgggattacagatgctgcaccaccatgcccagctaatttttgtacttttagtagagatggggtttcaccatgttggtcaggctggtctcgaactcctgacctcaagtgatctgcctgcctgggcgtcccaaagtgctgggattacaggcatgagccaccccgcccggccatcttcctctttattgaagtggcaaacatatccaggaagtctgagaggcactctgtactggtggggcagcaggcacattcaggcattgctggtgggagagcacaaaagtactactccattgagactatcaacagatcctacagatctgtccacacctgtgtggatccacttgggtacagagttcctgctgcaacatcacttgcaataggaaaggactagaaattacctgatgtccacaaataagagaaaaaataaactgtgtcacttcctcatagtggaaaaaatgaatgaggacactatatcctgatgtggaagattttcaaaaattgcagaacagtatcattcatgtgttatctttagggtaaaaactggcaagggggtagaattaaaatatatttttatatttgtttgatatgcttaaattttggaaagatattttaataaaaggataaaagtgggctcagtgcggtggctcacgcctgcaatctcagcactttgggaggctgaggtgagtggattacctgaggtcaggagtttgagaccagcctggctaacatggtgaaaccccgtctcaccatgtaacctgtaagagggtagggggcagagggtgggagcaaatcttttctctaaatatcttgaatactgtttggtttttgaagcacatgataggcattcactattttaaaatattttaatgaaaacaaaacaaaaactttatttaaaaagaagcaaaaagccaggtgtggtggcatgcatctctagtcccagctacttgggaggctgaggtgggtggactgctcgagcctgggagtttgaggctgcagtgagctatgattgtgccactgcactttagcctgggtaacagagtgagaccgtgtctcaaaaaaaaaaaagaaaagcaaatcccagattttgcacacttaacctgaattaaaaactttttaatatcaaaaaacacaaagttttgtttttgactgaaacctaactaaaagagaagcaaaaacctggattctgcaagagccatatgaataaatgttatttttaaattgttcttaatttaaaaaggagtaaaatctggtatttgcatactcaacatgaacaaaaatagtgcatacattttaacgaaaaattttaaagtgcagaatccagggtttgtacactcaacctaagtaaaataaaatatatatttttttggccgggcgtggtggctcacgcctgtaatcccaacactttgggaggctgaggcgggtggatcacctgaggcctggagttcaagaccagcctggccaacatgacgaaatcccatctctactaaaagtacaaaaattagcccagcatggtggtgcgtgcctgtaatcccagctactcaggaggctgaggcaggagaattgcttgaacccaggaggcggaggttgcagtgagctgagatcgcaccattgcactccagcctgggcaacaagagcaagactccgtctaaaaatatatatatatatttaaattaaataaaacagggtgctcatgcctgttatcctagcactttaggaggttgaggcaaggggattgcttgagcctaggagttcaagaccagcctgggcaacatagggagaccctgtctctacaaaaaaaattaaaaaaacattagccgggcttagtgtcatgcacctgtagtcccagctactcaggaggttgaggcagaaggatggcttgagcccaggaatgtgaggctgcagtgggccgtgatcacaccactgcactttagcctgggtgacagaccttgtctcaaaaaaaaaaaaaaaattaagaagtcttgcaaattctacctaaacaataatgaagtgaaataattaacacaagtaaaacctggattttccactccatctctataaagtgatttttttttttgagagagtctcgctctgttgcccaggctggagtgcagtggcatgggctcactgtgacctccacctcctgggttcaagtgattct

SEQ ID NO: 94862 - DNA, 15337 bp, Homo sapiens
tgtgtgtccatccacgtcagtgccagggcccccgggggccacccagacccaaatggcagccaggccagcctgggacgagagccctgcccagttgggggaaccctggataaaccacccctcccccagggtctagtgtggcccttgcctgggacacggcagagcccccagggctgtcccccaaccccacactgacttgaaaatgtgggattccccccccccccgactagaggagcagaaacgtgccccccccaacccgacgccggccttcaggtgagccagcgcagctcggttccaggccaggcacagcccacaggtggcagggaggccgcgctcaccatgtggtagttcaccacctcctgtaggctgtcagcgaacctctgcagacattcctggaggagcagatgggaacccgtgctgagatggcaaatccgggcccaggtcacccagccacgccctctgagcccctgggcggtgcagacaccggcctgcttctggcctggacgccctcaaggggctgcctccctcggcctctcccccaaccccaccttgaggtcagaggtcagtcggcccctcaccgagatgacggtgtcgccctggcactgctgggacaggtcgcggacgccgctcacgaaaagcctgctggtgctgacgtaggccttaccggcttccaccatgccactgcacagcttcaccagctgtgggccagcggggcgtggtgagcacagtgggcactggcgcctgcactcgccaccacacacggccactcagaggcaggaagagctcccagggtaggttccactcagggcgttggcactcaggactcagtgccccggtgcagcttcctcacgcctgggcctgcctggggcttggaggcccgtctgggaggggagggtggggccgccacggctcggctgggagggaccaggagccaggcaggggacccagggccagcaggaccagcagaaccagcccatgtggggctcatggataaggctgcccactcccagctccacggcctgttgccccctcctctttctcagcccatgtggggctcatggacacggctcccctctccacggcctgttgccccctctttctcagcccatgtggggctcatggacacggctcccccctccacggcctgttgccccctcccctttctcagccccagccccagccacaccaaggctcagcccacacagcagctgtccccrtgtcaccagcccagcagaggggacgggcagccaccgtgggtcggggactcaccacagcccagcccctcccagatgggacgagactcagggccagccacatgtgtgcatgtgacatgtgcaccctggaacacacatgctaagacacagggaccaggacctggagcaccacacgcatgctccacatatggggggtgtaagtggcttagtaaggcctggagggcgagtctggccatgtggccatcccaagcttggccgggcacagggcgctccaggcccgcccttcaccttgtccagtttggcctcaatctccaccacgtccgtctccacctcgtcaatggtcgccctaaagcaagaacggggctggctggggtcacctgcagcctcagccccctcggggcttcacctccccccgcacctccctgaggggctccaccatgggaaggggctttcaggaaacaggctgggagacagacgcctgcctgctacgggggcaggactgggaccaggttcagtgcacttccccccgcccccccaaccccaggcaggcagaggcagccgctgctgtgccctcggggaagaaggctggaccagcctctcccaggacagccggccgctgggagtccctcagggacagtgcccaccaagggctgagccagcctcacccgcctctcctctaggagttcagagtcaaccctggacccatctggagcccctcaaccctgcggcacctcccctcaccccactgcactactgcagcccatccaggtctggcgcccatgcactgtgggacagggtgggggcagtagggcagctgctctcggtcctggcagcaccaggaggacccagaccagctggggagagacgcccccggctcccccaacctcacagctgcaagcggcatggtccgctggaaagacgggtaggccatcctcctcagagcccactcccaccaggacagcctgacagtggggctgcctggggagagaagagttaaggcatgacatcaccagagaagcctcggcgggagaatccccggaagacaggaggcagatggatsgggcacgtgaccaccccctccgggagcaggcaacagggaaacagggccaggatcccggcagccctccacacaatcggctcactggctgtccgggccatctggcctcctggggattgggcaccacagggcccgggctggggccaggactccaggtctagggcaggggtccaggagcagaggccatcagggcctacagtccctcgtaccttgctaccctgaccggtgtcccaggcctcgggggaggggcctgtggtttacatggggcgtgtcctcaattaggagctggagctgcaggcaccaggctgccccagccagggaccttgaagggtcccagccaccccagaaggacactaggtcctctctgagcagccctctcttgttcccaaggggctaagaggactctgaatcccgaagcagggggcgatggagggaatctcgctgtggtgtccgctgaccgccagtgcccagcctgcagcccctggaccctgacctctacctcagctggaggatcccagaacagagaagggaccatcctcccaggagaaggcagcagagagcgccacaccccaggagttgcagccacccctgagcagggccggatgcagagacagctgcacccagagctgccgccctcgggtttggggcgcccgtgtccctggagagccagcaaggggggatggctgcacccaggagctcacggacgtgctcatggggacagggtgggccctggcagaggccccgagagccgctcccactgctgggagcccctcagctctcccttcctcagtcctggggacctaggcctcctctgctgtgctcagcccaggatttcctcagcagcttggaggacggggaggagggtgaggctgccccccaaccaaagccatgactcagcgcctgaagccccacccaggggaggggcacactgaacagaggccaggcggttcccctacacgggctcccctggcctccggcccactgcacctgggctgccactaggccctccccagaccaggagggtgcgggcagggtccccctctcccgggctggggcgaccaggctccacgttacagaccacatcttcccgcccaccctgcctggccccccaacctggcggtaggccaggaaactcaagttacgcccttagggcctgcccccaggacagcctcagggagcccctcgaaccccagttaaatcacagcctaaccccaaaacccactgggccaggccattctcatctccccactccagtccatgccccacaggggtgaggcactttcccagggcagtcgctctacggcacctactgcagccccacagcccccataactggctcctgtaacaggctcccatgagagccggttaccagagagaaggcccagaggtgagtgggttccagcacccccacacgactggaagagggcagtacagggccgtctgcgtggaggaggaggtccattaggcttctgacggaggggccagggagaaggtgggtgcttcagccagggtccagcccccagcagggaggccatgcccacacctccccacagcccgggtcctcagtgcaggatcctagggtgctcaagttattcaaccccttttcccaggtcagcaacagaagatgggagagcagaggatggccccagttcctctgcccagggctgggggccactctcctggctggccctgagcctcccactccaaggctcctgagcctcctggtgagggctccagggatacagaggctccccgtgcctccacacacatgctgacttgccagcagatcccaagagacccagcgcgcgcgtgcacacccacacatacacaatcaagcacacatgtgcaaacatgttcatgcacaaacatgcctgcacacactggtaccacacatacatgtgtgttcaaggagacactgcacagacacgcatcaacatgtgtacctagtgatggaacacgcgtgtacaaggtgatgtgtctgttgctgacatggctaacacagtacgtgaacccacacagacaggtggtgtgtgcacacgcttgcgtgcactcatcggcaggctacatgcagaagcaagcacagccccgtggcacagctcatccacacgtcctgtgcaaggcctggtgtccggagggaggcacgcagaggggcaaagttcacaagagcgcaccccgcacgagctcgtgcagaggagggggcctcacgcaggtgcgcacttggggatgcagagaggtttctttgcctccattgtcgtttgccaaatgtccaccaagcaaagccgatgcacacttgtgcacacgtctgtgaacatgtagttcacgcaggtgtacacgcctgcacgccacgaatgatggaaaacatgcagactcggtgtgcacacaacccctaccccctacctgaccttccccgccgctcttctcggccgccacccctccaagcccctgggtcattcaaaccacttcacgtttccaagcaccctaccccaggccttaaacgcggctccagctgcctgttccccacgcgctgctctggacacaggatcaagtcagagaccaggggccgacgcccccacggacccagacgaccctggccagagctggactgcagggcccgggaggggctcagcccagtggaggtgcagacacagagcgggggcggacggtcccgaggtgcccacggctgcccacgcgcacgccctccacccggggcggccgcacagggcaggagcgtcttttgttccaacccccagggcatggcggggcggggccgccgctttgtccgaggccggtcctccagcccctccccggcggccgcggcccggcccggcgctgacctccccaccccgccgccgggcacaaaggcgacagcgacgcccccggcctgcgcccaccccggcggccccgggcggcgcacctgaagcgcggggagtccttgacgcactcctcgaactccacggtcatggctgcggcggccgcggcgctcactggcacgaggaccgcggcgccgagcggcagccgcgccggcccggaccgctcgtcccgcccgcgccgcctcggcgcccgcccgccccggaatgaggccgccgcgccgcgccccgccccgcctgtcaccgccggggagcgtcgccaaagtcagccgcccgcgcgcaccgcccgctgtcactgccggggagcgtcgccaaggtccgccgcccgcgcgcgccgcccgctgtcaccgccggggagcgtcgccaaacgcctctcgcagcgtccagggaccaccccggtccggaagtgaggcggggcctgccacggccgtctccggggacagtcggtggaaatgtggggcgcggggagggcgcggggagggcgcgggcccgcccgctccaaccatcccggccgttgcgcaactcagggcgtttgcaaaaaccacgtctgggaggacttggccgcaacgcggcgaacgggcgcgctcggggagtgtgggcggcggcgaatgaatgagcgagtgaacgaatgcacgcccgcgagagcgcggggtgaccgcgtggttggtgcgcgcctcccggggcgccgcgatagaggtagagcgcctgcgctcggcggcgggccggcactttgcagccgctccctaagcccggccccgcctccgctccccgactctggccgccgtggcgcggtgccaccgcgcaggcgcaagagcggccggggccgggggggagggggggggggcgtgaccaggccgcgtccgcgcgcgcgcaggattcctgcgctggaggccgcctctgacgccaccggctgggctccgccatgagttcggcgccggcctcaggctccgtgcgcgcgcgctatcttgtgtacttccagtacgtgggcaccgactttaagtaggtttcccaggcgcagcggcgggcgccacgtgggcccgggcggaggcgggaaggagggcgcgggcgggcaggcggatgtctctggacgcgggttccaaacgttcggggaaggaagcggccctggcctcagacggcggcggagaccccagggcagggcgcccccggtaacctccgcccgcttctgcccgcagcggggtcgcggccgtcaggggcactcagcgcgccgtcggggtccagaactacctggaggtgcgctcagccggtcacgggacgcccggtgaggggtaagggggaggctcccgcccgcgcgtccccggggtccggcctcgctcacccgcccgccccgcggctcggtcctgcaggaggccgccgagcggctgaattccgtggagccggtcaggttcaccatctccagccgcacggacgccggggtccacgccctgagcaacgcggcgcacctggacgtccagcgccgctcaggccggccgcccttcccgcccgaggtcctggccgaggccctcaacacacacctgcrgcacccggccatcaggtgagcccgcgacctaagcagccctggggctgtgccttcccgactccatctgtcgcgggcggaggctggaratctggacagacttccttgtctggtcggagctcgagggggaaggagagccaatgtgacaccgcgggcgggcggggtcgttcctccggtgagctttacctgccgccatagggtcctgcgggccttccgagtgcccagcgacttccacgctcgtcacgcagccacgtcccggacctacctgtaccgcctggccactggctgtcaccggcgtgatgagctgccggtgtttgaacgcaacctatgctggactctcccggcagagtgagtgtggccctgacagcggggagggggcgggcaggccggccccaccctcctgayggtcaccctggtccctgaagctgcctggatatggtcgccatgcaggaagccgcccagcacctcctcggcacacacgacttcagcgccttccagtccgctggcagcccggtgccgagccccgtgcgaacgctgcgcygggtctccgtttccccaggccaagccagccccttggtcacccccgaggagagcaggtgaggaagggcccctgggctgtggccctgccctcaagtcacgtgctgattttagctccagcacctcccccagttttaaggcaaggtgaggcgggaggcaggcagccgggagtcctcaggacctggacagctggagrggattcgcccggacgccccccagcctccagctgtgccctccccccaggctggggagcggagaacagggaaggctgcttgtctctgaaaaacccctgccatgcctgatggaagaatgttggcagctactggaaaggtctcactggtgccagtggttctggtggggtggtttctgctgcccccagcactgtcccgagggccacccaccaggtggcagcttctgaccagaacctcccctattggggtgagccctgaaggggggaagaacttctgccagccccagacttctgtggcagagcagcaggtacaggactgggggtctctggcacccgcaccagccacgttcccagaccctgcaccaggaccctaggtgagggcccagggcaagcccctctgggatggccaggctacctgcccagcctccagggtcctgctgcctccttgcccaagcattgtttctctggttttaagcccctccaatgggcctcactgggggcaggagatcagccagggcccctggtggccaagctagtgggaaccaggctcgtctttaggcccaccctgtcactctcccgtccaaggccacatagtaggctgaggatggcaaacactgccccacagacacctacaggtacgtrtttttccaggaagctgcggttctggaacctggagtttgagagccagtctttcctgtatagacaggtaggctctgttctggggccgtccccagggggtggggctgagggtgggcaggcccctgtgcagtcttggctctgggtcgtgggcggctctgggtcacaggtacggaggatgacggctgtgctggtgggtcacgggcggctctgggtcacaggtacggaggatgacggctgtgctggtgggtcacgggcggctctgggtcacaggtggctctgggtcacaggtacggagratgacrgctgtgctggtggccgtggggctgggggctttggcacctgcccaggtgaagacgattctggagagccaagatcccctgggcaagcaccagacacgtgtagccccagcccacggcttattcctcaagtcagtgctgtacgggaacctcggtaagaaaaacaggcacgagaagctcctgtcatgtgcccagtgactactgtggccgaggcatggggtggggggccaggggccactgacggcagcaactgggggtgaagcagccccccgcccagggctgcagtccctcaggccagcccgtagcccgtcctgggctggcccactccctggtcatgggagtggtctcagcggtggggagggtgctgggccggtcttgccccaggctgacgcagggtctggtccgtccacaggtgctgcctcctgcaccctgcaggggccacagttcgggagccacggatgaccctggacactcaagccaaagttaggccacaccaggcccaaccctgtgctggtcaagccagggcagtcacagctgcttggggcccacagcactgctgcctggtctccacagtagcctccctgcccgggtcccagcaccctggatgccygtctctgtcccaggcgggatggggcacagtgcaggacacagccatgtacaccaagaagagagtaycaagtagtcttttgttcagcttttactggaaactgctgtctaggaccacctgccctaaccaggaataaaggcaagacagcctggagaccagtttgtttcttcagctgcaaacagctgcctrggcaggcaggtgacacaaggcctctgtccccagggatgggacctgcagggtctgttcacccagggcacccacagtcctgaagtgcaggcccagggtctgtccagctgggagagggcagaggtggcggctgggtgagttgccggcctcagctgggggcctgggggaggcccttcttcagcagagatgtgaggaagctccccagctcctcgtcctagggcagaggcaaaagcattgtgggtggtgcaggacagggaggaatgttgatacctgtgttgaccgcggtggggtgggggtcaccccttacctggtaggtccaggagaccagcagcaccttggtgcctgggtcctcagaaggggcggcggcctggaggaggacggactccacagtcacagagccgtctgggaggtgctgcacacagtggtccttcaggacgctgtggggaggctcggtgagaccctgcctggcctccagggcccaagggagtggggggggggcggggccgggcgcccacctcttgaggtggctgtagacgcgcaatgccgtctcctgctccttgcgtgtgtcatgcaggtgcacgcggcaggtgaagcgcagctggtgctcagccagacccagctctttgagggcttgctctgaggacaccagccggaagttctgtggggcagggacaggtcagtgagcgcagcagcggccctcccccctccagagaccgtcctggcactcacgctgtccttcatgatcagggtgccgtgcaggagccgaggcttcttggcctcagggagcagccctgcggaggaggtggcaggagccatcaatgtgagggccgctcccagccgcctgccccgagcaccctgccctgccctgcccagcccgcataccctgcgccatctcccgcttcagcagccccagcgagatgcctacggggatgctggggcttgtgggcagcgtcaccgtctcgccattggccggcatgtagcagttgacccctggaccccgggggaagagagagcctcagcccaggctgcccgtgctgacccgaggtgggccccacgccgcccgcccggctgcctacggagctcctgctcgatcttctgcttcaggaactccatcttcttggcctcgccatgcaccagcagcacgctctccggctctgcctggcccaccagctgcatgatgcccttggcgtccgcgtgtgcgctgaatgacatgtactccacctgcatcttgacctccagctacagaggccacggggcgtggacagtggttaccaccaggaggtgcccctcggccctgccagcccagtgcggggtcgagactcaccacctgccgcccctccatctcgagcttccgctgcccgctgaggatcttgtggccgacggtgccctgcacgcagtagccgggcatgatgacctgggggcaggcacagagctcacagccagggaactccagccttggcacctcaaggccttgcccgggatgcccccgcctgaacccctggaagctgtttccacctgccagcggcgcccgaccaagcctagctgcagactccaaagggctcaggttttggcacaagactgtccagggctgggctggggctgttctgcccgaggtggacaagctgtgtcacagagactgagcagctccaggcggacatcgcccccgttccccagcagcagcagccacgtcccttggccagcacgaggccaagccagtgagagctcagagacagcatgggtggaaggacaacccgtcggcctccagcttccagattcccacacctcaccatgccctcaccatgttcttttcgtttccggcccatttccggaagatctgcagggactgcccagcgtgcagcattcctggcgtggcaaacacaacctacaggacacacagggccaggtggggggtcagggcagcagatgcccccacccccactgcaggcccaagcccagacacctgcggaagacaggagaccgacgggtgtggatgtgctggccggccctgccgcgggcctcaccatcggtcctgggttgtcagcaaaagcccggtcgaaggccttgatgtgcttgaactcaaacatgttcctctgcacaaaagtcttgcggatcttctggttggtccaggggatgaacagcttgtagtagtggttggccttctcggtcagccccgtggagaagtagatgggcaccttcaggttcatgcgctccctggggaccaccggcccagtcagcacagtggccacaggggagaatgctgcagggcaggactcggccgggtcacccccaacacccgtgtctgcacagcccacgcacgggccaggttgagtccagtcgcgaccacttgtcccattaagccctgcagcagccgggctcagcggagaaccaggaacccctacaagagccgcacacggtggcgctgacgggatgtcacaggcttcctggggtcacacagcacacgagcggccccccaggacagcagcaagcagggccaagatgccaccgctacgctggacagggctgcccaccaactggactgtgttcaggccgggccaggggctccttaaagagccgtcctggcggcacctaccagaaggtctccaggaggatgcagagctcctgggcgcggcccagcgcgaacacaggtatcagcacctgagggggacacaaggcaggagccctgggcacatggcccctcgacacagcaggcagcgtccagtgagggcacggccaggtgcccaagagctgcggcctcatagggaccttagcctctcatctgctcccagtcccgtcccagccgctctccagagacagaagggagccgtatgagagacaggagggagccgcatgagagacagaagggagctgcatgagagacagaaggagcctggccagggcttcgtccgcacctgaggtaggagggaaaaggggctccctaggaaagggtctctgagttttcctcctcaatgttgagcaaatcttcttccctccctgcctgaaaatgcagtaccccccaccctgagaccctgacccatgccaagggcagccaagcctgccagaaagaccagcccagcatggccgagggcccatgtccccacccctgctgcagctaccttcccaccacgctccacggtctcgtggactttcttcaggaagtctcgctcccggcagcgcttggagtcacggatggtcgtggcgtacgtggactctgtgatgagcaggttggggcggcacttgtcaatccaggcagctctggaacacgggggtgggggtgtgagccacgatgcactgtccccacggttgcagggctgggtgtgacaagctggaccccagtaccacgcccagccgccttcctaggtcactctggctggaaagagccagctggtaaaatgctgtgggcagcacacttgggaagagagaggagagacagaggcacccacccagacacttcggaagagcgagacagaggcacccacccagagacttgggaagagagagaaggagggacagaggcccctgcctggaccctgtgccttcgcgcatttgggcccagaacgaagggggctctccaggccgcacaggacatgggagacactgccaggctggccactcaagggctggcaccctgacacctgcaagggtcctgagctccaggggggcccacgggacaaaaagacacctcagcctacttaccctaagtgtcggtctggggtcatgttataatcaccctggtgaacgatcaaggatgccatgaggagggtgcctcccaccccagcagcccctcccaagcctcaagcccttccactgaccgtgtagaccacagactctgagcccactttaatctggaacatggctgcccccagcacgtggcctgcatagtaggccttgatctccagctcatcatctacctgtggaggacagggctgcgctcaggctgtgtcctcacagcagaggggcggggagtgagggaggcgggggacgggaagcgcgggaggcgggggtggggagcgtgggggaaggggagcgagggggcgggggcgggagcgagggaggtgggggcggggagggagggagggaggcgggcagcgagggaggcaggggcagggagtgaggggggcgggggcagggagggaggcggggcggggagcgagggcactgcactgagcttttcagtccctgttgctcacacacagcatccagttcacaagggacgggcaacgtggacaaagaacgaaagacaacggacaaaaaactgaagggacctgaaattggagtttccagcgtggactttgaatacatgacagagaaaagacaaggttcagaatgttggcggccaggcctaaggtggatcccttggggtcaggaattggagaccagcctggccaacatggtgaaaccccgtctctactaaaaatacaaaagtaagccaggtgtggaagtgcgtgcctgtaatcccaactgctcaggaggctgaggcaggagaatcgcttgaacctgggaagtggaggttgcagtgtactgagatcacgccactgcactctagcctgggcaatggggcgggactccatctcggtaaaaacaaacaaaaaaatactgggctgggcacagtggctcacacctttaatcccagcacttggggagaccaaggtgggcagatcatctgaagtcaggagttcaagaccatcctggccgacacggtgaaaccctgtctctactaaaaatacaaaagttagctgggcatggtggtgggtgcttgtaatcccagctactcagtaggctaaggcagaattacttgaacccgggaggcggagattgcagtgagctgagattgtgccattgcactccagcctgggcaacaagagcgagagtgtcaaaaacaaaaattggcaaaaaactagacttcttttaaatttaatttattcatttaaaacttgccgggtgcggtggctcatgcctgtaatcccagcactttgggaggctgaggcgggtggatcacctgaggttgggaattcaagaccagcctgaccaacacggaaaaagcccgtctctactaaaaatacaaaattagccggatgtggtggtgtgcgcctgtaatcccagctactcgggaggctgaggcaggagaactgcttgaacccgggaggcggaggttgcagtaagccgagatcgcgccactgcactccagcctgggcgacagagcgagactgtgtctcaaaaaaaaataaataaataaaattgagagacagggtggggctgtcacccaggctgcagtggcgcaatcatggctcactcaaactcctgggctcaagcgtcctcccgcctccacctccgcctcccaaatagctgggactataggcacgcacccaccacgccaggctaatttaaaaacaaaattttggccaggcgcagtggctcactcttgtaatcccagcactctgggagaccaaggcgggtggatcacctgagatcaggagttcaagaccagcctgaccaacatggtgaaacccccgtctctactaaaaaaaaatacaaaattaactgggtgtggtggcacacgcctgtaatcccagctactcgggaggctgaggcaggagaatcgcttgaacccagaaggcggaggttcaaggtgagctgagatcgcaccactgcactacagcctgggcaatgagagcgaaactccatctcaaaaaaaaaagaaaaaaaaaaagaattcaacagatgaatttaacaccatatgacacataaccagaagagaatccatgaactgaaagacaccagagggaatatccatcaggaaacaggaaagacaaacagatgacggagtttcaagaggttgaacgtcaggctctcggggtccctggaggagcaggaacggggcagaaacaacactggaagaaacatgatgaaggcctcaagccacagatccaagaggcctcaaactctaaacaggctgaggatacatgtcagcccatcagagcacaagcaccaaaaaccaaggctcctgctcagaccctacggctgcccatgcccagagacagaacgttgtttgcaaagtgcagagacaaaatactgtcaacctaaaatcttacacacctaagggaaaaaaagtcctttaagaacgaggataaagtaaatccatttgcaggcaaataaattttttttttttgagccggagtctcgcgtctcgctctgtctcccaggctggagtgcagt

SEQ ID NO: 94863 - DNA, 15023 bp, Homo sapiens
aatccaggggattaagaagtacccccgaagttatggagcgcggtcccacttggggagactttttccagcaccaagtaaacgggggacctgcacacccagggtctgagtctcagtctctcttccaagtcccagggtatcccaaatcggtcccccacaatccttcccggacctcgagctgaagtctggggggagggggaggagagtctgagccctgcctcaatcctggcatccctgcggggagtcgctgccaactttgaggtcctctaaaaaaagtcttaacaattcgggagtcctccgagcgcccccaaatcttgagggctcccaggagaacctcaccgccaccaccccccgagcttggggagtcagtcgtggagaagtgatcgacggttctggggcgcgtccaaggggattcagctcaaatccgaggctcccaaggatctgtccccaaattccagcccggagctagctgggggggagggggacaaaggcggggcgcggagcccgcccgggcggggacgggtcggggggcaggtccggctcacctcatggctgctcggcgggcgggcggctcgcccacgggctggctgctcccggggcgcccctggctggaggttcaggggttcggggctggctccgggctcggctcaggctcccccagggtcccgccccatagagtccggcttcctggggagaatgtggaccgggccggggcgggtctccgggcgccgcttccctcaggcggtctgatgagaggttcctgcagcagaaaggggatgcagcgtccgctccccagcgcgcaccccttgccggtggcggctacagtgttactcttactactgtacttctcttcgttacatttcgttccaaaattccactccccgcacccacaatgccccgcgccttaaaggggccgcgtgcgcctccaggcgagggggtggagggcgcttaaaagggcaactctgcaccctcggcttccgcgatctcgctcctctccccaatgttgtagcccaggggtgcaccctgggaatcacccccacctgaggggcaagttggtgaaggggaaggggacctcccttgcttcctagttcgctcccactgtgggaattctgaggagggtctcggaaggggcgcgatttctttccccatcgacttctccatctcgtactccgctcaattttgggggtcgaggaggaccctcaagttaagcaagtggtctcagattttctccctgaaatcccatcttcggaacaccgcccctccccagcgtttctcttctgtcaatttcggagaggttactaagggggcgagacccccacccgcacgggagtggaagtcgggggagtagggcccaacccctctcaccccaccccgcccgccccgggaaggtgaggaggaagtgggccaagggggcgcggtcggtcgctgactcacagccgcagggtcgggggtggggtggggtggaggtggggactggcgaggagtgcgggagtggggggcccggcattcgcccggggtgggcaggaggcgccggcttctttggtgtgtaaagcctccggcccacgcacgccccgctctgactcagtttcgcctgcggaggacagcaggatcatcccagccctcaggagggcccggaggtgaggagaccctcccgggagcccccgcccccacacgccggctccgggctgagcccagacaccctctgaggcttccgcagcgtgtcttgccggccccgccccgagtgacgtcactgatttggtcgcgccccttgggtagagcgccacctggcccgggtgaggcgcccgagccctgggaaatcagttagttccacatttacacacgggtaaactgaggcctggagacagggaatgaatctggcctatggccctcttgcctgagcccccagaacccggaaagccaccaaggtctgagtgtaaaaccaacaattctcagggccagctgactatgtgagagaatccacttttccagcgtatgtccaagccgagtcccatgtccggatgttgatgttgtcctgacctcctttacctggggagcacgtcatccttccaggccaagctttgacattaattcccctccccttctccaccccactctgggagaccttgaaccctgttcctcggaggttatcattgtttctcagtgtgtttcctcaggctgagttgtctgggagaatgggtagactaaatttctttttttctttttttttttttgagatgtagtctctcgctgtcacccaggctggagggcgctggctcgatccccgcttactgcaacctccccctcctgggttcaagcaattctcctgcctcaccctcctaaagtagctgggattacaggcacgggccaccaagcccaactaatttttgtatttttagtagagatgggatttcaccatgttggccaggctggtctcaaacttatgacctcaggtgatctgcctgcctcagtctcccaaagtgctaggattacaggcatgagccactgcacccagttgacttaatcaatttctggacctcactcaccccagccaggcccgcccggctcagcagctcaacaaacttacctagttgaatgagttaccagttcagtgtgaccttgggtaactgtgttctcctctctgggtctcagctttcccatctgtgacataggaggggtggcatttctgggtgccacctacactacaacaacagtcagcaaacatggttttttgtttgtttgtttgttggagacagggtctttgttgcccatgccggagcgcagtagcataaccagggctcattcgatcctctaacctcagcccactgagtagctgggactgtaggtccacaccaccatgccaggctaattttttgtagagacagggtttagctgtgttgcccaggctggtctcaaactcctgggctaaagtgatcagcctggctcagcctcccaaagtgctgggattggaggtgtgagtcaccaggcccagccggcaaacattttctgtaaaagttcaaataggaaatattttagatatgctagacatagggtctggtttacacactcttcagtttttcttttttcttacaaggcttaaaaactgtaaaaaaaactcttcttagcttaagtgctgtacaaaacaggtagcaagacccctgtgtaagagaacgcttgcatatgtacataacgatctttacggtagcagtgatgtgagagcaagaaattggaaatagcttaaatgttcatcaagaggacaggggaggctgggcacagtggctcacgcctgtaatcccagcactttgggaggccgaggcgggtggatcacttgaggtcaggagttcaagaccagcctggccaacatggtgaaaccccgtttctaccaaaaacaaaaaattaaccaggcatggtggcacacacctgtaatcccagctacttgggtggctgaggggctgaggtgggaggatcacttgaaccccggaggcggaggttgcagtgagccaagatcgtgacactacactccagcctgggagacagagcaagactcctcaaaaaaaattaaacaaaacaaaacaaaaaaaagatgagggcagggaatagtgaaacccttggacatccttttctgaagcacggagtgagcagcaacttaaggaggtgtggactgggcaaggtgtgtcatgcctgtaatcccagtgctttggtgctttgagaagccaaggcaggaggatcacttgaggtcagggagtttgagaccagcctggacaacatagtgaggccccatttctctcttttttttttttttttttttgagacagagtttcattcttgtttcccaggctagagttcaatggcgcaatctcggctcactgcaacctccacctcctgggttcaagcgattctcctgcctcagcctcccaagtagctgggattacaggcatgcaccaccaagcccagctaatttttgcattttttagtagagatggggtttctccatgttggtcaggctggtctcgaactcctgacctcagaagatctgcccacctgggcctcccaaagtggtgggattacacgtgtgagccactgcgcctggccgagaccccatctctaaaaaaaaaaaaaaaattaactgggtgtggtatcatccatctgtggtcccagctacttgggaagatgaggtaggaggattgcttgagcccaggagttcgaggctgtggtgagcgatgattgcgccattatactccagcttgggatacagacttagaccttgtctcttaaaaaaacgggtggcatgaagtgtgtaaatgacgtgggtgacatagaatgaaaacatccattaagtggataaaaagttgccagagatacgaagggaatgaaaaaaatcaaggaaacacccagaataccatatattaatacatgtaaaaagtccactttaaactcattgcaagggttaccagtgagatagagagtgtggggttaatttggtggtcacagagatctttttttttttttgtagagacaaggttttgctatgttgcccatgctggtctcgaattcctggaatcaagctgcctcggcctcccaaagtgctgggattacaagtgtgagccaccgcacttgggaggtctcaagtctgtcttgaaaatgccaaatttggccggacctggtggctggctcatgcctgtaatcccaacattttgggaggccgagttgggtggatcacctaaggtcaggagttcgagaccagcctgactaacatggtgaaaccctgtctgtagtaaatacaaaaagttagcctggtgtggtggcacgtgcctgtaatcccagctacttgggaggctgaggcaggagaatcacttgaacccaggaggcggaggttgcagtgagccgagattgcaccattgcactccagcctgggcaacaagagtgaaaactctgtctcaaaaaaaaaaaaaaaaaggggggaaattttatcctgcttctaagccttcatactgattgttccctctgccttagaacactctttggggtatttgcggagctgactcttctctgtcaggtctctgctcaactgtcccctcctcagagacctttcctgattcccctgtttcaaaagccacctcccccaccacggaaaattgagtggctgaagtgtgagagggatagagaaagacttcattgtatgccatcttgcactctttgcatttcaaaccaagtgaatttattacccattcaaaactacctgaattaaataaatcaaaattttaaaaattggaaaaagtaaaaaacccgaagtagctcccctagtcattttctcaacacatcctcctgttttattttcttcgtgacacttgtcagtgtgcaagatgacttcatttttttagtattaattacagactgggcgggagaatggcatgaacccgggaggcggagcttgcagtgagccgagagagcacccttgcactccagcctgggtgacagagcgagactccgtctcaaaaaaaaaaaaaaaaaaaaaaattacagattgcatcttgctatgttgcccaggctggtctcgaactcttgggctcaagtgatcctcccacctcagactcccccaagtgctgagattacagatgtggaccactgcgcctggcgagatgactttatttattgattcccttgtttgctgcgtctcctgaccaagaggtcagccccacagtggcaaggatcttggtgggtcagcctggttcatgactgtgaggctaagacctggcacacagcaggtgccctgtaacgtatttgctaacagactaggcaaaacatgtcttcttgttttttacaagaaaatgtatttggaatcacttatgtaaataaagtttaataatcaaaactctacttcccctcaaaaacagatgagtaataagaaggaaagaggttattggactgggttatctctcagaatctgttcggctctgaatatttcaaaaacatttggttgggtttttttgttttttttttttttttttttttttttcgatttgggcttttttctttttggtctggatgttggtggaatttccccattcgtaagacttttctgtgagagggaagtaagagaagaagaaataagcattttgggttcctacattggccttccttccttccgctggtacatgtagttggggaaagggtcggttttcttctttagttctgttgaggccccagagaascaaaggatccccaaaggacaacagctgtcaggcctccatgtccaaggctgagcccaaatgcgtggggttggacttcccagccccatcctgccccttctgtaacacaaaatgtgggagaaggtaatgagaaattctgtcttgtctcctggcacctcttccttttcctttgagggaccaccatatcccatctcacaatccattaaggtttgaatggagtggaccccaaccccaagtgcgaccccagcctggccaatcagacacagtgactggtcagcatgtgacctggtgtggccaatgagaaccagcccccaaagaccactgctgcaactccggggaaattggcaaactttctccactggggaggacaggctgctggggtgtaagcctggagctgcaagtctccgctaccttaggaggagaccctgaaaggtaatgaagccaactcggagaaaataaaaagagaccattcatgatgacatcatctgacaactagatgcagccatgccttaagactctaaactcttcaattacatggcccagtaaattccctgttttgttttcccagcttgaattgggcttccatctctcacgactcaaagaaaactgacaaatacctccttcagctactgagaaattgtcaacaatcctccctcatcaacatgataatcaccaaactcccacctctgccatgcaaaggccttggggctctaaacccagcttcctccctcccatttcttccctgatgccactccatgccttggtccaccactatacatctttggatatctccaaattctccttagctatctgggccccattacagcttctcttgtctaagacctggatcatactcatgtatgtcctgatggtatctgctgtgcgtctaggccttagaattggtcattagcattccctgaatgtttccatcttattcttggatgtgggaagcacttgggctgatggggcactgcagagcgttgccggctcacatttcttggaggggaatcacagtctcttctctgcatctgcgtctccctcctcatgccttgcacaatgctycagggctgggagtaggaatgtattaatatagcaagctggctgggttgcagtggctcccgcctgtaatcccagcactttgggaggccaaagcaggaggatcccttgagcccaggagtttgagaccagcctgggcaacatagtgagacccagtctaaaaaaaaagagagagagaaaagaaaggaaggaagaaaagaaaaaaagagaaagaaagaagagaaaagaggaataaaatatatcaggcaaatcccttatcctcactggcttcaatttccctgtcactaagaggggtgggcgggggggcgtcccctcctaagagaaacactggagaacacaggatccttacctctccgcactcttctgagacctggcagatctgagaataaacttcagcaatgacagtggccctggagagcacaggaaggccctcaggaggggactctcctccttccaccccaccctcattccaccccacccttcctcaccccaactcacttgcagtccagccctcccccaggaggtaaatctgggatgtcctctgaggccagagtcctgaaaactgtgttcaggctggggggcttctgagcagaggcacacagttctgagaaagagtcaagagttaggctgggcacagtggcgcacgcctgtaatcccagcactttgggagaccaaggcgggcggatcacttgaggccaggggttcgagaccagcctrgacaacatcgtgaaaccccgtctatactaacaatacaaaaattagctgggtgtgattgtgcatgcctgtaatcccagctactcaggaggctgaggcaggagaatcgcttgaacccggaaggcagaggttgcagtgagccaagatcacgccactgcactccagcctaggagacagagcaagactccatctcaaaaaaaaaaagaaaaaaagaaaaagttatggcacagccttcactggccaaccacccctccagctgggcccccagagtctgctcaccagcgattctgcagcccagggctgcgtccagtgctagctccctcctgatcgyctcctcagaaggcctaggggccccagggaagcagaccaggatgcaggtcatgttgtccaggctgccctgaagccggtggagaaaaaggagcccggtgggggagagtccaaggcagagcttcccaacaatccccaggttcaagtcccccacttcattctacttatgcccatttctttcgcgtcccacccacctgccartcctctcytmctgggaccaaacccggtcctaggcgctcccaattgagagaacaatgccttttccctaaagctccgcccgctctgatgtttacctgctcttccaccttccagcactaatcaatacttccggcccggctcctacgacccagaatcgcccctttccaaaagaccacgccctttctcttaagtcccttccactaactctcccgtgcctcaaagcatccctcaggctccgcccctgtattttggccctgcccacttcaggccacgcccttcgcttgagtcctatyccctcctttgctagctttamtcttgcctctctatcaaagccctcctccccaaaaccccgaggctctctccctctgctgcaccaagccccaaaggtaccacgccacgcccccaggaccttgcacagacacgtgtccaacagctgcgcgcagagaagctctggggccaggcccaagcggaggcgtgaagccaccagtcccgccagggcagcaccagacacagtgtcccagacgccatcagaggccaggagcatgaactcgtcctcagcctggcgtgccagtgcggccacctctggctccgcagaaacgagctgtagctcggggggcctccccggagcctccttgtaggtaaagtcgcccaacgctcgcgacacggccagagagccctcgacgcggcggcggcggatggtgccgccagcggcgtggatgcgctcgcgttcccggggtcgaaggggccggtggtcctctgtgctgaaggccacggcgccagcgcggctcagcaccgcgcgggagtcaccgcagtgcgccaggtacagaaaccgcggggagaccagcaacaccacggccgtgcagccgcccgtttccacgcggggccagagggagcgcaggcgctcgtcggcgctcaagaaggctcggcgcagcgcctcgcgcacgccctcgggctcgctaggctccgggcccagctcctggagcacatggcctggcaaatggcgtgcaccgaagcgggcagctcgagccccaccgtggccgtcgaggacggcaaacaaggcccagcccgggggcagaccaggtaacgaaagccaagtgcagtgagcatcctccatgcgcgcgcgccagccttgcgctgcgctcgccccgaagcgcaggcccccagacgcctcggcacccccgtgcggccgctgggcgcggcgcggcgctgtcaacagagaccgaggcccttcgggggccctgcgccccgcctcctcctcctcctcttcctccctcccctccttctccctctcctttttcttgcaagcggtccagaggagacgctgcagctggcgggccaggaccgccatccttcagccctgggatcaggaaggctccaccctgtacacctgcccgccccctccattaatcccctccgctgtgagattttaaaccatctaaatctccttcctgtcctttgacctgctctttaggcgggtcactagaaggaattacacttctgggtctcctgtttcctgcacctacaaagcggggtttgggatctgaatcaggaaaaaaaaagaaaaaagataatactgtaccagtggcaaactattacatagtactaatgtgtcacacactgttatacatcatcatctccagtttacatatggaagaagaaacagagtcacagaagtaaccggtgttccagggaaactaattctagaatctgtgttctcaacacaacactcagtccaagctcctcccacctcagtggtacagcccccagcctcaaaacctgtaaataccatacttggccgggcgcggtggctcacgcctataaccccagcacttagggaggccgaggcaggcggatcgcttaagcccaggagtttgagaccagcctgggaaacatagcgagaccccgtctctacaaaaattaacatttagccaggcgcggtggaacacacctgtgatcccagctactcaggaggcttaggtgggaggatcacctgagcccgggaggtcgaggctgcagtgagccgtgatcgtatcactgcactccagcctgggcaacagagcgagaccctgtctcaaaaagatatatatatatatatatatatatatatatatatatatatatacatattttttttttctttactgtttttagttcgacccctcccctctggggcttcgcttattttctcttccaggccccgcccatccaggattcaggcacacagctccagacccttctaattttcgcagacctggaatcgcctggaatccgaccccacccagttatatttgaataattccctgttgctttagccctgcccacgtttgagctcctccgcgtgccccaaaagtttctgaatcgtttcattcggccccctttctcgctccctctgcaaatctaggctcggaccctacctcagagcattagaatctttccaccccctcctcaatggcaccccgagcaccaccccaacccacccagggatccacgctctcatcctctctgccgtggctcgttcaccatcctctcccaagtccctcgccagactccaggcctccttccctcttcccctaaaggctgcgccctctgcgatctaggccccgcccttcaggccgctttcccctccttcctggctccgtagcccaccctcttggttccgcccctttagtaagaaggccacgcccctccgcctgatcctcggcgtttccccgcccctcaccctccctctggtaccgccccgcccgtcttctggccccgcccccggccgcgcgctgcagtgccttccccacctcggccccgcccgcccccgccgagccgagcaccagggcggcggcggcggcggcggcggcggcggcggctggagcagcccgggaggaggaggcggcgagaatggcagcggcgtcgtgggcgcggcggagatgagcgcccgcgaccccgggcccagggcggcacagccggagtgggcgggggtcccgatgcaggcccgaggggggccatggggcaggtcctgccggtcttcgcccactgcagtgagtagaggaagactggggcctggtgtgggccccagaggttcaggtggggtactccccggtgtcccctcggcgcttgcccgcaggagagccgggatggggggaggaggcataggagacaaaggaagctctcccctcccccgcgctctggcggcgacgggggtagcctgacccggaggacctggacgaaacagggcggaggtgagggggcactgagacagcaggcggggggcgcgctgcgctctgggacgtaccgcccggccccgcccgggagcgaggacgcgcgcggggagctgtcccctggctctggtgctggccgcagctggcggggagggggttgaacggagggtagagccaggatggaaaacaggggtctggctcccaatcacttgccttcgcatcccatccccgttttctgtccaagaggcagccccgacctcgcccaaactgtccaaccctgtcccgggaaaacagccatccgtggtttgggggcaaggactcatgggttcttagcggtctttaccactggttaatggtaatcctggggaagacccacaccattccaggcctcctattccccagctgaggaaacgaggtgagggcacagggcgtcagatttcaatttccaaaccgcattgagcatcatctatgtgcaaagctctgaactagctctaaggggctggattcccagctgaaaacgcctagcctcacaatctctgagctcacagctataacagtccatgtctaccgttctctgtcccacacatgggggttctgacagctggggatttcaacacccttagatctagccatttccatgtctcgcgtgtccagatgccaaaattctaagaattggtgatttcagcattttcgagtatcatcccaacattctatgatcttgtcgttaacttcagattacaaagggaggaccacctcgtctgtctctccccaccgcccttacctctctgttctcacctcccactcctctcctcctcagtcactcttctccagtcatatcttcgcacctctcagttcctcagatgccaagcatggtgcctggctcagggcctttgcactggctttcttctctacctggaagacgtccctgaacatctgcatggcttcctcacttccttcagatctctgctcaaacgtcatcttatcagagaagccttcttgaccaccctatgagaaacagcaccccttcactttctcttcccctacccttctttactttgctccctatgctcatctgcacccgacgtcatatattcacttgtttattgtttgtctatcccaaagagtgtcagctctaggagggcagggattttgtctgttttcttcacagctgtatccccaggacctagaacagtgcctggcacatagtaggtgctcaataagtggttgttgaacgaatgaatgaattgaaacctcctaagattcctactttgaagactctaagattaagattcctggatttggacttcaaagactctgagcttcatcaggcagtgatgctaggttttagagtctgtgtgcagaatgttctaaaaatcccgtgattcaaatattctaagattccaggactgggacacttctgtgattcggacagtctaagcttctaagagtcttcgattctttccctctcgcagaagaagctccgtctacagcctcctcaactcctgattccacagaaggtaagtggtggggagcatgtgaaggggctcagggctgggcagctcagggacctgctgagggaaacaaggctctccttcacccactgcaggagggaacgacgactctgattttcgagagctgcacacagcccgggaattctcagaggaggacgaggaggagaccacgtcgcaggactggggcaccccccgggagctgaccttctcctacatcgcctttgatggtgtagtgggctccgggggccgcagggattcaactgcccgccgcccccgcccccagggccgctcagtctcggaaccacgagaccagcaccctcagcccagcctgggcgacagcttggagagcatccccagcctgagccaatccccggagcctggacgacggggtgatcctgacaccgcgcctccatccgagcgccctctggaagacctgaggcttcggttggaccatctgggctgggtggcccggggaacgggatccggggaggactcttccaccagcagctccaccccgctggaagacgaagaaccccaagaacccaacagattggagacaggagaagctggggaaggtgagatgtccgaggtgctgggaccaaagccaagaggggtgggtggtttctccttggggcacctccaagaagaaagctcacggcctcctctctctaccgtatcagaactggacctacgactccgacttgctcagccctcatcgcccgaggtcttgactccccagctcagtccgggctctgggacaccccaggccggtactccgtccccatcccgatcgcgagattcgaactctgggcccgaagagccattgctggaagaggaagaaaagcagtgggggccactggagcgagagccagtaaggggacagtgcctcgatagcacggaccaattagaattcacggtggagccacgccttctaggtaagcaacgtgtatgaagatgctgcattggcccacagaaggcaaaaggtgagaggattttgaattaaagggaccaacctcgcaaaggaacagtacatagtggaaaagggaagagatagacgtgatatcacatctggctagacgtgataaactccgctttttaaaaaaatttccccggccgggcgcggtggctcatgcctgtaatcccagccctttgggaggccgaggcgggcggatcacttgaggtgaggagttcgagatcagcctggccaacatggtgaaaccccgtctgtactcgggaggctgaggcaggagaatcgcttgaacctggaaggcagaggttgcagtgagccaagatcgcgccactgcactccagcctgggcgacagagcgagactccgtctcaaaaaataaaaataaaataaaataatcctccctcttctggagtgctcctcctagtggctgattttggacaggccaaatccctgaaaaaatacagttctctccttatttagatgtggccgtagaatatttataagtaaactctgtgccttttaaaaactcttctttttggccgggcgcagtggctcatgcctgtaatcctaaacactttgggaggccgaggcgggaggatcctttgaagccaagagtgcaagaccagcctgggcaacatagggagactcgatctctatttgaaaaaacaaacaaaaaccctctttttcctgaccacatctattggccagttgtaaaatgacccagccttactttaaaatatgctccgcctccaggaacagctatggaatggttaaagacatcattgcttttggctgtttacaagacggttccaattttggaattgtccccacctctg

SEQ ID NO: 94864 - DNA, 21375 bp, Homo sapiens
catcttccttaaactctgcataaaaaagagagagagaaatagaacatttccacttccctgtggccacacaaaccatatacataaacccaaatcattaaaaaaaaaagttgtttcttacatcttctgagtgcaagatggcatcttcctggagtaccatgtttcgagctgcctgacctagcagctggaagacaaaaataaaatggtaataatcaaaattcccaaacttcctgtaatcttctctctgcagctgttacactactaccctctctcctctcccactcctccaccctatacaaccacaaacactcaaaatgtaatgaaggataattttctatttgttcatgttgaaaattcatttcattggcactatggcagttctggcatggacccgacatctgtttcaaaggccactgcctgagaaatcaagtgcttcctaactgctgggctgttggcacagtgtattcattaagtgctaagagaagtctgcaaaaaaactttggctccacaagtccagtgagagaacatgactcgtaattctttaaaggcagatttgagatttggggttgtttgaaagtagtaaagatgcaagagttagaatggggctgaaaaggacagaggaatacagctatttagaaatgaaataagagaaggccaggtgcggtggctcatgcccgtaatctcagcacttcgggaggccaaggtgggtggatcacttgaggtcaggagtttaagaccagcctgggcaacatggtgaaaccgcatctctaccgaaaaatacaagttagctgggcatggtggctgcgcttgtaatcccagctacttgggaggctgaggtgggagaattgcttgaacccaggaggcgaaagttgcagtgagccaagatctcaccactgtactccagcctgggcgacaaagcaagaccctgtctcaaaaaaaaaaaaagaaaaaaaaaatggaataagagaaacagtggggggtgtggggaagccatgaggagaagctcagggcttaaaatggggaaccaccccataaaagatgaccagacagggctgggaaaaagaaaagaaaggagatggccaggtgcggtggctcacacctgtaatcccagcactttcggaggccgaggcaggcaatcacctgagatcaggagttcaagaccagcctggccaacatggcaaaacccctctaccaaaattacaaaaattagccaggcgtggtggcacgtgcctgtaatcccagttattcaggaggctgaggcaggagaatctcttgaacttgggaggcagaggttgcagtgagccgagatcgcaccattgcactccagcctggcaacagagtgagactctgtctcaaaaaaaaaaaaagaaaagaaaagaaaggagaaatgtgcaggcagaatttaatgaggttactgagtttaatgggtcctgagtccaaaagagaaaagcagagcttggatttggctggatggtctacagtcaaggagagctgaccacattagcactgagaggcaagcagagaccaacagagatttctggcctaatactgcaccctgctcctggcatacctaaatccagccaagtaaaaggagctactgttatgtgtatcctaccggcccttccctgttctcttgggtcagggagactctagtgaaaagggtagcgtgacttcaaagtaactaggattgccagatttcttccccaacacagggcaactttatttaaagttttaaagttagtaaccctttctggatgtctaaagtcaaaacaataaaataggattttccatctctgtccctttctttccctgttctctcccccatatgcaaaactatttttttattttttaattttcatttttttgaaacagggtatcactctgtcacccaggctggagtgcagtgatgcgatcttggctcactgcaacctccgcatcctggattcaagagattctcctgcagcagcctcctgagtagctgggattataggtacatgccaccacgctcacctaatttttatatttttagtagagacgaggtttcactgtgttggccaggctggtctcaaactcccatcctcaggtgatccacccgcctcagcctcccaaagtactgggattacaggcatgagcccctacacccagccccatgcataactatttttattagctttgtggttttctttccattgttcctttttaaacaatggacacatgtatttattttcctccataccactttcctacttaaaatgtaacatactatgtgtacttgtttacaccttgctctctctctctctctctctcgctcgctctctctatatatatatttttttttttttttttttgagacatggtctcactctgtcacccaggctggagcgcagtggcaccatcactgttcactgaagcctcaacctcccggactcaggtgatccttccaccttagcctccagagtagctgggactacaagtgcatgccaccatgcgcagatagttttttgtatttttttgtagagatggggttttgccatgttgcccaagctggtttcaaactcctgggctcaagtgatttgcctgcctcagcctcccaaagtgctgggattataagcatgagccaccgtgcccagcctacaccttgctgttttcactttgcaatagatccctgagggttatctgcagcaatacatattgaatctcctattcaattgctatctcctaatgaatccattgctcttttacaactgcagagtaccacactctacaggtgaccataacattattcagtcagttctctgctgacggatttggaggctgttcccagtcttttgccacggtaagtagtggtacaaaaaattctcaaatcttggatcttatctcatagcttttactgttacaaatatctcctatctttgcatctttttgccagcatatgtttgggatggactcacaggactgtgatttgtgactgtggggttttaattttgctacatattgccaaattcctctcctttagggctgtaccactttgcattcccaccaacaattatgagagtacctgttcctcctgtggctacttttaagggtaaacttcaaactcctatagatgggagatggtgacttacaaaccgatggcagaaaaaaaagggttccaacaatctacttcattcacttactcatttaataaacatttgttgagtgtttaacatatgcccttactctggttaagagtgataacggggctcagaatctggaggggttacaaagggaacataggcacttacatcaccttatggtaagtgctgatggggaagcattggctgctccgggagcatgtagtggggcaggagtgtctaactgattacaggggtaggtgttcaggaaaggtccctaaaagaagtgacttctaatctgagacttaaaagttagggtttagaattcatctttgtgtgtaattctagagaaaaatggcatgatccatttttctgttttagaaatgtggtaagcaggtggactagagtggggaatgaggcagagagattggttaggatgacacagcagtactctaagcaaggaatgaggatggcctgaaacacagaagtagccaagaaaaaaagaaacaaaggatttgtgagacatttagaaaacagactcaatgggagttgtggttgccttgaaggcaggggctgttgtaatgtaaagccaaggcttttccttgatatattcattggcattctgcatcactttcctacataaacagaccagacacataacataccatctgagatttctagttttgctttctttaaaatggaagaacatcttgaatacacctgtaaaacaatcttcactacagaatctttttagatttctataaatttttctcctaggcttttaccattaacttgttcataattaactcaataacaatttgtcttagctactcatcttcaacaagtgtttctgattttcaacttagttttcatagcaatagcaaccctcttttttggtactcatatttcatttttcgtattatttcattaaattacgtagttgcaactgtaagcataagtgccatacacacatttaaaaaattgttttcattctttttttttttcctttttttacagagacaagatatcactatgtggcccaggctggtctcgaacccctgggcttaagcaatcctgcctcggcctcccaaagtgttaggattacaggcatgagccactgcgcccagcccacagacacatgatgtttagaaaaaaacacaatggaccctcactaagcacacaactcaaatggaggaggagaagcgcaggcatgcaagagacaagcctatgagtcataaccactcattatgctgtgggcaaatgtcagtgtgtttctcctcacaggctctctccccagagaccccttccctgatcatctgtttaagattaaccctttcgaccgggtgtggtggctcatgcctgtaatcccagcactttagggggccaaagcgggaaggatcacttgaggtcaggagtttgagaccagcctggccaacatggtgaaaccccatctctactaaaaacacaaaaattagctgggtgtggtggcaggcgcctataatcccagctactcaggaggctgaggcaggagaatcgcttgaacccaggaggcagaggttgcagtgagcccgagatcgggccactgcactttagcctgggtgacagagctagtgggactcctcctctgtctcaaaacaaacaaacaaacaaagattaaccctttcatcactctctattcccagattaattttgcttcacaggatttaccaccacctgatttttttctgtttcacttgtttatcgtctgtctcttcactaaaatgtaaacttcccaagtagagggatttagttttgtttattccgtgtacctagagcagttcctggcacatagcagacacccaataagtatttgttaaatgaatactgtggaatgagttttttacacatgaaattctcagctaatcaaacaaaatagctatgtggagactgctcaagaagcaatgctgccaggagcggtggctcacgcctgtaatcccagcactttggaaggctgatgcaggcagatcatgaggtcaagagttcgagaccagcctggccaacatggtgaaacctcatctctactaagaatacaaaaatagccaggtgtggtggtgcgtgcctgtaatcccagctactcaggaggctgaggcgggagaatcacttgaacccaggaggcggaagttgcagtgagccaagatcacaccactacactccagcctggcgacagagctagactccgtctcaaaaaaaaaaaaaaaaaaggaaaagtacttccttcaattagtcattctaaagacttcatgaattaaactccataaaagacaacagtgtctagcatatataaaatgctaaataaatgtacgtttattatgatgaatatgttgaatatttacaggtggttaactataaacacctctagttgaaaatatatataatatatattacatatattatatataatatatatgtatattatatatgtaatatatacatacacattatatataatatatacgtatatatattatataatacgtaatatataatacttatatatataattcgcctcccaggttcaagcaattctcctgcctcagcctcccaagtaactgggattacaggcatgtgccaccacgctcggctatatatttttttaattattattttttagtagagacgggggtttctccatgattgtcaggctagtttcgaactcccgacctcaggtgatccgcccgcctcggcctcccaaagagctgttttaaagcacaggttcccatggcatcgcttcttcccccaaccctcacacactgtccctaaccaaagagactgcacaccccagaatgcaacacgcgcctccgcgaagaagacctactcatagcaagtacttcacagcctacaattcccaagatgcaacgcgacctccttcccacagcaacgaaagactgcgactccccggactatcaggccgggagagtccacttccagctcacctcggagctccgggagccyttcagcacctgcttggtgagcgcgattacgtcagtaccacaggtggtcaccttctccgtgagaagcccyttcacggactgaccgaaccgcgcttgagactctggcgttccagtcgccatcatttcagttagcgaacggttgcgcactgacgatggtgagtcgccggggccaaaagacaagcaaagcggaaggaaaagaggcgtctcttcctccatgggaaaaggaagggacgcatgcgcctgatggaggttgacctttgctcactaaactcatgaactattcattgatatcctgaggaaaacagggtccaggcaaacatctctggaggggatggaggacagtttcattgactctatggttcagaatcggaaagcctgcggcagggcatggcggcgcacgcctgaaatcccagccctttgggagacccaggcaggaggatcacctgagcctgagagttccagaccaccctgggcaacatagcgaaactccatctctttaaaaataaaataaaattaaaattaatacaaataattaaaaagaatcagaaggcccggattacagtcccaatgctaccatttagcagtgtgtggctgcaaattactcagcttctgtcttatattcctcatctgttaaacagaagtaataatgtttccaaggggttatgagaatatcattccattcatatatatatacacatatatatatatacacatatatatacacatatatacacatatatacatatatatacatatatatacacatatatatatacatatatatttttttttccccagagtcttgctctgtcgcctaggcctttttttgattaattgagacaaggggccaggcgtggtggctcacgcctgtaatcccaacactttgaaaggccaaggtggatcacttgaggtcaggagttcaaggccaacctatccatatggtgacacacctgtagtcccagcactttgggaggccgaggcagaagggtcactcaaggccaggagttcagtatcagcagcctgggcaacatagcgataacttgtctcattttatttaattttattttattttattttttttttgagatggagtctcgctttgttgcccaggctggagtgcagtggctcgatctcagctcactgcaacatccgcctcctgagttcaagtgattctcctgcctcagcctcccaagtagctgggattacaggtgcttgccaccaggcccggctaatttttgtatttttagtagagatagggtttcaccatgttggccaggctggtctcaaattcctgacatctaatgatccaccagccttggccttccaaaatggtgggattacaggcgtgagccactgcacctggcctcattccattcaattttaacaaacatttcatgaactaaataccagacactgtactaggctggggatagagaaagaaatgaaatacagttcttgtctctgtggaactcccaggctgatgaggcagataggcctgtaaacaaatgaagaaggaaaaacaatctaatagaaaaattggcaaaaggcacaagtaggcaattcaaaaaaaaaaatcaactggctgataaatgtgaaaaatgctcaacatcactagtaatttttattgataacctctttattgtattaataccaaactgatggtaaccaccttgtaagtgaattaatatgtaaaatatttcaagtaggccaggtgccgtggctcacgcctgtaatcccagcactttgggaagttgaggcgggaggatcacctgaggtcaggagttcgagaccagcctgcccaacatggtggaaccccgtctctactaaaaatacaaaaattagccgggcgtggtggtgggcacctgtagtcccagctactctggaggctgaggcaggagaatttcttgaacccgggaggcagaggttgcagtgagccgagatcatgccactgtattccagcctaggcgacagagtgagactctgtctcaaaaaaaaaataaaatatttcaagtagctccatttcttttttagttaataaaagatgtgagaatgttattgtattgaaaattttgttcaaaattacctgtattcaatatcaacattacttcctcttccaagtgtctagattcatatgtctccgttgaatctcatttactgtttactttttgtccttaataaactttattgagtttatgtgcatgaatttatgttataatttatgtacaataacaacattattttttgagatggagtcttgctttgtcacccaggctggagtgcagtggcacgatcttggctcactgcaacctttgcctccctggttcaagcgattctcctgcctcagcctcccgagtagctgggattacaggtgcccactatcacgcctggctaatttttgtattkttagtagagatgggtttcaccatgttggctaggctggtcttgaactcctgacctcaggtgatccacctgccttggcctcccaaagtgctgggattacaggcgttgagccaccacgcccggcctgcacaataaccacattctttaaagtgtacgatttgatgagtgtgacagacgtatacatctgtgaaccaccaccactattaagatacagaacagggtgggagcagtagctcatgcctgtattcccagcactttgggaggccgaggcagaaagattgcttgaggccaggagttcaatatcagcagcctgggcaacatagcgataacttgtctcattttatttatttatttttattatttatttactttattttgagacggagtcttgccctgtcacccaggctggagtacacgggtgtgatcttggctcactgcaacctccgcctcccgggttcaagcgattctcctgcctcagcctcccaagtagctgggactacaggtacgcaccatcgcgcccggctaatttttgtatttttagtagaggtggggtttcaccatgttggccaggctggtcttgaactcctgacctcatgatcggcccaccttggcctcccaaagtgctgggattacagacatgagccaccacgcccggccccttgtctcaattaaaaaaaaaaaaaaaaagatgcaaaacatttcatcaccctcagaagtttccaagtgccctttaaagtccatctctccttctctgtctcacccgggcaaccactgccctgcttttgggaactatagattaatttgcatttctagaatggcaaataaatagcatcatacaggcttttttgaggggaggggggtctttttttgtctggcttcattcttgcagcatgatgatttgacatgttgttgtgcatataactagcctgttcatttttattgctgagaaatattccactgcatggatagttctcactgtgtttattcactctcttgttgatggacacttgggttgtttccacttttgggtttttgttttgttttgttgttttttggttttggtttttgtcgttgtttttgagacagagtcactcctctgtcatccaggctggagtgtatggcataaccacagctcaagctcccaggctcaagcaatcctcccacctcaacctccggaatagctggaactacaggttcatgccaccatgcctggctaatttttacaattttttctgtaaagacagggtctccctatgttgcctgggctcaagtgattttcctgccttgccctcccaaagttctgggattacaggcataagcccatcacacctggcctccacttttggaatattatgaatattctgctatgaacatttgtacacaagtctttatgtgggttgttttcatttctcttgggtaactatctagtagtggaatggctggatcatatggtaagtgtttcagttttcaagaaactgccaaaccattttccaaagtggtttaacactttacatttccgatagcagtgtatgccactccagttgctccacatccacaaacttaggaaaagatggaatgttctatagccatggtaacacgtagctacctgtggtggacagactggccgctcagggtagcctttgaccccacctcctggtgttcttgctcttgtgtgatcctcttctcttccttgtggacatgatctttgatttgcttctaatcgatagtgtatgcacaggtgataggaaacacatgatgatgttacataagattacatgttacatcaccattcccctcatcttgctggagcctctctcttgccagagcctctctctcttgccggctgtgagtaagcgagtggccacgttggagaactccacgtgacaaggaactgcaagtaccatctagtcacctacctctgggcctccagctgacagccagcggaaaaaaaaaaaaaaagctctcagtccaacaatcaaaaggaactcaatcctgctaacaaccaggcacataggaagcagattcttccccagtagagcctccagatggaacccaaccctggcccacacctttactgcagcctgtgagacgctaagtagatggcccagagaagctatacttaggttcctaacccaccaagactgtaagataatacatgtgtgttgttttaagccacaaagtttctggtaatattcatggtaatgtggtagtagaaaactaatatattaccagaactcatttgaaatctgttcagctgggcgcagtggctcacactggtaatcccagcactttgggaggccragtagggaggatcacttgagctcaggaattcaagaccagcctggggatcatggtgaaaccccatccctatgaaaaattcaaacattagctgagcgtgaagrtgtgcgcctgtagtcccagctacttgggaggctgaggtgggaggatcacctgaacccaggaagtcgaggctgaagtgagccgtgattgcaccactgcrctcagactaagtgacagaaccagaccctgtctcaaaaaaaaaaaaaagaaaagaaacagaaaaagaaatctgttcaatcaatttatgacaactcacctcagtgaacccccttttgcaaaccaaacaatcaggatctgccccttcacttctgaatatcaatcattcaggagtttgagtcctgcctgggcaacatagaaagacattgtcaaaagaggctgggcgcaatggctcacacctgcaatcccaggcagaggtgggtggattgcctgagatcaggagcttgagaccagcctggccaacatggtgaaaccccgtctctactaaaaatacaaaaattagccaggcatggtggcacgcatctgtagttccagctacacaggagggtgaggcaggagaatcgctcgaacccgggaggcggacgttgaagtgagccaagatcgcgccattccactccaacctgggtaacagagtgagactccatctaaaaataaaaaaataagacggacattgtcaaaagtgagagaagaaagagaaataataataggaaagttatagaaaaatattcatgccaaaaatacagcctcatttaggttaaaaaatacagtttaaaaatatttagttttagtaatttgtgttttccaaatttctgcaattatgatgtataacttttataatatggtgatgagagtgtgaagcaacacattttgtgtgtgtgtgtgttttaaattcccatttcttgtttctgattggggtgaaatatcaggtcagcttggcagtctctgtaggagtagaaagtagccattcatatttccctaccagctggttgacccgactgaggcccctgcctggatcttaggattcaggcctctccacttgtcagtccagctctcaggctttacacacgatctcctcatccagcctaccccatgcaccaacaccagtttcaccctcctaaaacaccactgtcaccttgctgctccctgctgcagtgctctcaatagctcctacagcctccctataccctttatacccttccattccagggctccagagcctgacacaatgtacccctcagatctttctcagggatcccccacaacacacctctttgtctcttcagctaaggccatcaccattcccctcctgccatgctccttccagcctctgctactctcccttccagcaacacccttctctccctactccttcacatctctacctaacagttctgaggtaggaggtaggactggactcaggaaggtgaaccttactctggaggcagggctcagacacctgaccaaattgaggaccagttaaacagatctagggcaggccgggcacagtggctcacacctgtaatcctagcactttgggaggctgatgcaggcagattgcctgagctcaggagttcaagatcaccctagtcaacatggtgaaaccccatctctactaaaatacaaaaattagccagtgtggtggtgggtgcctgtagtcccacctgcttgggaggccgaggcatgagaatcgcttgcacatgggaggtggaggttgcagtgagccaacaaagtgaggttccatctcaaaaaaaaacaaaacaaaacaaaacaaaaaaccaggtccagggcagaagcagctttccataagacccacccaccagtgtgccatgtcactttaccattgccttggcaacacccggatattaacacccctttccatggcaataacttgatggcctgaaaattactacctcatcctagaaatttctacataaaccaccccttaatttgcatataattaaaagtgactgtaaatgtgagtgcagctctgcctctgagctgtgactttgggggcactgcccctgggtagccctgctccacgaggagcagtacctcttctgctctgtgcgctgctgcttgctggctaccaccaccagcttgccctggaattctttcctgggtgaagccaagaaccctcctgggctaagccccagtttagaggtttgcctgtctgtctgtcctgcatcagtcctagctctccttcaaggcctacctcaaatcccctttcttgcatgaaggtttctcataggtttcatcccagcccatacctctggctgcaaatggccttaaaaatctgaacaacatttgaaaattctgagtaatgggcaaccaggcagtctggcttatgaggcctggccagctcttcttcatcatgaggccccctacctgctgccttcctgcctaattccagcagccttcactccatccttactaaacttgcagacagaccactcccagagagtgggacagatgccatcagatgccatctcccacctctgtgagcctcaactaacaactcctgtttggcccatctcttctataatgattgacaccaagaatgtctgctaccttggggctgtgatttcatctggtaatataaaaaaaattttttttttgagagtctcactctgtcatccaggctggagtgcagtggcatgatctcagctcactgcaacctgtacctcccgggttcaagcgattctcctgcctcagcctcccaagtagctgggattgcagatgcacgccaccatgaccagctaatttgtgtatttttagtagagatggggttttggcrtgtcagtcaggctggtcttgaactcctggcctcatgtgatccacctgcattggcctcccaaagtgctgggattataggcgtgggccactgcgcccagcccgagaggtaaattttttgaaataagctttagtggaacaatcctgaagaataacacaagaggaataacaggttaccagtaaggtgtcagccaatttgttccagtcacttttgaatccatgtcctataatctaaaatttagttctctttccctaagctgagagctttctatcatgtcagtatgtatgttatgaagaaaaggagacttaggtgagatgtttgtatttatcacaactgctgcatcaattgcctaggacttcaacagcttcatggaagtctgggaaatgttcaggcataaggttattgccttagctgactgaaaattgccccatacagtggtacatatcaacccttagtgaggccttttaaaaaacaaacaggttgaaaaatagattaaagtaggcaaatacagcatctgtctttagagctatcaactcaggaattctctcaatttttttttttttttttttttttttgagatggagtcttgctctgtcacccaggctggagtgcagtggtgcaatctcggctcactacaagctctgcctcccaggttcacaccattctcctgcctcagtctccggagtagctgggactacaggtgcccgccaccacgcccggctaattttttgtacttttagtagagacggagtttcaccgtgttagccaggatggtctcgatctcctgaccttgtgatctgctggcgtcagcctcccaaagtgctgggattacaggcgtgagccaccatgcccggccaggaattctctcaattatgaaatcttgcagagaagttatttttctttctcaaaatccagatgatgacaatattccttactccagatctggcattttttcatcatcactgtcttgtgaatgatcatctgctccatctgctaaatctacatcctcttcaccacccatgtggttcatcatctcagagaaataatcaaaatcagacatggcttcatctgaaccatcttcccagtctttccaatgattggagtccacactaagccagttaagctttgccctttgttttgttaaccttggccatgactggccccattttcctttttgtaaacaaacaaaaccgatctgtccattctcttatgcttgaaatcatttggatcaatacagtgaaaaagattgatgccatataaatgcttaaaatgatcacttccaggaagtggcagtacaagggcttctgcacggatagcagagcagtggtcccgaccacagtgcatgccctgagctctccgcctcccctgcctgtctgcgaggtggcagcagtgccacaagcagcccacggcagggtggaacacccacatcgacaacctcgtggtggaagggacctgtaggatgcagccatcgtgggctacaaggacttgccttccatccaggccaccatccctgggaaaaccttcatcaacgtcaagccagctgaggttgatgtcctggttggcaaagactggtcaagtttttttgtgaatgaggtgacacttgggggccagaaatgttctgtgatctgggacctactgctgcaggatggggaactgacctatctttataccaagagcaccgatggagcccccaccttcaatgtcactgtcaccatgactgctaggatgctagtgttgtaggaagtcagggacccaaatggagggatgggctggaggcatggcagaggaacagaaattgtgaagatttcattttaatatggacatttatcagttcccaaataatacttttataatttcttatgcctgtctttaatctcttaatcctgttatcttcataagctgagggtgtatgtcacctcaggaccactgtgataattgtgttaactgtacaaattgattgtaaaacatgtgtgtttgaacaatatgaaatcagtgcaccttgaaaaagaacagaataatagcgatttttagggaacaagggaagacaaccataaggtctgactgcctgtggggtcgggcaaaaagagccatattttctttcttgcagagaggatataaatggacgtgcaagtaggaaagatattgctaaattcttttcctagcaaggaatattaatattaataccctgtgaaaggaatgcattcctccggggaggtctataaacggccactctgggaatgtctgtcttgtacagttgagataaggactgagatatgccctggtctcctgcagtaccctcaggcttactagggtggggaaaaactctgccctggtaaatttgtggtcagactggttctctgctctcgaaccctgttttctgttgtttaagatgtttctcaagacaatatgtgcaccgctgaacatagaccctcatctgtagttctgcttttgccctttgccttgtgatctttgttggacccttatcagtggttctgcttttgccctttgtcctgttccctgagaagcatgtgatctttgttagacccatattagtagttctgctttttgccctttgaagcatgtgatctttgtacctactccctgttcttacaccccctcccctttttgaaacccttaataaaaacttgctggtttgaggctcaggcgggcatcacagtcctactgatatgtgatgccacccccggtggcctagctgtaaaattcctctctttatactgtctctctttatttctcagccagccgacacttatggaaaatagaaagaacctatgttgaaatattgggggctggttcccccaatatctggcacaccaatgtggttttctttctcctaattgcatgtgggaacctgattccctttggtaggtgcggagaaacgttcattggtctggtccacagaaatgcttgttcagctctctgatgattggtaagttgtctgtgtattgtccaggctaactttgggtcactcagagtctaaacattatgcttatctctgccatattaaactcctgttaaaacaggggggagttcgggtacccatggaaaatatggtcaccctattcagggcagtggaagaacattgtcctttgtttcctgaaaagggaacattagacgtggaactatgggatcgtgttggtgcaaaattccgggaactggtcccaacaggaaattatgttcccgtcactgtttggggtgactgggccttggtatgtgccgtcctaatgacataccaatcccatcaccccctgcagttaccacagttttctgaatctggaaaccctccacctcttcctcaaccttcctctcccgcacggccttcgttacctgatcagcctctcccttcgcctactccttccccacctgaggatattgaagattcaatatctaactccagtgactttggcttaacgtcaccccctgatgatcttatttcttttcacgaacagccagtacttgtagctcccacggccccgacttggacagcccaggactgtatctatgctaactcttccctcttcaaacctttgcagcctttgcctccggagccatctaatggctccggaactaaactacaatttacctgtaattctgcaggccctcccccatccaccacagcccctcaccctcctgtcatttcggttcctcaactggtcactttgccatccactcaacctgcttctctgtacccttcttcacatgtggacacccctgccactctggttgcacaggattgggcaataatcaccagtatgcttctgcctcttctgctcctctggtgcccctttctcacgctctcatactggtccaacctcctcagcctcagtttcccttatctacacataattttcctgtcacttctgtgccaactctgtctcatgtgcctgttgttgaaatttccatgcaatgcttattacgccaaaacaaacaagtggattagaggcgtgggcttatccgttcatgctggaaccttgcaatgctcaaggggtacaagtgcatcgataggcgctgctcaatcttacctttttaaaagaattcaaggatgcttgtactcagtatggtcctacttctccatatgttaaaatggtattacagactctttgtactgaggtcattttgcttcctttagactgggacttttggcaaaagctgttctaactccatctcaacatttacaattctgtacctggtggtcacgggaggcccatctgcaggctcagctaaatcgggctgatggcattctaattactcaggctcagctcacaggctccaataattactctgacactactgcccaattaggctttgatgctctcaccgtggaacaagtaacaaaggtgtgtatgagagcttgggataaattacgcgccccaggccaagctcctgtttcttttactactgttaagcagggtcacaatgaattatatcctgattttttagctaaattacaagatgctgttgaaaaatctgtctctgatgagcacgctcaaggtattcttcttcgaatgttagcttttgagaatgcgaaccatgagtgtaaaatggccatgcattccgtccaacaacaaaatttacctgatcgtgaggtgttgcctgagtatattaaatatgaaggcattggatcagacacaaagctattctgtgcccacaaagctattctgtgggcacgggccatgaaggacggcaatcaaactggctcgactgattcttttcttggagcctgctataattgtggtcaacttggtcatactcgaaaaaattgcacagttaaaaacttaaaggcagccaagccggctcaaaaaacacagccaaatgctcctgctactgtttgcccttgttgttgtaaaggtaaacattgggcaagtacttgccactctaagtctgatatagatggaaatcccttgccacagaaccagggaaatgggaaatggggccagtcctaggccccaatttcaaatgggacacctcagactcagacgaatgttgcctttctgcttcaatcggtcccaacgcagcccccagcacaaacaaatttacctacagccaacccagatgwgtcccagcctcttcttctgtctcagtacaacgcttatctatgctccagagtaaggggaggggcggtcaatctctgtagtaccattcctctaaatttactacctaattctttgcctttaattcccagaccaatacctggaaacctggaacgattataacatggggaagagggtatgcttgtgtttcaccaggagatcatcaatcccctgtctgggtgcccactagaagacttaaacttcatgtgaatactgacaataaaaaccacagggaagagacgtccacgtcagagaccaccctcatacctggtgagatctgtgccaactcctcagaaactggcacgccaaatcaaaatgggtctggttcaatcctccctaatggcaacagaaacccctctaactaatcccacttctcctaattccctttctttttctccttacgaacctaaaaatctcaccatttctattagcctgaaaataacatccccttattcttctattcctccttcagcactggatcttgcttacaataggttttatttaataattctcttccttatactttctgtctcaccagtttcccctcacattgatttacctgctacacaaaattattcttgctgggcttatgtgccttttcctccacttattcaacctctcacctggatggatgctcctgcggaaatctatactaatgatagtgtgtggatgcctggagctacagatgaccgttgccccactcaaccaggaaaagaaggcactgcatttaatgttcctacggttataaataccctcctctgtgcctcggacatgcacctggttgtatccatctagaaactcaagtctgggctgcgtaccttctggagagatcagccacaggggaacggggacatttggtctccagcctctccctttctcctttaagacaaatgaaagggggagtaataggagataccccctactttcaatataaacctgtaggaaaaccatgtcctaaaatttttgagggcccatctaaatctttaatttgggaagattgtgttaattcacatgcagtactattaaaaaatgactcatatggtttagtaagagactgggcaccaaagggctatttgaaaagcagttgctcttctgctggaagggaatgcctggaggctacttgttttatttcttattgggaggacgaggatcatcatcctactttgcataggaggttcagctcattctgtcccttaaaatgggaagataagagcattaccccctgccacccgaggcctcttatgatatcccccattctgagcccagaacacccagaactttggaaattggctattgccatgtccagactgcgagtatgggaaggggaaacttttctttctgttgtccccactaccacccctcacatccgtgattctgaaacccatgataaatcccctttggaccattttcctctttttgatgccagtcctcctttatgggactctgattggcattatgataattcttctggacccaggtatgtccccctacctcttcagaatccccgggcacctcggattgcttctttacggcatcaaacattgggcgttgccaccgccactcctccccctcggtatcaacgtagattcaaacattctgctttgtttacctccagcctgactattatacagagttgtgttaagcctccttacatgctgttagtgggaaatatcaaaatttggatgaacaatcaaaccgtccaatgcattaattgtcatttatccacttgtgttaactcccgttttgactcaggaaaagtgtaatgttggttcgagcttgagaaggaatctggataccagtaactttacccagaacttgggaatcttccccctcagtacatttaattaatgaagtgttacaacgaattctcaaaagatcaagagatttgttttcactttaatcactgtgatcatgggcctaattacagtcactgcactggccaccactgccggagtggcattacaccaatctattcaaatggctaattttgttaatgattggtaaggcaattccacccaaatgtggaatcctcaacaaggcattgatcaaaaattagctaatgatttaagacagtctgttatttggcttggggaccagctaatgagtctcgaacatcacatgcaaatgcagttcgattgcaacacttctgatttctatagcacaccatattcctacaacgagactgatcatgggaaatggtcaaaggayaccttctgggtagggaagataatttatccttggacataactaaattaaagaaacaaatttttgaagcctctcaagctcatttatccattgtgcctggagctgaggcgttagatcaggtggcagaaagtctttctggactaaactccacaacttggattaagtctactgggggctccactgtaggaaattttggaatcatgtttctctgtttaatcggcttgtttttagtgtgccagaccagtcaaagaatcctgcatcaaaaccgagagaacgagcaagccttcatcgccacggcacatttatataaaaagaaagggagagatgttgcgggaagtcagggaccctgaatggagggactggctggagccatggcagaggaacataaattgtgaagatttcattttaatatggacatttatcagttcccaaat

SEQ ID NO: 94865 - DNA, 25368 bp, Homo sapiens
  misc_feature (1)...(25368): n = A,T,C or G
agagtctgacgcctggaagctgtaggaaccgcatggccagctgtactcacactgctgacccccgtctgggccactcctgcgtggcaggcacacaggtggctcctgctgggggtagagtttgtttgccaggggggcacgcaaacaagggaggaagggccacaggcaaatgagcggcagctggagcagcaccaggtgtgcagggccgggactcctctgcctctgtgttgctttgggggtgccctcggggacacagcagactccaggcgcaggccctcccaggggaactggggggcactcagcttcagctagggcctggcagacctagcagataccaggaggtgtgccctggctggtgcttcttccccatggtgttgtgaggaggacctgtgagggacacacactaccaccgcacatgcatatggcacatgctgagcacacgtgaatatggcgcacatgcgaacctggcacacgagcacaggaatgcggcacacacacaaacggcacatgcgcatggtacacgcgaatggcacatgcacggcacacgtgcatgggacacgcacggcacacgcaaggaacacatgcatggcatgcaaacggcacacatgcatgccrcacgtgcacagcatacatgcaaatggcacacgtgtacggtgcacacgaatggcacatgcgcatggtacacacaaatggcacacgcacggcaagtgcatggcacacgcgcatggcacacacaaaacggcacatgcaaatggcacacacacggcacacacaatacacacggaaacggcacatacacaaatgccacacatgcatggcacgcaagcaaacgacgtgtggcacacgcgcatcgcacgcaaatggcacgtgcatgacacaaatggcacatgcaaacagcacacacatggtacacgcaaagcrcatggcacgcacatgcgcacagcatacgctcacagcacacacggcatacacaaatggcacacatgcacgtggcacacgtgcacggccaacacgcagcacatacgtgcatggcacatacacgaaaacagcacacgctcacggccaacacgcatggcacatgcaactggcacctgcacattgcacagatggcacacatgcacatggtacatgcaaacagcacatgcaaacggcacacgtgcggcacacgcaaatagcacactcgcacttgggacacgcaaacggcacaagcatggcacttgtacagaaggcaacacccggagggagccctgccctggggcccacgcagacccaggcagttctcccggcccatactgcagtcggcagcctttgccggcaccatatgcagctcccacagaccctgaggtgggggtgacatccaggaagactctgctgaattgcatcccctttctgtccaggccactgttgtggctgggagtggcccccacctccacgcacacatcccacgcaggcctctcctcttttgcatggagaggcggatgtctgccctcccaaccgtcctcccaacccagcctcttggttctgggtgactctgtgtctctcttgtctcacctgtacaacaggcatagtgatgggacctctctgggagaatgggcacacagcagccctgccyccaaggctggccttttctcagggtgtttgttgagccctggggctaacacagccccctgagcctggcagtggggcctcagctcccttggagttaggtgcacccacctcagctgtgtccctggggtgagggccctccccaccctcactgggtgcccctgtgtccccctgcaggaaatcaggcacccagtgcaccccagcgtctccctcctgggaggctgtgtgatttattaacgttggaagacatcacatagattgcactctggaagctcgcatgtctgctgggccgtgggggccgtccctctgccaccccgaggtgctggggtccactgtgaagagccagtggccaggccccaggcactggatggtggctgggctggttgtggctgtctggtagcctttggctgggccacagggtccagaccctcctgttccgtgccccacgggtctcctgagcactgtggggagggggcatcaaggggcacgggggagaagggacacagcatttcactgggtgtagcagagtcccagctcctgggggccttgggctgggctgggctgtgcagacccacggccgctgcgggaggcggcctgctgcgtccctcggggaactggtgccgtgcaggggctacggaggaggctgtcccaagggcggggacttcctgggcccttctgtgaggagccttggtctcagcttccggctgtcctgcccccagtctgcctggcacgctgaggggcaaacaaggcaggagaggcggggagagccccacagtgcccagactgctgttgagggtttctgccagccagggcatggagggcactgagtcccctgggctcaaggctgcccacctgggcagacacggggtcccaggcacgggcctgagatgaggacacatcggctggcagaaaggagaaaggatggagcctccacaccccgggacctgtgacttcaccctggttcgcagatgcaccccacaggctagggggtggcgacctttcgggctcttgcgggcccrgcccccacccctgcctgctctgctctgcaccgcaccctggcgaggcctggctgcgcacgcgtgtaataggccgagggggagccgtggccgaggcgtcttgttccggaccgagagggtgggcctcttctgggctggtcgccaccttctctgtcacagtctgtggttcctaaccagctcagctcacaggggcgacagaggatctcctgttcccgcagcgcccagaaggctctgccacgggactcacggccctggccaccgcagcccagatctgcagcaggaaagccggtgcggccctggcttcccgccyctagggcaggtccagcagggagtgctcggcgtagagcttctgggagacgttgtagacacgctggatgaaggggagggcctcgcctagcatctgcacggcctgctccgggggccccacgttcatggcctccaggaagacctcgcgtgtgggcagcgtgcagaaggycacggtgacggcrcggcgcacgacccaggggtggtaggcggccagcgaggcgttgtaggagtcggcgcagagcgcggaggtgcgtgcgtcctcggggctggtacgcaggccctccaggaacagctgcagccagtgcagggcgcggtgcaggcgcagcaccgtccggcagccagactccgggtggtgggagcggcgctccaggtccaccagccggttgctcagctcgtgggccaccatggcctgcaggctgcggtagtgctcgctctgcgggccgcccctgaggcgctccatgatccgcagcttggagaccacgtccttggagatgaatgagaagatggtgcccaggctgttcagaaacctgtggaagggagcggggctcgagtcctcgcccaggcctggggcagcccgcctggggtgcaggggacgctgcccagcctgcgggggctcacacccatctggaaacgggcagcaaagctggtggggacaggcagtcgggaggcagatgccacatatgggactcgggccaggggagcgcccacctcaggaggcagccctggcacacgcacctgaccaggcccttccagctggcaatgtaggggtccagcaagacctcttccttctcatcgagacactgcttgaaactgaccaggacgactttcagattgaaacctgtctccgagtcatccattttttgataggaacrgaaatacagtagggctggggggctgtgtcgctggggtcagcttgctctgtggctcattttctgtgtgtggaggggaacaaaatagctgcgatcccattgccgctcactgaacactcatgcccctcatggagcttcctcccaggagctgcctggctctgctcccagccaagccgcaggctctcaggcacaccaccctgacccacccttcatcaggattgcgcattcagggaccttggcacagcccctcctgtggatcaggccactgactccgtgtcagtccctgaccccgagagtggccccctctggctttatcagaccactaggccccgctgtctgcagcaggtgtctctgctggtgctttcttgtttttgtttctctctctagatgctgtatctgcttttaccagctggagaaatactaagcccctgccgagagccaagcaccatcctaggcatctatctgggtgcatggggagtgcgagcagccatctggggtggggtcagatgacaacaaagacaggaagttctgaagtcctagacaagaaaacagacacagcagaaagcagagacaggtggggccgggggtggggggatgctgccgggcaggctgccccatcttcctcactgctacatccccaaaagcagaaaagaggctgtagggctggcacttgctggatggatggacacgtgttttcactcctgttgctgaaactccatgtcccacacagatgggttttaccactcagaagattgccacgaggctcttgtactagccctagggagccttccacgagtggcccaggccctgctttggattctgctggcattcacatagtcactccacagatccacagacatccaggcacccatgctttgtgtgagtgttgccaagcacccttgccctgtctccccgggtgccccacgggcccgcacctgctctggggaacctgagagtcagctgcattccacctcgaccaggaagagggcctgggggttcctaggccggttggtgctgggagccctgtcctggcctccctggctgcagggactccatcggtgggggagggggaagggcacccagccgtggtgagagctcctggccaggagcaggtgggcaggttgctcagcaccctaggactgggcccttcatcactagggatcatgggctgcaagccctgcccagcccgtggcccaggctgctggagcactggtgcctgcagggtgctgaagcctggcgttgcaggccccacaggttgggttgcatgcttggcaccaggcggaggccccagatgtgagctcaccgggcttcaggtgtgggggatggctgctcctgggcctcagaaagatgcagtcccatagacttccagcacgcccctcccctcctcgggccttaattttgtccactgagaagatggtctctgaggctctggggtttccttcttggtcaccagatattctgcgggccttgccttcctgcccagattcgagccagtggcaaacagaagctgccaggagcttctcagagctgtggctggtggctcgggaacaacaggaagggcagtggctgtgcaggaggcaggcagcttgccagcccaggaaggtgacccaggacacctccaggcctttcccagggcagcccaacggcccaaggtcagggccgggcgcgagggcggcctgagcacagagcacgggggctgacagcaggctggggggccagcaggagacggggccccacggcgccccaggccttgtgggtgggaccagaccctgtcgagcgagcgctacgagtctcacctgggaagggggcttcagatggcaccggactggatgggcascggttcgggtccctgctccaccgagaggcccaggaaggggcggaggcccggggtggtgttggggaggggccgacctgagccacggctccgtcctgcgcgggagccgggtcctcggccgcccgcccgctccggccctctaggacgacgtcccctcccgctcccggcccctcggcgacttccggaccgtgcgggttgggttgggcaggtgcggccgccgagtccgagccgctcacctaggccgtagccgccgtgcgggccccgtccccgcccaccgccccgccctcgccccgccctcgcccgccgccctgattggttggatgctgcccaatcaggaggcccggcgccccgacccgcgtttccggctagcgcaccggaagttgcagmgaggtggttgcgcctgcgcagtgcatcaccgcaggcgggcctcgcgggtccgggagcgcggcggagacgatgcctgagatcagagtcacgcccttgggtgagtgggagccgccgggagggctgtggggtgggctccgtatgcggctccgggcgggctgggcgccccgctccctcccgtttctcgtggagccaggtgcgcgccgcgggcgtcctccggtctcctccccgcgcgggccctggtgggagccgagaggcggcctagtccctgcacccygggcctccggcagtgacgcgagaacgcgagccccgaggttcaggcggccgtgaggggacgtcgcagatggggccgcggggccttcgcgctcgctgtgcgctttcgtcggtgccttgacctccccgtgccgcgcgctgccgcctccagccctaccagcccttcagtcccttagcccctcagccccgcagaccctcagccccccagctccccagcctctcagcctcccagcccctcagccccccagcccctcagccccccagccccccagcccctcagccccgcagaccctcagccccccagctccccagcccctcagcctcccagcccctcagcccctcagtccatcagccccccagccccccagcgctccagtcccccagaccctcagcccagcagaccctcagtcccccagcccctcagtcccccagcccctcagcccagcagacccccagaccctcagccccccagcccctcagccccccagtcccccagcccccaagccccttaaccccgcaagcccctcagccccccagccccgcttctgcctcctcacgtcttgctttctgtccaccactctgtgtgctcacgcccgagttacaatcaactctcactttagctcttgttctacctgatttctgcaacactgaaaaaaatagcaaaaaacgcaaatatgtactcctaaaagtcctgacagtctgggcactgtggctcacgcctgcaatcacagcactttggaaggcagaggtgggaggatcgcttgagcccaggagttcaagaccaacctagccaacatggcaagaccccatcactccaaaaaaaaaaaatgctaaaattggcagggcgtggtggtgtgtgcctgtggttcaagctacttgggaggctgagttgtgaggattgcttgagcccaggaggttgaggctgcagtgagccatgattgtgccactgcactccagcctgggtgacagcaaaaccatgtctcaaaagaaagtcaaagtcgtaacagtatagaacgatgtgaagaaggaaaaaattagtcaaaatccagggtctcagaaacagctggagggacatggtgttggtggccagtcatcctgatgtccttagcgttttccacaggtgcctgccctgtgctgtcctggaacctggtccttccaccgggcagggggtcgagggcaccttccagcacagacaccaggacgggattccatgtcctcccccatggcgtgagcgcttcctcggagggtgccccccgccccrgtgtggacactgtgctgtgaacacccctggcctgtgcacaccccatggcattttgcagctgtttgcatgggccccactgccctcccctgctctctgggtcctccgtggggtcctcccagcctgcccctttcccatttggcctcttggctgcctgttctgcccactctctggacatctgatctttctgatctttcatgtggcttcaattacccgcaatctgtacctgggtatattctcaaggtcacctcagccaaggtatcatcaaagccgaagtcctgttkcaccgcttccctgcaccagggactgcctcgggctccgtgtccgcgctcactggaccactgctgtgtccttggggtcactcccacgccttggcctgtgtgtggctacccccccccgccgccggtccccctacccaccctgcccatccctccccacggccgtccccccacccaccctgcccgtccctccccctgctggtcccttccctcccccctgcctgtccctccctgctgcctgtcctccctccgcccgccccgcttcttctcctcccctggaccatcccttccccaccccgtccctccccctcccccaccctacccctcccctcccctgctcaaaagttggcttctcggagcagtctcctgtcatggttctggaagttttgaggcttcctcattctctcaccttgctcttttctgtcatagtaaccttcgtctggcgtgctttgggtgtcttgtttgtctgccgtctgtctccttgctgacagggatatctcctcctgtcttctgagccctgtcccctcgtgtatctccaggctctattcccgcacctttccactttccttcctgggatcactgtgggtcctgtcgggaggcgggactgccagtacttcaggactgggctttggaattcagaaaaccagcccgggccccaygcctcggggccgtgtgccacaagtgcctctgtggccttaggtccctgggcatgaagaggggcggccctcccttcccacaggtgccagagggcctctgtgagcctggcgtggcttggggtaggagatgcagagggaggagacagctgagaccctgctctcagagagctcacacccagcgggggcaggaacaggcctggaagagaacctgagatcccctctctgtggcaggcagcccctcggctgtggccccgtcatcctgatgtgtggtgctggctttggacacttcgagtggctggcagggggaggtgggtgggattcaaggggaaaactgttcactgccatcagactcctgcccaggcacagtctgtgcaggggccgtgaccctttcctctcgggcccccaggccacatgagggggctgagtgtgccttggctggccaaggcctctggctggagcagctgggcagggctgcttggctgtcaggagtgtgggagggctgcagatgagggtctgtgttgggggctgcatggtgtgcagtggtgtgaggctcgtgttgccacgctggccactgctggaccactggcaccgtgttcgctatggcatggctgaggctgtgtggcgcccctccacagccgcaccaccagagaacacccagtgccagcacttagtcacttactgccttgcctgcctggggaaagatcctggagaaggtggcctcattggtttgcagctctgctgggggtccagccacagcccaggagtgactctgaccgaggtgttggccccacagaccagccgttgtctctgttggaggctgagggccacagcacagtgcccactacttagccagcaggccgtggccaccttaagaggccaggggaagctggcgggggagggcgtgtgggctgccagcctccaccctggacatgatggtgtggggcatggtcccctgtgtcccccttcctgtgagtaggggtggccctgcttcttggcccatgtgtctgtccacacagcagacttggtccggtttcctcagtgcactggggtcctgcagagcttggggaggcagcacagggggcggggkgcgcagcagtgactcatctgccctccctcgagtaggggccggccaggacgtgggccgaagctgcatcctggtctccattgcgggcaagaatgtcatgctggactgtggaatgcacatgggcttcaatgacgacgtgagtcccttgggcaggaggcccagaggctgggagagccggccatccacagctggaccctgggcctcagagccgggacagtggggtggtgggcagcagtggttgtgcttggatggctgcaccctktggggagcagggatgggtgggcctggccgaggtgagcccctgcatggtggggtccccctgtgctggcgctgagccccagccccggggtcctgtaggctggactccgtgagaccctgggctcagcttccagctcacatctgtcagtgaggttgggggtaacctcggcccctccggatgctgtgagcagccaggggtcctggtgccacctgcgggatgrgagtgcccagcctgagtctgcacatagaaccccccttcctgggggcccctccctggggcatgggtggccccagatgctgcctggagaccactgtgcaacctgaaacccccacatccttcctagcgacgcttccctgacttctcctacatcacccagaacggccgcctaacagacttcctggactgtgtgatcattaggtgggttcctgttgggggccttgagggtcccatgtctgtgcctgtggggcttgggccaccttgcttggtctcggcagcgtttggcaaggggcctgtgccatccttgatcctcagggggcttctaggccccaggatctgctccctgcctgccttactggtcacacacatggcctggtctctgtctgttcttccggccctgccctctgaaccctactttctgaacccggccctccaggcttcaccctctctgatgccttcactgtctcaggatctttaaaccccactgtcttgttggcgattccagagtcccgagtctgccctgaccccagcctttagggttcagcagctcatgacccgctggtctgggtggcctcgtctggacggccacagcactcctgctggccccctgcccttccctgccctgtcctcccagcagccaggcccgtgaagcctggagaagccccttctcctctccggaggcagtgtcctcagctgcccctgagcccctcgtggttgtggtttcttctcagacacggtggggtccccaatgccttcctggggcttgccaggcgctgcccttgccctcaggtctgtgccaccttcacctgcagctccactcagcctgtcctgactgcctgaaaagccagcggctcccctatgcgcggttccctcagcagctttgcattgtctcgcgagcatgtcgccgtcaccgacgtgttcaatttcccgtttgcttattgccttgctagactttgagactgaaagttccagggagacagttttgtgtttgctcattactgactcttcggtactcgggatgaggcctggcgcacagcaggcgaatgaaggggccagtgacccacaagcccagagcgggggtgaaggctggggcagggtgggcccaggctgacctgtgctgcgtccccctagccacttccacctggaccactgcggggcactcccctacttcagcgagatggtgggctacgacggscccatctacatgactcaccccacccaggccatctgccccatcttgctggaggactaccgcaagatcgccgtagacaagaagggcgaggccaacttcttcacctcccagatgatcaaagactgcatgaagaaggtggtggctgtccacctccaccagacggtccaggtcaggttcccagggccacagctggcacagtcactgcccacccccacaccaaccatgccctccgcccgttctacacagtttctggaaggctggggcctcagggtgagcccaccccacctcactcttgcgtccagcaccgtggggacaccaggaggcgtcagcgcgaggatgcgggtcccagaccagactgggcgccgacccgggagagcacgtgcagggtgggggtatgcacnggcttangaacccaccaggctctgtccgagcggcattgaaatggccagagtgggacaggctggtgccctcagagcgcttggagcggccagagactcgctggagctcccggggtgttgccgggcagggaggcaggggctggaggggagatgggccagctctggagggtgcctggttctgggtgtgggtyagggaagaagtgaaggttaaatcagcgagtgacaggtgaaattccatttctgacaaagattatgggtttgtctgtgtctcactcgaatctctgggtattgcttttatatttcttgaaattatattaggtacctatgtattttggaacatttaattttctgattgaacttgtcaaaatgaagtatgtttatcttttttgttgtgaaactttaatttttttttttttttgacagtgtctcactttgttacccaggctggagtgtgatcttggctcactgcagcctcggcctcccgggttgaggtgatctcccacctcggcctcccaagtagctgggactacaagcatgtgcccatacgcccagctaatttattttggtattttttgtagagatgggtatgtgttgctaaggctctcgaactcctgggctgggctccagggatcctcccacctcagcctctcaaagtgctcggattacaggcatgagtcaccacacctggcaactccctcagtacattttaaacccagaaagacatcatttctaatgcctggtaacaccaacatttgcttagttttatttatatatttatcctttttgttgggcttcctgcattttttctactttttacttgggataatttgccttctgcctgaagaatatgagtgtgggtctgctggtgctgaattctgtcaatttttatttgccttggccaggcgcggtggctcacgcctgtaatcccagcactttgggaggccgagacaggcggatcacgaggtcaggagatcgagaccatcctggctaacacggtgaaaccctgtctctactaaacaaaatacaaaaaaattagctgggcgtggtgcgggcgcctgcagtcccagctactcgggaggctgaaaggcaggagaatggcgtgaacctgggaggcggagcttgcagtgagccaagatcccaccactgcactccagcctgggagacagagcgagacgcgagactccggctcaaaaaaaaaaaatttatttgcctgcaaatggatttactttatcctcgttcttaaaggactttttttcccttaggtgtgtaagattttaggttgacagtattttgtctctgcactttgcaaacaacgttctgtctctgggcatgggcagccgtagggtctgagcaggagccttggtttttggtgcttgtgctctgatgggctgacatgtatcctcagcctgtttagagtttgaggcctcttggatctgtggcttgaggccttcatcatgtttcttccagtgttgtttctgccccgttcctgctcctccagggaccccgagagcctgacgttcaacctcttgaaactccgtcatctgtttgtctttcctgtttcctgatggatattccctctggtgtctttcagttcatggattctcttctggttatgtgtcatatggtgttaaattcatctgttgaattctttttttttttcttttttttttgagatggagtttcgctctcattgcccaggctgtagtgcagtggtgcgatctcagctcaccttgaacctccgccttctgggttcaagcgattctcctgcctcagcctcccgagtagctgggattacaggcgtgtgccaccacacccagttaattttgtatttttttttagtagagacgggggtttcaccatgttggtcaggctggtcttgaactcctgatctcaggtgatccacccgccttggtctcccagagtgctgggattacaagagtgagccactgcgcctggccaaaattttgtttttaaattagcctggcgtggtgggtgcgtgcctatagtcccagctatttgggaggcggaggtggaggcgggaggacgcttgagcccaggagtttgagtgagccatgattgcgccactgcagcctgggtgacagccccaccctgtctctcaattttatttatttatttttttttgagacacagtctcgctctgtcgcccaggctggagtgcagtggcgcgatctcggcttactgcaacctccgcctcccgggttcaagcagttctcctgcctcagcctcccgagtagctgggattacaggcgcacaccaccacatccggctaattttgtatttttagtagagacgggctttttccgtgttggtcaggctggtcttgaattcccaacctcaggtgatccacccgcctcagcctcccaaagtgctgggattacaggcatgagccaccgcacccggcaagttttaaatgaataaattaaatttaaaagaagtctagttttttgccaatttttgtttttgacactctcgctcttgttgcccaggctggagtgcaatggcacaatctcagctcactgcaatctccgcctcccgggttcaagtaattctgccttagcctactgagtagctgggattacaagcacccaccaccatgcccagctaacttttgtatttttagtagagacagggtttcaccgtgtcggccaggatggtcttgaactcctgacttcagatgatctgcccaccttggtctccccaagtgctgggattaaaggtgtgagccactgtgcccagcccagtatttttttgtttgtttttaccgagatggagtcccgccccattgcccaggctagagtgcagtggcgtgatctcagtacactgcaacctccacttcccaggttcaagcgattctcctgcctcagcctcctgagcagttgggattacaggcacgcacttccacacctggcttacttttgtatttttagtagagacggggtttcaccatgttggccaggctggtctccaattcctgaccccaagggatccaccttaggcctggccgccaacattctgaaccttgtcttttctctgtcatgtattcaaagtccacgctggaaactccaatttcaggtcccttcagttttttgtccgttgtctttcgttctttgtccacgttgcccgtcccttgtgaactggatgctgtgtgtgagcaacagggactgaaaagctcagtgcagtgccctcgctccccgccccgcctccctccctgcccccgcccccctcactccctgcccctgcctccctcgctgcccgcctccctccctccctccccgcccccacctccctcgctcccgcccccgccccctcgctccccttcccccacgctccccacccccgcctcccgcgcttcccgtcccccgcctccctcactccccgcccctctgctgtgaggacacagcctgagcgcagccctgtcctccacaggtagatgatgagctggagatcaaggcctactatgcaggccaygtgctgggggcagccatgttccagattaaagtgggctcagagtctgtggtctacacggtcagtggaagggcttgaggcttgggaggggctgctggggtgggaggcaccctcctcatggcatccttgatcgttcaccagggtgattataacatgaccccagaccgacacttagggtaagtaggctgaggtgtctttttgtcccgtgggcccccctggagctcaggacccttgcaggtgtcagggtgccagcccttgagtggccagcctggcagtgtctcccatgtcctgtgcggcctggagagcccccttcgttctgggcccaaatgcgcgaaggcacagggtccaggcaggggcctctgtccctccttctctctcttcccaagtctctgggtgggtgcctctgtctcgctcttccgaagtgtctgggtgggtgcctctgtctctcctctctcttcccaagtgtgctgcccacagcattttaccagctggctctttccagccagagtgacctaggaaggcggctgggcgtggtactggggtccagcttgtcacacccagccctgcaaccgtggggacagtgcatcgtggctcacacccccacccccgtgttccagagctgcctggattgacaagtgccgycccaacctgctcatcacagagtccacgtacgccacgaccatccgtgaytccaagcgctgccgggagcgagacttcctgaagaaagtccaygagaccgtggagcgtggtgggaaggtagctgcagcaggggtggggacatgggccctcggccatgctgggctggtctttctggcaggcttggctgcccttggcatgggtcagggtctcagggtggggggtactgcattttcaggcagggagggaagaagatttgctcaacattgaggaggaaaactcagagaccctttcctagggagccccttttccctcctacctcaggtgcggacgaagccctggccaggctccttctgtctctcatgcagctcccttctgtctctcatgcggctccctcctgtctctcatacggctcccttctgtctctggagagcggctgggacgggactgggagcagatgagaggctaaggtccctatgaggccgcagctcttgggcacctggccgtgccctcactggacgctgcctgctgtgtcgaggggccatgtgcccagggctcctgccttgtgtccccctcaggtgctgatacctgtgttcgcgctgggccgcgcccaggagctctgcatcctcctggagaccttctggtaggtgccgccaggacggctctttaaggagcccctggcccggcctgaacacagtccagttggtgggcagccctgtccagcgtagcggtggcatcttggccctgcttgctgctgtcctggggggccgctcgtgtgctgtgtgaccccaggaagcctgtgacatcccgtcagcgccaccgtgtgcggctcttgtaggggttcctggttctccgctgagcccggctgctgcagggcttaatgggacaagtggtcgcgactggactcaacctggcccgtgcgtgggctgtgcagacacgggtgttgggggtgacccggccgagtcctgccctgcagcattctcccctgtggccactgtgctgactgggccggtggtccccagggagcgcatgaacctgaaggtgcccatctacttctccacggggctgaccgagaaggccaaccactactacaagctgttcatcccctggaccaaccagaagatccgcaagactttygtgcagaggaacatgtttgagttcaagcacatcaaggccttcgaccgggcttttgctgacaacccaggaccgatggtgaggcccgcggcagggccggccagcacatccacacccgtcggtctcctgtcttccgcaggtgtctgggcttgggcctgcagtgggggtgggggcatctgctgccctgaccccccacctggccctgtgtgtcctgtaggttgtgtttgccacgccaggaatgctgcacgctgggcagtccctgcagatcttccggaaatgggccggaaacgaaaagaacatggtgagggcatggtgaggtgtgggaatctggaagctggaggccgacgggttgtccttccacccatgctgtctctgagctctcactggcttggcctcgtgctggccaagggacgtggctgctgctgctggggaacgggggcgatgtccgcctggagctgctcagtctctgtgacacagcttgtccacctcgggcagaacagccccagcccagccctggacagtcttgtgccaaaacctgagccctttggagtctgcagctaggcttggtcrggcgccgctggcaggtggaaacagcttccaggggttcaggcgggggcatcccgggcaaggccttgaggtgccaaggctggagttccctggctgtgagctctgtgcctgcccccaggtcatcatgcccggctactgcgtgcagggcaccgtcggccacaagatcctcagcgggcagcggaagctcgagatggaggggcggcaggtggtgagtctcgaccccgcactgggctggcagggccgaggggcacctcctggtggtaaccactrtccacgccccgtggcctctgtagctggaggtcaagatgcaggtggagtacatgtcattcagcgcacacgcggacgccaagggcatcatgcagctggtgggccaggcagagccggagagcgtgctgctggtgcatggcgaggccaagaagatggagttcctgaagcagaagatcgagcaggagctccgtaggcagccgggcgggcggcgtggggcccacctcgggtcagcacgggcagcctgggctgaggctctctcttcccccggggtccaggggtcaactgctacatgccggccaatggcgagacggtgacgctgcmcacaagccccagcatccccgtaggcatctcgctggggytgctgaagcgggagatggcgcagggtatgcgggctgggcagggcagggcagggtgctcggggcaggcggctgggagcggccctcacattgatggctcctgccacctcctccgcagggctgctccctgaggccaagaagcctcggctcctgcacggcaccctgatcatgaaggacagcgtgagtgccaggacggtctctggaggggggagggccgctgctgcgctcactgacctgtccctgccccacagaacttccggctggtgtcctcagagcaagccctcaaagagctgggtctggctgagcaccagctgcgcttcacctgccgcgtgcacctgcatgacacacgcaaggagcaggagacggcattgcgcgtctacagccacctcaagaggtgggcgcccggccccgccccccccccactcccttgggccctggaggccaggcagggtctcaccgagcctccccacagcgtcctgaaggaccactgtgtgcagcacctcccrgacggctctgtgactgtggagtccgtcctcctccaggccgccgccccttctgaggacccaggcaccaaggtgctgctggtctcctggacctaccaggtaaggggtgacccccaccccaccgcggtcaacacaggtatcaacattcctccctgtcctgcaccacccacaatgcttttgcctctgccctaggacgaggagctggggagcttcctcacatctctgctgaagaagggcctcccccaggcccccagctgaggccggcaactcacccagccgccacctctgccctctcccagctggacagaccctgggcctgcacttcaggactgtgggtgccctgggtgaacagaccctgcaggtcccatccctggggacagaggccttgtgtcacctgcctgccyaggcagctgtttgcagctgaagaaacaaactggtctccaggctgtcttgcctttattcctggttagggcaggtggtcctagacagcagtttccagtaaaagctgaacaaaagactacttgrtactctcttcttggtgtacatggctgtgtcctgcactgtgccccatcccgcctgggacagagacrggcatccagggtgctgggacccgggcagggaggctactgtggagaccaggcagcagtgctgtgggccccaagcagctgtgactgccctggcttgaccagcacagggttgggcctggtgtggcctaactttggcttgagtgtccagggtcatccgtggctcccgaactgtggcccctgcagggtgcaggaggcagcacctgtggacggaccagaccctgcgtcagcctggggcaagaccggcccagcaccctccccaccgctgagaccactcccatgaccagggagtgggccagcccaggacgggctacgggctggcctgagggactgcagccctgggcggggggctgcttcacccccagttgctgccgtcagtggcccctggccccccaccccatgcctcggccacagtagtcactgggcacatgacaggagcttctcgtgcctgtttttcttaccgaggttcccgtacagcactgacttgaggaataagccgtgggctggggctacacgtgtctggtgcttgcccaggggatcttggctctccagaatcgtcttcacctgggcaggtgccaaagcccccagccccacggccaccagcacagcygtcatyctccgtacctgtgacccagagccacctgtgacccagagccgcccgtgacccaccagcacagccgtcatcctccgtacctgtgacccagagccgcccgtgacccaccagcacagccgtcatcctccgtacctgtgacccagagccgcccacgacccagagccaagactgcacaggggcctgcccaccctcagccccaccccctggggacggccccagaacagagcctacctgtctatacaggaaagactggctctcaaactccaggttccagaaccgcagcttcctggaaaaacacgtacctgtaggtgtctgtggggcagtgtttgccatcctcagcctactatgtggccttggacgggagagtgacagggtgggcctaaagacgagcctggttcccactagcttggccaccaggggccctggctgatctcctgcccccagtgaggcccattggaggggcttaaaaccagagaaacaatgcttgggcaaggaggcagcaggaccctggaggctgggcaggtagcctggccatcccagaggggcttgccctgggccctcacctagggtcctggtgcagggtctgggaacgtggctggtgcgggtgccagagacccccagtcctgtacctgctgctctgccacagaagtctggggctggcagaagttcttccccccttcagggctcaccccaataggggaggttctggtcagaagctgccacctggtgggtggccctcgggacagtgctgggggcagcagaaaccaccccaccagaaccactggcaccagtgagacctttccagtagctgccaacattcttccatcaggcatggcaggggtttttcagagacaagcagccttccctgttctccgctccccagcctggggggagggcacagctggaggctggggggcgtccgggcgaatcccctccagctgtccaggtcctgaggactcccggctgcctgcctcccgcctcaccttgccttaaaactgggggaggtgctggagctaaaatcagcacgtgacttgagggcagggccacagcccaggggcccttcctcacctgctctcctcgggggtgaccaaggggctggcttggcctggggaaacggagacccrgcgcagcgttcgcacggggctcggcaccgggctgccagcggactggaaggcgctgaagtcgtgtgtgccgaggaggtgctgggcggcttcctgcatggcgaccatatccaggcagcttcagggaccagggtgaccrtcaggagggtggggccggcctgcccgccccctccccgctgtcagggccacactcactctgccgggagagtccagcataggttgcgttcaaacaccggcagctcatcacgccggtgacagccagtggccaggcggtacaggtaggtccgggacgtggctgcgtgacgagcgtggaagtcgctgggcactcggaaggcccgcaggaccctatggcggcaggtaaagctcaccggaggaacgaccccgcccgcccgcggtgtcacattggctctccttccccctcgagctccgaccagacaaggaagtctgtccagatctccagcctccgcccgcgacagatggagtcgggaaggcacagccccagggctgcttaggtcgcgggctcacctgatggccgggtgcygcaggtgtgtgttgagggcctcggccaggacctcgggcgggaagggcggccggcctgagcggcgctggacgtccaggtgcgccgcgttgctcagggcgtggaccccggcgtccgtgcggctggagatggtgaacctgaccggctccacggaattcagccgctcggcggcctcctgcaggaccgagccgcggggcgggcgggtgagcgaggccggaccccggggacgcgcgggcgggagcctcccccttacccctcaccgggcgtcccgtgaccggctgagcgcacctccaggtagttctggaccccgacggcgcgctgagtgcccctgacggccgcgaccccgctgcgggcagaagcgggcggaggttaccgggggcgccctgccctggggtctccgccgccgtctgaggccagggccgcttccttccccgaacgtttggaacccgcgtccagagacatccgcctgcccgcccgcgccctccttcccgcctccgcccgggcccacgtggcgcccgccgctgcgcctgggaaacctacttaaagtcggtgcccacgtactggaagtacacaagatagcgcgcgcgcacggagcctgaggccggcgccgaactcatggcggagcccagccggtggcgtcagaggcggcctccagcgcaggaatcctgcgcgcgcgcggacgcggcctggtcacgccccccccccctcccccccggccccggccgctcttgcgcctgcgcggtggcaccgcgccacggcggccagagtcggggagcggaggcggggccgggcttagggagcggctgcaaagtgccggcccgccgccgagcgcaggcgctctacctctatcgcggcgccccgggaggcgcgcaccaaccacgcggtcaccccgcgctctcgcgggcgtgcattcgttcactcgctcattcattcgccgccgcccacactccccgagcgcgcccgttcgccgcgttgcggccaagtcctcccagacgtggtttttgcaaacgccctgagttgcgcaacggccgggatggttggagcgggcgggcccgcgccctccccgcgccctccccgcgccccacatttccaccgactgtccccggagacggccgtggcaggccccgcctcacttccggaccggggtggtccctggacgctgcgagaggcgtttggcgacgctccccggcggtgacagcgggcggcgcgcgcgggcggcggaccttggcgacgctccccggcagtgacagcgggcggtgcgcgcgggcggctgactttggcgacgctccccggcggtgacaggcggggcggggcgcggcgcggcggcctcattccggggcgggcgggcgccgaggcggcgcgggcgggacgagcggtccgggccggcgcggctgccgctcggcgccgcggtcctcgtgccagtgagcgccgcggccgccgcagccatgaccgtggagttcgaggagtgcgtcaaggactccccgcgcttcaggtgcgccgcccggggccgccggggtgggcgcaggccgggggcgtcgctgtcgcctttgtgcccggcggcggggtggggaggtcagcgccgggccgggccgcggccgccggggaggggctggaggaccggcctcggacaaagcggcggccccgccccgccatgcccygggggttggaacaaaagacgctcctgccctgtgcggccgccccgggtggagggcgtgcgcgtgggcagccgtgggcacctcgggaccgtccgcccccgctctgtgtctgcacctccactgggctgagcccctcccgggccctgcagtccagctctggccagggtcgtctgggtccgtgggggcgtcggcccctggtctctgacttgatcctgtgtccagagcagcgcgtggggaacaggcagctggagccgcgtttaaggcctggggtagggtgcytggaaacgtgaagtggtttgaatgacccaggggcttggaggggtggcggcygagaagagcggcggggaaggtcaggtagggggtaggggttgtgtgcacaccgagtctgcatgttttccatcattcgtggcgtgcaggcgtgtacacctgcgtgaactacatgttcacagacgtgtgcacaagtgtgcatcggctttgcttggtggacatttggcaaacgacaatggaggcaaagaaacctctctgcatccccaagtgcgcacctgcgtgaggccccctcctctgcacgagctcgtgcggggtgcgctcttgtgaactttgcccctctgcgtgcctccctccggacaccaggccttgcacaggacgtgtggatgagctgtgccacggggctgtgcttgcttctgcatgtagcctgccgatgagtgcacgcaagcgtgtgcacacaccacctgtctgtgtgggttcacgtactgtgttagccatgtcagcaacagacacatcaccttgtacacgcgtgttccatcactaggtacacatgttgatgcgtgtctgtgcagtgtctccttgaacacacatgtatgtgtggtaccagtgtgtgcaggcatgtttgtgcatgaacatgtttgcacatgtgtgcttgattgtgtatgtgtgggtgtgcacgcgcgcgctgggtctcttgggatctgctggcaagtcagcatgtgtgtggaggcacggggagcctctgtatccctggagccctcaccaggaggctcaggagccttggagtgggaggctcagggccagccaggagagtggcccccagccctgggcagaggaactggggccatcctctgctctcccatcttctgttgctgacctgggaaaaggggttgaataacttgagcaccctaggatcctgcactgaggacccgggctgtggggaggtgtgggcatggcctccctgctgggggctggaccctggctgaagcacccaccttctccctggcccctccgtcagaagcctaatggacctcctcctccacgcagacggccctgtactgccctcttccagtcgtgtgggggtgctggaacccactcacctctgggccttctctctggtaaccggctctcatgggagcctgttacaggagccagttatgggggctgtggggctgcagtaggtgccgtagagcgactgccctgggaaagtgcctcacccctgtggggcatggactggagtggggagatgagaatggcctggcccagtgggttttggggttaggctgtgatttaactggggttcgaggggctccctgaggctgtcctgggggcaggccctaagggcgtaacttgagtttcctggcctaccgccaggttggggggccaggcagggtgggcgggaagatgtggtctgtaacgtggagcctggtcgccccagcccgggagagggggaccctgcccgcaccctcctggtctggggagggcctagtggcagcccaggtgcagtgggccggaggccaggggagcccgtgtaggggaaccgcctggcctctgttcagtgtgcccctcccctgggtggggcttcaggcgctgagtcatggctttggttggggggcagcctcaccctcctccccgtcctccaagctgctgaggaaatcctgggctgagcacagcagaggaggcctaggtccccaggactgaggaagggagagctgaggggctcccagcagtgggagcggctctcggggcctctgccagggcccaccctgtccccatgagcacgtccgtgagctcctgggtgcagccatccccccttgctggctctccagggacacgggcgccccaaacccgagggcggcagctctgggtgcagctgtctctgcatccggccctgctcaggggtggctgcaactcctggggtgtggcgctctctgctgccttctcctgggaggatggtcccttctctgttctgggatcctccagctgaggtagaggtcagggtccaggggctgcaggctg

SEQ ID NO: 94866 - DNA, 16806 bp, Homo sapiens
tctgttagagcttctgcacctaaaccttcactcatcccactcatgctccagacccaactgcctcttggctctctctgcttgcctctcccatgagtatctcaaacttgatttattaaaaactgaactcatcatcttcctctccaaacttgatccttatctggtgttctccatcccagcagtatctttagcatccatccacccagctgctcaaataagaaaccttgactctaccccaacattcatggatagcagcagcagtggcaggagcagcagcagccattttctaccaggtggcctgggaaatagagaaagctggactgaagcgagacaaaatgaagcaaacacatgccacaaagcatgacagagagtgggagggaaaagactacctaagttcctaaagagcttcacactctggttctgttcttcagctgctgccttactcttggattctatgagactccagtaccttttccaataacccccacccttgttcttttttttggcttatgttagaattgggtttctacacttacaaatataagagttctgattaatataaacaattacattagttatagcaggctaggttgtgctgtgacatgtaagtggctgaactccaatgcatgtccatcgtcagcagggggctctgatcattgcagtccctcaggaagcagccaccatcttcagtgttgttggtcactgttccagagggaaactctgaagggcctggcaccagctagtcaatgctccagctcagaagtgacatgccacctccattcataaattaaccaaaagaagttaaccttgctcctactcacccatgttggggccacaaagcacaatcctgccatgtgtccagaaagcagagagccagaaatatttggtgaagattaaaaactatcatatattttctgctgcctattctgtgccaggccctgagccaggggccagggacacaggaatgagtaagtcatggcccttccttaaagggctccccatgactacgatataaaaccaatactgtgatgggtccactgagactctgctgtgtctcagaacaaggaaatgtctagattaggggtcaccaactcgaatgcctacaggggccaggaagctaatgtcaacaagtggaggaagagaggggaggtgctgcaggtaactggaaaatgcaattttaaaaacatacctgcttctggctgggcatggtggctcatgcctgttaattccagcactttgggaggccgaggcgggtggatcacctgaggccaggagttcaagaccagcctggccaacatggtgaaactctgtctctactaaaaatacaaaaattagctgggcatggtggtggatgcctgtaatcccagctacttgagaggctgaggcaggagaattgcttgaacccagggcgatagagtgagactccgacacacacacacacacaaaacaacaacaaaaccgtacctgcttccaatcatcaggcagatggcccaatgtttccagatctctctaattttcatgagaagccagaaaaccaaatttttacatgacaatttcccattttttaaatgttggcaattactaaacttaaccagatacatacacacatacataaaatcctgtaagcctaagagaacacatctgcaggccagcaccatgagggccagtttgtatcccccaagtccagcacaggaagcaacagtttcctgtactctgtgctggtctgtccacaccaagactgctgtgctcagccgtgagcgctgcacctaatgggacacacatgagccggggctggtccacagacagatgggcaggatgggaggagactttaaatagttcaattccccttaatcgatattttcaaatagcgttgtgtatgtcaagcccagtgctacatgctggagatgcagaaggaaacaaggcagaagcagctctactcttgcggagcctattgccttgaggggaactcaaaggatctggggataatttccctggagaaggctcatggaggacagacggtaataataatgataagatttactgagcttttactctgggccaacattaccctcaatgctttacctataattatgtcatctaattcttaccactatccttgtttcatgtaatgaaactgaggttcaggaaggtcaagcaaatcagccactacaattgtgtacagattctctatggtccagaagaatggaacaggctgtcaaatgagagcacgtacttaagaggctaacacagtatgaccgtatgtggcaataaatgagtgctgagtacatgtctatttcttttccagtctctggaagcattcaagaacaagttgtatggtcatttgttagggttgctagagagggaggctgagtatcagataggtagaaacactgtgcacagccttccatctatgagaatctaactccacttttcctggaataattattttcctttttggcaataataacaaagtaattatcaatgactcctcacttccacacccctacaacagcagcagtagccctgtggatgggagactaaggcccaggaagaatatggaccaaattacaggtgataaaccatcaatcaagtaatactgatggaatgtccatgacacgtaaaccatattgttccaagctctaaatcagtgtgcacagcaggaaaagagcatgagaaaggggcttatacctaagactcagtactggctttggcattaatttactttgactttgagaaggtttttcctaagccttgctttcatctctttacaatgagggggtaggaatatacctctaaagtccttttcagcttgaataattgatataaattatttgcattaaaaaaaatcagacctcagatgtaggaggattcacctttcttcctagaagccagtgagaccacagaaccctgggaactcaaaaggactttagatgtgagaatggtcagtcctcatgggaccaatgagcacttttaaaatgtagctagtccaaaatgaggtgtgctataagtgtaaaatacacactatattttgaagactcagcatgagaaaaagaatatgaaatatctcaagaaaacatttatattgctttatattgatatttttatatattgggttaattaaaatattaaaattaacatcatagaccaggcatggtggctcacacctgtaattccagcactttgtgaggctgaggcagaaggatcccttgagcccaggagtctgagaccagcttgggcaacatagcaaagcctcatttcttaaaaaaaataaaaataaaataaaataaaaataacatcacccatttcttttacctttttaacatggatcctagaaaatgtcaaattacaatgtggcttgcattgtatttctattgaacagcactggtttaaggagaaactgaagaccagagagtaaatgacttttccacagagccagaactggaaccagggtcccctgacttctcattcgaggctctttccactcttaataggctgtggtggccattcttcaagatggcccctaataatcctcaccttctgttgccctagtgcagtcccttccacactgaacagggctcatctgttagaagactacagaaatgcctgtgtgacttctgaggctgggtcataaaaaacattgtggcttccagcttgtctctctttggcatgacttgctctaggggaagccagttgccctgtcatgagaacaattaagcaaccctatagggaggtccacacggtaaggaactgaggcctcttgtcagcaaccataaccaaccacgcaagtgaatgcaccatatggagcgctgatcctccagcccagccaagcctttgaataagtgcagttccagctgacatcttaactgcaagttcgtgtgagaccctaacctagaaacacccagctaagcttcccccaaattcctgacccacaaacgagataattaatgtttactgttaagtcactaagttttgatgatttgttacacagcaacagataatacgcagccttacaaatttagaggtctcatataagaaaaactcacttctatctttggcatttgtacagtgtgagaaattattcttatccttcctccagtctttggcctagctcagggtaacccaactaaaaactgctaaattatcaaacttggggaatcaaacccaggaaggtaagatcccattttattcttagaaggttcttcccttttccctttattgcagaaagaacccaggtctcttgagaatgaaaaagcactacatcacatcaccttcacctgggccattcagagatttgattcccacaaaatcaaaggaactagagcccagaattgctcagttagacacagtattgaggaagcaacaatcgagaaatgacaatctatgacatcaacaatcgagaaataacaatctatgacatctgaatttctctgagacactgctgtcaatagcagtgctaatgttttatatagcatgtgttgcttttcacagtattgtcacatctagtatctctgaggtaggtggggaagatataaataaaacaggatacatatgaaaatagtggctcagagctcatggtatgtccttagtttcatgatcagtgaatgacaggccaggtctaaaatctgggtttcagtaggtgactcaagtcagacttcatgcttcccaaggcaggagcatcctggctgttatgagtactcttcagttggggctgtcctctgagatcagtgtgcacttgtagatctccttaaaggccacaaggaaaggtggcattacttcttccacggtgacgtgcctctggagctccttactcaaggaagtgacgcctgacccaaccagtccacagggcacgatgtgctcaaaccacgtgaggtcggtagagcagttgagagccaggccgtgggatgtgatgtgccttccacagcggactcctgcaaggcaagccaaagggtcttagagtagataccctccactctccgggctttggtgtccctctcagggcgatgagaaaactggattagatcaccggttttcaaattttgtttctggagaaacaagggattgtactcagatgggaaaaggaaacaaatgaaaggaaggggtgcgtggcttcaagacagctgcactcatcatgaggattccaggaaatgtcttttaacagattccaatacttaaaaaaaaaaaagcttggggacaggcgcagtggctcacgcctgtaatcccagcattttgggaggccgaggcgggcggatcacgaggtcaggagatcgtgaccatcctggctaacacggtgaaaccccatctctactaaaaatacaaaaaattagccgggctggtggtgggcgcctgtagccccagctactctggaggctgaggcaggagaatggcgtgaacccgggaggcggagcttgcagtgggccgagattgcgccactgcactccagcctgggtgacaaagcgagactctgtctcaaaaaaaaaaaaaaaaaagtttgaaaattagcacccttatttgccatgacattgtcattcgcaggacgtaacctggcaattcacttctcttgtctctcccttcacagaaatgcgtgttggactagatgtgaggagccttctgcttctgaatatacgatatctgaaaaggggcttaaaaactcaaacgcagcgggtagctgtgattcaaaacccgcgctagatacgcctcctcccggccctcacctccattggtccagccccgtcagaccccgcccccaggcctcaagctccgacctcggctctcaggtaccgccctgcgccgcggcgctcaccgatcgcgcagatcttgcgatcgtctagccagacgccagtgtagggcgggggccgcgcgcgggcgtcctgcaggccctggagctcgcacaggcgcacggcgcacgcctccagcgacgctacgtgcatgcgcaagcgcaggccgagacgccgcaggtcgagtaccgggtggcaaagcagctggcccgggccgtggaaggtggccaggccaccgcggcctgtgacgcgcacctcggcgcccaaggcccgtagccgcgcagtttcctcgggcgtcaggccgccgcgcagcccggccgtatacacgggccccrcgggctcgcagagcaggagcgcgcccgcctcagtccccgacggggcctcaatgcctggctcggcctgcagccgccgcagccagcggtcctgcagccccagtagctcggcgtacggcacccgacccaggcgcaccarccgaacggcgggttgccgcatcgtgcccaccgttgcgtccgcggggccccgccctctccgtgggcctgggggcgtggcctgaggggcggggactcgggggcacaccccgagccgcagctcccaggtgcgtgttaaaagctggaggggggatatgtgatcccaggaccaaaagcgcggggccagactcatcggttcattcaacaaccagtatttagtgcctgctgtgttctgcaggccctgccataggcgcttgatacagcggtgcatagcgtatgaraaagatctgtcctggtaagcttacattcttasagcagacgataagtattttaagtrttaagtaaataaggttatttcacgtataaggtgttaaatgctatgaaaagaaaaataaaacagggtaacgtggtgtgtcctgtgttgagcccctgggggacgcaagagggagattagcttgcctacaaggttattggtggaggtagggagaacttaaagatcagcacctgtaagaaagtgaaggaagcaggaatttgtaggcagaggaagaagttggcctgcaaaacagttgcagcagaggccttgaccaatcccaaggcatgcttggagcctaggatgacccttcagagtagttccacattaaagcaagggggccagaaactcttatccttgcattgaccagtcatggatacaggctacacctggggaggagctgkgawtttttttttttttttttttttttttggcaagactgcttccctcggtggagggcggcccccrgagaaggactcagttgtgwatcatcagtaaccaactccagaagctgagggaatgactgtctaggccctgagggggtgtctggaccacaacatcagctatgttgcagttagagtatcatttaaacaagtctgaattcaatgaatttttactgaggacttttcagacaccataggtgtctgaaaaacatttcataaacatagacataaagatcctaagcaaatattagcaaatcaaatccagcaatttataaaaggattaatacatcatgatgaagtagggtttatcccgggaatgcaaggttggttttgcattctgaaatcaaacaatgtaatttaccttaaaagagaaaagccttcattggaagaaataataaaaawtttttttaaagaaaagctatgattatgttaaaaaatacagataaatctattggcaaaaataaacacctcttctgaccaaaatacttagcaatctaggaatagaagagaaattttccagtctgatgaagggttcaaattatcaatcagggtttggacaagagaaatcacatatgtactattttaattaaatgttttatttgagaaaattggacactcatatgcagttgtaaggaataatatggacagattatatgtaccctttacccagcttcccccaatggaaacaccttgcaaaactgtagtacaatatcacaaccaggatactgacattgataaagtcaagatgcagaacattttcatcaccacaaggatccctcatgttgctctttgtagttacactgcttcttaattcctggcaaacgtctgtgttgtatagatggaatcatacagagtgcaaccttttagaatttttttttcactcagcataattatctggagactcatccaagttgttgcatgtatcaatagcgcrtttctttttattgatgagtagtagtccatagtatgaatgtaccacagtttgtttagccattcactcactgaagaacacctgggttgtttccagttttcagatattctgagtaaaggtactgtaaacatttgtgtacaggtttttgtgtgaactaagttttcatctctccggaataaatgcccaggagtgcagttgctgggttgcatggtagttacatgtttcgttttttaagaaactgccaaaatgctttccagagcggctgtaccattttacatacccaccaccagtgtatgaatgatcaagtttgtctgcatcctcatgagcattagcttttattttagccattctaataggtgtgtggtggtgtcttattgtgattttaatttgtatttccctattgactaatgatgtaagacatcttttcatgtgcttatcttccatgtgtatattcccttcagtgaaatgtctgttcatgtcttttgcccattttctaattaattgtttttcgtactgttgagttttgagatatctttatatattctagatattagccctttgtcaaatatgtgctttgtaaacagtttctcacagtgtatggcttgtatttkcatcctcttaacygtatcttttgcagagcaaaagtttgtcattgtgataaggtccaatttatccacttttccttttattgatgcttttggtttaataactctttgcccagccctagatcctgaagacattctactgcctatttttttaaagattttttattttacatttaagtctatgatacattttgagttaattttttatttattattattatactttaagttttagggtacatgtgcacaatgtgcaggttagttacatatgtatacatgtgccatgctggtrtgctgcacccattaactcgtcatttagcattaggtatatctcctaatgctatccctccccccccccacaaaattgacaaatgggatctagttaaactaaagagcttctgcacagcaaaagaaactaccatcagagtgaacaggcaacctacaaaatgggagttaatttttaaaataggtgtaaaactttggttgttgttgcggttgttcttttttgtttgtttgcatatacatgttacattacgccaacaccatttgttcaaaaggctatgtttcctccattgaattgcttttatgcctttgtcaaaaccagttggacatattcgtgtgatcctatttccagtttctgtattctgttccattgatctatgtgtttattcctctaccaatacaggctgagcatccgtaatataaaaatctgaaatctgaaatgctccaaaatcctaaactttttgagtgctgacattatgccacaaatggaaaatttcatacctgaccttatgtgagttgcagtcaaaacacaggtgcacaacacccagttcatgcaacatccccartgggaaaaaagacccccccagctctcttctgctgcagtttttctgctcacacctggatttccccatgcattcccacaaaaagtaattaaatggcatgygtgcaggctggacacgccaacaacaggtttcccacaatgccccacatggggccaagacctgtgtgcattactcaytgcrtttttttgcttattctctgctgtgtggtataaatatattgttgaaaatgtcaaaaagacctaaagatacccctgtgaatatcagtgataagaaaaagaggaagcatttatgtttatctatagcacagaaagtcaagttgttggagaaactggacagtggtgtaagtgtgaaacatcttacrgaagagtatggtgttggaatgaccaccatatatgacctgaagaaacagaaggataaactgttgaagttttatgctgaaagtgatgagcagatattaatgaaaaatagaaaaacacttcataaagctaaaaatgaagatcttgatcgtgtattgaaagagtggatccgtcagcgtcgcagtgaacacatgccacttaatggtatgctgatcatgaaacaagcaaagatatatcacaatgaactaaaaattgaggggaactgtgaatattcaacaggctggttgcagaaatttaagaaaagacatggcattaaatttttaaagacttgtggcaataaagcatctgctggtcatgaagcaacagagaagtttactggcaakttcagtaatgatgatgaacaagatggtaactttgaaggattcagtatgtcaagtgagaaaaaaataatgtctgacctccttacatatacaaaaaatatacatccagagactgtcagtaagctggaagaagaggatatcaaagatgtttttaacagtaataatgaggctccagttgttcattcattgtccaatggtgaagtaacaaaaatggttctgaatcaagatgatcatgatgataatgataatgaagatgatgttaacactgcagaaaaagtgcctatagacgacatggtaaaaatgtgtgatgggcttattaaaggactagagcagcatgcattcataacagagcaagaaatcatgtcagtttataaaatcaaagagagacttctaagacaaaaagcatcattaatgaggcagatgactctgaaagaaacatttaaaaaagccatccagaggaatgcttcttcctctctacaggacccacttcttggtccctcaactgcttctgatgcttcttctcacctaaaaataaaataaaatacagtgtacagtaaccttttagtcaaaacagcatcatacttggaaactgaaagcctactgttatttgttattgttgcttaacagctgatacagrtattctggtgacactactgtgctggcttacttaacctgaatacactatttttttcgttgtattactggtatgtcattttttttactgttaagtacttatgtgtgaataagtgtaaaaaaatgattgcttatcggtaacatataaattcagaatcaggaatgatggtgatgccaaacaatcacagatcgtccacatgggtggcggagatgttaacacctttgctttctgatggttcagtgtatccacactttgtttcatgccaaaattatttaaaatattgtatgaaattaccttcaggctatgtgtataaagtatatatgaaacataaatgaactttatgtttaaactgggatcttatcctcaagctatctcattgtgtatgtgtaaatatttcaaactaaaaaaaaaaaaaatctgaaacacttctggtcccaagcatttcagacaagggatattcaacctgccctgcagtcttgattactataactgtataataaatcttgaaatcaggtagcctgatcccactttatttttttctcaaaatggttttagttattctagttcctttgcctttccacacaaattttagaatgatatgtatgtctaaaaaatactgttggggctgggcgtggtggctcatgcttgtaatcccagcactttgggaggctgaggcaggtgaatcacaaggtcaggagatcgacaccatcctggctaacacagtggaaccccgtctctactaaaaatacaaaaacaaaattaggtgggcgcctgtagtcccagctattttggaggctgaggcgggagaatggcatgaacccgggaggtggagcttgcagtgagccaagattgcgccactgcactccagcctgggtgacagagcgagaccccatctcaaaaaaaaaagtactgttggtagatctggattggtggctacaaaaaaaatcttgttgggatttttataggaattgcattaaacttttatatcaacttggggagaattgacatatttgctacattgggtcttccagtccatgaacacaatatctctcaccatttatctagatcttctttgacttgtttcatcagcactttgtagctttcagcacacacatcatgtgtgtgttttgttagatttatacctaagtatttcactgttttttgagtgattgtaaatggtatttaaaatttctgtgtctgctacaagtatatagaaatgcagttgattttttgtgtatttatcttgggtcctactttttgctaaactcactcattagtcctatgagttttttgtagattctttaggattttctatggagaccatcatgtcatctgcaaattgggacagttctattttcttcctttctgatgtgtatgcctgtaatcccccccccttttttttttttgccttagagcactgactaaaactttagtactatgttgaataagagtggtaatagcagacatccttgccttgtttccagtcttggagggaaaacattcagtctttcaccattaaatataatgttagctataggtttttggtagatgctttttatcaagctgaggaagttctccctttactaccatttttctcagagtttttatcatgaatggtgttgaaatttgagaaaactttttttgtactgattgatagaatcatggtttttctttagcccattaatgtgtacattacattgactgatttttgaatgatgactagctttgcatagctggaataaatcccagctgtataaatcttttactactttgttgcatttgatttgcaaatattttgttaaggattttttgcatctaagtttatgagggatattgcctgtagttttctttcttttgtacttctttgcctgatttgagtagaagggaaatactagtttcattagatgaatttttaaatcttcaacttttaagttcaggggtacgtgtgcaagatgtgcaggtttgttacatgggtaaaattgtgccatggtggtttgctgcacagatcattccataacctgggtattaagcccagcatccattagctgttcttcctgatgctctccgtctccccactccacccctgataggccctggtgtgtgttgttcccccaccccatgtgtccatgtgttctcatcattcagctccctcttgtaagtgagaacatgtggtgtatggttttctgtttctgcgttagtttgctgaggataatggcttccagctccatccatgtccctgcaaaggacatgatctggttcctttttattgctgcatagtattccataatgtatatgtaccgcattttctttatccagtctatcattgatgggcatttggattgattccacgtctttgctattgtgaatagtgcaaatgaacatacatgtgcatgtatctttataatataataattcatattcctttgggtacatacccagtaatgggattgctgggtcaaatggtatttctgcctctaggtctttgaagaatcaccatactgtcttctacagtggttgacctaattaacattcccaccaacagtataaaagtgttcctttttctctgcaacctcgccagcatctgttattttttgaccttttaataatcaccattctgactggcatgagatggtgtctcattgtggttttgatttacatttctctgatgattagtgatgttgagcttcccccaccccccatttatttatttatttaagagacaggttctcactatgttgcccaggctggtcttaaacacctggcctcaagctatgggcactttaaaagaacgtgtattctgctgttcttggatgcagtgttctataaatgttaattagaatcagtggttaatgatgttggtgagttgctctatatccttgctgattttctgtctcattgttctactggttgttgagagaggggtgttgaagtctccaactgttgtggatttatgtatttcacctttggattctataagtttttgcttcacatatgcgtctctgttgtttgatacatacacatttatgattgctatgtcttcctggtgaattgacccttttattattatatagtgtccttctccatctctaataattttctttcccctcaagcttacttaatctgataatattgtagtcactctgctttcccttggttagttttgcatgatatatccctttttaccctcttactttcaacctgcctttgttgttatacagtcacataccagataatgatgttttggtcaacaacagaccacatgtatgatggtggtcccataagattataatggagctgaaaaatttatgttgcctagtgacaacctgatgattctgatgctgtgtaggcctaagctactatgtgtatgtcttagttttaactaaaaaattttaaaaatttttaaaaaataaaaaatttaaaaatagaaaaaagcttatagaataaggatataaagaaagaaaatatttttatacaagtatacagtgtgtgctttaggccattataaaagagtcaaaaagtttaaatatttaaatgtttataaaataaaaatgttacagtaagttaaggttaacttgtttttgaagaaagaaatattttaaaggtagtgtaacctaagtgtgcaatgttcacacctacagtagtgtgcaacaatgttttaggccttcacattcactcactgttcacacacagactcatccacgacaacttccagccatgttaagtgccctatataccacatttttactctccctttactatgttttgatatgtttagatacacagatacttaccattgttttacagttttgatggtagtgtaaaatgtttacattgttttgatggtagtgtaaaatggcacaaacactttcagaaatgatctggcatttcttataaaactaaatatacactgaccctataatttagttttaatcctaggaatttactcacagtaaatgaaaacacttataccacaaaaacgtttgtatgacaatgttcactgcaaatttattactaataccctaaactggaaactgctgaagtatcaataaaataatggatatacagtggtattttcatgaaatggaatattacttagcaattaaaatggacaaattatgagtttcatagtgtgtggctcacaacagtctcaagtactatgactaagctaagcacttcatgaattttatcttactgaatccttctagccttatgagataatcgctattattattgacaagtgctttgtgtttattttcttaacttttactaccttctgaggtagcatcctcacacacactggtgtacagaaatacaatttaattctgatgctgaccacccagtgttggcattggactccacaggtttaatggcacaatccccagtaaaactattttcacttcagatgccagctgcattttggggggtccctaagccacctgtgcttttgacccactggctgtaaattcaaagtttcacatgaccccctaaggtacaataattttctagaatgactcacagaactcaggaaagcactaatgatacaaatcaggaccagctaaatgaagatccacatgggtggagtctgggagggttctgaatggagagcattcatgacctctccccatggcattaccctcctagcacactgatgtgttcaccacctgggaagctctactgagctttggtgttcagagtttttattggggtctcattacataggcatgattggatcattggtcacatgactggactcaatcttcagtcctcctcctctcctaggagattgacccaaccctctaattacattgttggtctttctggtgaccatcctcaccctgtgtcatctcatcagttagcataaactcaggtgtaatctaaggagctcataaataacaaagacactcctgctacttaggaagttctaagggtttaaagtctctttaccagaaaccagggacaaaggccagtcaagttatttattacacaataggtaggcactattattattattttatttaatagagacagggggctgggcacagtggctcacatctgtaatcccagcactttgggaggccaaggtgggtggggatcacttgaggtcaggagttcgagaccagcctggccaacatggtaaaaccccatctctaccaaaaatataaaaaatcagctgggtgtggtgacgcacacctgtaatcccagctacttgggaggctgaggcaagagaatcacttgaacctgggaggtggaggttgcagtgaaccaaaattgtgccactgcactccatcctgggtgacagagcgacactccatctcaaaaaaaaaaaaaaaaaaaaatagagacagggtctcgctatattggccaggctggcctcaaactcctgacctcaaccaattctcccactgcagcctccctaaatgttggaattacaaatgtgagccatcatgtctggccagtaggtaggtgttattattgtcctcattttagaggtaagtagggacctatattgattgctcaaagttacacagtaactaacagaattaggactggaacctaggtatgtctgaatacagtcttgctattctctactatatatatattgtctgaaagttattgccacatgctatttattgaatgaataaattgacaggaaaagatcacaggtgattctgaaatttctaccttgtgggaactgagaatgatcaaggcccttttgagaatttcattgatgctagatacatttatatttgtagatcctatcccatattaaagtctgtctgtatcccacatcaagtattattttttttgctgaaaaaaatattgaaaggatttaaaaatttttttctttagaaatcatttggctacatgcactctagtcattataggatttgatttcatggcaattgcagtgcatgggtggaatgtttccaaagtgagaaacatgaacttacaaattattttcaaatgtaataaaatgtttataaataccagtgtattacttcagtacagcctaagctgctataacaaagagacttcttagtacagtgagagtacagggctggta

SEQ ID NO: 94867 - DNA, 27780 bp, Homo sapiens
ctcctgatattcctatttagagaggctgaagccatttgttctagccaccatttcctcttatttttcatatttgtgtatcattctggataagctcccgaaactacatttcaatttggcagtttattttttgccagtgtctgatctagagcagatcctacaaattgtagttttaatttcaatgacaatattttattttcaagaattcattagcttggtggtttctagtatcaaacagcttctgataaaactataccttcttgggaggctgagacgggcggatcacgaggtcaggagattgagaccatcttggctaacatattgaaaccctgtctctactaaaattacaaaaaattagctgggcatggtggcacgcgccatagtcccagctactgaggaggctgaggcagaagaatcttttgaacccaggaggcggaggtgcaatgagccaagatggcgccactgcactctggcctggatgacagagcgagacttcatctccaaaaaacaaacaaaaaaccaaaaactatacctccaaacagcttgccattgttatcttttctttagatttctttcttgagtaggagaattttagacccagcagtagatggggttccagtctgccctaccccgcaggagccagagtccccattgccatgatctgtgtcctgtcccagttcccagaaagtctgcagtttgagccttcccagtgccttctcttcttcttcccttcctcattgtattgcagcctcttctggtgtttctggcccatgaagaaatttgtcctgtacttaagcctggctatgcctttttttgtcttatcactttgttctgtcattggtacacattggagcaggattttaaaaaatttttattttactttaagttccgggatacatgtacagaacgtgcaagtttgttacataggtatacatgtgccatggtggtttgctgcatctatcaacctgtcatctaggttttaagccctgcatgcattaggtatttgtcctaatgctctccctccgcttgttccccacctcctgacagtccccagtgtgtgttgttcccctccctgtgtccatgtgttctcattgttgaactcccacttatcagtgagaacatgtggtgtttggttttctgttcctgtgttagtttgctgaggataatggcttccagcttcatctatgtccctgcaaaagacatgacctcattcttttttatggctgcatagtattctatagtgtgtgtgtgtaccacattttctttatccaatctgtcattgggtatttgggttggttccatgtctttgctattgtaaatagtgctgcaataaatgtttgtatgcatgtgtctttatagtagaatgaattataatgctttgggtacatccccagtaatgggattgctgggtcaaatggtatttctggttctagatccttgaggaataaccacactgtcttccacaatggttgaactaatttacattcccaccaacagtgtaaaagcgttcctatttctccactgcctcgccatctactgtttcttcactttttaataatcgtcattctgactggcgtgagatggtatctcattatggttttgatttgcatttctctaatgatcagtgatgttgagctttttttcatgtttgttggtcacataaatgtcatcttttgagaagtatgtgttcatatcctttgcccactttttgatggtgtttttcttgtaaatttgtgtaagttccttgtagattctagatattagccctttgtcagatggttagattacaaaaattttctcccattctgtagattgccttttcactctgatgatactttcttttgatgtgcagaagctctttagtttagtaaattttcatttttgttgcaattgcttttggtgttttcgtcatgaaatctttgcctgtgcctatgtcctgaatggtattgcctaggttttcttctagggcttttatggttttgggtcttatgtttaagtctttaatccatcttgagttaatttttgtataaggtgttaattttgtataaggtgtaaggaagggatcctgcatatggctaaccagttttcccagtaccatttattaaatagggaatcttgtccccattgctagtttttgtctggtttgttgaagatcagatggttgtaggtgtgtggtgttatttgaggtctctgctctgttccattggtgtatatgtctgttttggttattgtagccttgtagtatagtttgaagtcaggtagcatgatgcctccagttttgttctttttacttaggattttcttgggtatatgagctcatttttggtttcatatgaaatttaaagtagatttttctaattctgtgaataatgttgatggtagtttgggaatagcattgattctataaattactttgggcagtatggccattttcacaatattgattcttcctatccatgagcatggaatgtttttccatttgtttgtgtcctcttttatttccttgaccagtggtttgtagttctcctttaagaggtccttcacttccattgttagctgtattcctaggtattttattctctttgtagcaattgtgattggaagtacattcatgatttggtgctctgtttgtctattgttggtgtataggaatgcttatgatttttgtacattgattttctatcctaagactttgctgaagttgctcatcagcttaaggagtttttgggcttagataatcttttattttttcttttgagatggagtcctgctccatagcccaggctggagtgcaatggcatgatctcggctcactgcaacctctgtctcccaggtctcagttgaagcaattctgcttcagcctcctgagctcctgagtagctgggattacgggcacatgccatcatgcctagctaatttttgtatttttagtagagatggggtttcaccatgttggccaggctggtcttgaacttctcaccttgtgatctgcccacctcagcctcccaaagcactaggattacaggtgtgagccgccgcacctgccctgacaatggggttttctaaatacacaatcatgtcatctgtaaacagacaattttactttctctctttctatttgaataccctttatttctttctcgtgcttgattgccctggccagaacttcaatactatgttgaataggagagggggttttcaaaatgagaactccatgatccaaaactacctttgagtggctcttatcagccactgcccagctggttatggcctgctttagcttgtgatagtggtggtgggaggctggggtggagagttccattgcagaatgtaggaacatgctgagcctacttggggctattttccaaatttttaatgcttgtacttccagaaagccatctgaacttggctaaggacacatctttctgtaaagtgttccctgtgtaccattcaatcttatctacttacactattagcatggatgttaaaggctcacgttaaactgccagggttcaaaacttgcttctatcttaaactgcttgggggcaagttaaaccttattgcatctaccatatttctaaatctgtaaaatgggaatataaaaacacctaacacaaagggctctagaggttaaataatacatgctaatcatatagagagacacttggtatagacagaattgtaagctattagtttttatagttattactgactagaaaaatctaatcagaaaggtgacattgccttcttagatatcaaaatgtgatatttggatatgcttgagatatggttacctggaggcacgtttctaatcattcaccctaaaattaaatggggagaattcctccctaacacagcctcaggtatgtatggtcagtgttttccttgtctctgaaacatgcctgaactgtttttgttttttgttttttgagatggagtctcactctgtcacccaggctggagtgtggtggcatgatcttggctcagtgcaacctccgcctcccatgttcaagcaattttcctgcctcagcctcccgagtagctgtgaccacaggcgcctgctaccacacccaactaatttttttatttttagtagagacgggatttcaccatcttggccaggctggtctcgaattcctgacctcaggtgatctgtccacctcggcctcccaaagtgctgggattacaggtgtgagccaccatgcctggccatacccctgaactttttatcaattatctatttttgcaactaattgtctcattgttttaatatatgttagttttaacatcctggctagatgaaaagcaagttgattccagaattttatctttttcacccctttcatccctgtacaggtaggacatagggtaggagcttagtatgtatttattgagtggattgataacacagaatgaaacaattcagaaatttgagtatagtcaatgggcaggagcacagttttgaagccaaaggggctctgggacacttacccatgtcttcatttccattgcctggtgcaaaaggattgtggtgagggagatggtgttgattggtgtcccaaaggtaaagacatctatatcagagcccttataggcctgcagaggaggaacagacaggcattgtcaggtatgtctgtggactaactttggctttgacacagtgattataaagcatcaatgaaggcagttgtcaatggagaaggaggtacccagctgccatctgtgtggtactgatccgaggaacaggtcaaggtaagaaaggaattgataggactaatttagaaatggtgtttgcaggagtaagccaagatggggattgtgaaaccattgtggaatgaatgaagacagaattcgttgagagcccatcagacacaatgctaacagctgaggatacttctgtgtttgcctacaatgagtttagtctattaggcagtgcggatgtggtacaatttaaggaagtacgtgctataatagaggcaagtacaaggtaccctgggaacacagaagaggatatattagctgagaccagaataagaggagttaatcacttggaaagagagggtaaatgcagttccagaaaaggtcagaacggagggtgaacacagacggtttgtagaactccagagtcctacattgtaggtctgttgagcatattcaagggcaaaagatatagcaggaaagccaagcaaagacctggccagggagggtattgtaagccaggaaattcaagcaaaacacaagatccctgcctcccctaactccatcatcttgctaattatgaaagaatatgagcccagaggttggataagcaacagtgtttacctggtggcaattgcttcccatcctgttccgtgtgtccaggaagaagacatatattgtttgctacctaaattctcactatttaaactgaggaatcaaactgagattgggctggtatcccttgctatctgcattcttgctacttttttcagataatgtagtatctcattatcggaacttgctgcctctgaaggctagcttccttgaccttcaaagcacaagtgtatataaaaatcaagggtagtaaattcaaataccttcagtgttcaagtaggaaacagttaatgagtaaagatagccagatgtaagacaaaggggagtggtagagactaaggcaaactggagaacatgctcacaaggtgagcccagctgcaaagtcaagtccagatttttgctatgagggaaaaaatgacccagtataaatatagctttcagtttttcaagagccagcagaaatcaaaatgtttgggtagtgttctgacttttcaaacaccttgggttggatgtaacctgcaggctacctgtttgagcctctgctctaaagtgtccagaaggacactactggtctggaactttatataaaaaggaccagttcttctctgcaatttatgtggttagaatgggactacatgacttaccaggtaagggataaagaaacagatgaggctctggtagaatgcatccaccatagaaatccagaaagtcgacaggttatagcactgccaggagagaacacaccaataattatcacccttatagcaagcctctattctttgcaagcaactttcttgcatgtggctgcgacagacaaccagacgcatacaatgcctcttgtatttgtggtagtagaatggagtaattaggagtgtagacttgggggtgacagacttcagttcaactgtgtgaccttgtgaaaattactaaactgtgcggagaactagtttcttcttccattaaatgtgggcaaaaataacacagcctatctccttggggttcaagaggagtaaatgcaattgtgcctacctagtaagtactcaggccttagtgcctagccaagtactcagttattcrttgttatcaatcattagttcttttgctactgttgctacaaacctggcaagtgtaaagattctaaagtttctaagtggcatctgagagatctcaatcgtagctcgaatcacaggttcccccaagtttctgaagttcaacagctccagaaacaaggcttctcaggcatcagcggctccagaaacaagccttctcaggcatyaatctttgtgccttccccaggaaaagtgaaatctttacagtttttgggtcttgcttaacttttagatactcaaggaatttgcyaygcagtcagcactttgatgggaagggtaaacttagaagagcccaaggtgaacatgcactctcaccatgcccccttcgtctggactgcttgggtttctgtgttgctctctcctcttggctttgggctaacaactgggcttgctgttagtctataaataattgccagatctcaaatactacacttggctttgcccttctttcctccaggtgcaagacactctctggcattgcaaagtccctcttcccagagctccctcgatccagcttcttgctggtgctgggagtgcatgctgtctgacttctccaaatcattcagggctgcagtgtggcctctctgggcctcctaggatgccacctgatggcttctcaggcctgccttagtctatttgataccagcaaattctaaagcacatgtaattttgagttctaagttttgccttccctaatatgaaatagaaccattgtataccttacccaatgaaaagcaaagtagctataaatcccaagggttctcaaactgggctttgggggttctatagatgcatctcagagcctggaggggatggctgaaaggtataggatccttctgcatggctcttccccttcgactagggcagtcccatattaatgtgtgatataattaagaaataattggggcagccaagatggccaaataggaacagctctggtctacagctcccagcatgagcgacacagaagacgggtgatttctgcatttccatctgaggtaccgggttcatctcactagggagtgccagacagtgggcacaggacagtgggtgcagtgcaccatgcacgagccaaagcagggcgaggcaytgcctcattcgggaagcacaaggggtcagggagttccccttcctagtcaaagaaaggggtgacagatggcacctggaaaatcgggtcactcccaccctaatactgtgcttttccaacaggcttaaaaaatggcgcaccaggagattatatcctgcacatggcttggagggtcctacgcccatggagtctcgctgattgctagcacagcagtctgagatcaaactgcaaggcagcagcgaggctgggggaggggcgcctgccattgcccatgcttgcttaggtaaataaarcagctgggaagctcgaactgggtggagcccaccacagctcaaggaggcctgcctgcctctgtaggctccacctctgggggcaggccacagatgaacaaaaagacagcagtaacctctgcagacttaaatgtccctgtctgacagctttgaagagagcagtggttctcccagcacgcagctggagatctgagaatgggcagactgcctcctcaagtgggtccgtgacccctgacccctgagcagcctaactgggaggcaycccctcagtaggcgcagactgacacctcacatggccgggtacttctctgagacaaaacttccagaggaacaatcagacagcagcattcgcagttcacaaaaatctgctgttctgcagccactgctgctgttacccaggcaaacagggtctggattggacctctagcaaactccaacagacctgcagctgaggatcctgtctgttagaaggaaaactaacaaatagaaaggacatccacagcaaaaacccatctgtacatcaccatcatcaaagaccaaaagtagakaaaaccacaaagatggggaaaaaacagagcagaaaaactggaaactctaaaaagcagagcgcctctcctcctccaaaggaacgtagttcctcaccagcaatggaacaaagctggacagagaatgactttgacgagttgagggaaggcttcaatcaaactactccgagctacaggaggaaattcaaaccaaaggcaaagaagttaaaaactttggaaaaaatttagatgaatgtagaactagaataactaatacagagaagtgcttaaaggagctgatggagctgaaagccaaggctcgagaactacgtgaagaatgcagaagcctcaggagccgatgtgatcaacttgaaatgaatgaaatgaagtgagaagggaagtttagagaaaaaagaataaaaagaaacaaacaaagcctccaagaaatatgggactatgtgaaaagaccaaatctacgtctgattggtgtacctgaaagtgacggggagaaagaatggaactaagctggaaaacactctgcaggatattatccaggagaacttccccaatctagcaaggcaggtcaacattcagattcaggaaatacagagaatgccacaaagatagtcctcgagaagagcaactccaagacacataattgtcagattcaccaaagttgaaatgaaggaaaaaatgtcaagggcagccagagagaaaggtcaggttacccacaaagggaagcccatcagactaacagctgatctctcagcagaaactccacaagccagaagagagtgggggccaatattcaacattcttaaagaaaagaattttcaactcagaatttcatatccagccaaactaagcttcataagtgaaggagaaataaaatccgttacagacagacaaatgctgagagattttgtcaccaccaggcctgccctaaaagagctcctgaaggaagcactaaacatggaaaggaacaaccagtaccagccactgcaaaatcacgccaaattgtaaagaccatcgaggctaggaagaaactgcatcaactaacaagcaaaataaccagctaacatcataatgacaggatcaaattcaaacataacaatattaactttaaatgtaaatggactaaatgctccaattaaaagacacagactggcaaattggataaagagtcaagacccatcagtgtgctgtattcaggaaacccatctcatgtgcagagacacacataggctcaaaataaaaggatggaggaagatctaccaagcaaatggaaaacaaaaaaaggcaggggttgcaatcctagtctctgataaaacagactttaaaccaacaaagatcaaaagagacaaagaaggccattacataatggtaaagggatcaattcaacaagaagagctaactaactatcctaaatatatatgcacccaatacaggagcacccagattcataaagcaagtcctgagtgacctacaaagagacttagactcccgcacaataatagtgggagactttaacaccctactgtcaacattagacagatcaatgagacagaaagttaacaaggatatccaggaattgaactcagctctgcaccaagcagacctaatagacatctacaggtctctccactccaaatcaagaatatacattcttctcagcaccacatcacacttattccaaaactgaccacatagttggaagtaaagcactcctcagcaaatgtaaaagaacagaaattatagcaaactgtctctcagagcacagtgcaatcaaactagaactcaggattaagaatctcactcaaaaccactcaactacatggaaactgaacaacctgctcctgaatgactactgggtacataatgaaatgaaggcagaaataaagatgttctttgaaaccaatgagaacaaagacacaacataccagaatctctgggacacatttaaagcagtgtgtagagggaaatttatagcactaaatgcccacaagagaaagcaggaaagatctaaaattgacaccctaacatcacaattaaaagaactagagaagcaagagcaaacacattcaaaagctagcagaaggcaagaaataactaagatcagagcagaactgaaggaaagagagacacaaaaaacccttcaaaaaatcaatgaatccaggagctggttttttgaaaagatcaacaaaattgagagactgctagcaagattaataaagaaaaaaagagagaagaatcaaatagatgcaataaaaaaggataaaggggatatcaccaccgatcccacagaaatacaaactaccatcagaaaatactacaaacacctctatgcaaatacaactagaaaatctagaagaaatggataaattcctcgacacatacaccctcccaagactaaaccaggaagaagttgaatctctgaatagaccaataacaggctctgaaattgtggcaataatcaatagcttaccaaccaaaaagagtccaggaccagatggattcacagccgaattctaccagaggtacaagaaggaagtggtaccattccttctgaaactattccaatcaatagaaaaagagggaatcctccctaactcattttatgaggccagcatcatcctgataccaaagccgggcagagacacaaccaaaaaagagaattttagaccaatatccttgatgaacattgatgcaaaaatcctcaataaaatactggcaaacaaaacccagcagcacatcaaaaaacttatccaccatgatcaagttggcctcatccctgggatgcaaggctggttcaatatactcaaatcaataaatgtaatccagcatataaacagaaccaaagacaaaaaccacgtgattatcccaatagatgcagaaaaggcctttgacgaaattcaacaatgcttcatgctaaaaactctcaataaattaggtattgatgggacgtatctcaaaataataagagctatctatgacaaacccacagccaatatcatactgaatgggcaaaaactggaagcattccctttgaaaactggcacaagacagggatgccctctctcaccactcctattcaacatagtgttggaagttctggccagggcaattaggcaggagaaggaaataaagggtattcaattaggaaaakaggaagtcaaattgtccctgtttgcagatgacatgattgtatatctagaaaaccccattgtctcagcccaaaatctccttaagctgataagcaacttcagcaaagtctcaggatacaaaatcaatgtgcgaaaatcacaagcattcctatacaccaataacagacaaacagagagccaaatcgtgaatgaactcccactcacaattgcttcaaagagaataaaatacctaggaatccaacttacaagggacgtgaaggacctcttcaaagagaactacaaaccactgctcaatgaaataaaagaggatacaaagaagtggaagaacattccatgctcatgggtaggaagaatcaatattgtgaaaatggccatactgcccaaggtaatttatagattcaatgccatccccatcaagctaccaatgactttcttcacagaattggaaaaaaactactttcaagttcatatggagccaaaaaagagcctgcattgccaagtcaatcctaagccaaaagaacaaagctggaggcaccacactacctgacctcaaactatactacaaggctacagtaaccaaaacagcatggtactggtaccaaaacagagatatagatcaatggaacagaacaaagccctcagaaataatgctgcatatctacaactatctgatctttgacaaacctgacaaaaactagcaatggggaaaggattccctttttaataaatggtgctgggaaaactggctagccatatgtagaaagctgaaactggatcccttccttacaccttatacaaaaattaattcaagatggattaaagacttaaacgttagacctaaaaccataaaaaccctagaagaaaacctaggcattaccattcaggacatagtcatgcacaaggacttcatgtctaaaacaccaaaagcaatggcaacaaaagccaaaattgacaaatgggatctaattaaactaaagagcttctgcacagcaaaagaaactaccatcagagtgaacaggcaacctacaaaatgggagaaaatttttgcaacctactcatctgacaaagggctaatattcagaatctacaatgaactcaaacaaatttacaagaaaaaaataaacaaccccatcaaaaagtgggcaaaggacatgaacagatacttctcaaaagaagacatttacgcagccaaaaaacatgaaaaaatgctcaccatgactggctatcagagaaatgcaaatcaaaaccacaatgagataccatctcacaccagttagaatggcaatcattaaaaagtcaggaaacaacagatgctggagaggatgtggagaaataggaacacttttacactgttggtgggactgtaaactagttcaaccattgtggaagtcagtgtggggattcctcagggatatagaactagaaataccatttgacccagccatcccattactgggtatatacccaaaggactataaatcatgctgctataaagacacatgcacacatatgttgttgcggcactattcacaatagcaaagacttggaaccaacccaaatgtccaacaatgatagactggattaagaaaatgtggcacatatacaccatggaatactatgcagccataaaaaatgatgagttcatgtcttttgtagggacatggatgaaattggaaatcatcattctcagtaaactattgcaaggacaaaaaaccaaataccacatgttctcactcataggtgggaattgaacaatgagaacacatggacacaggaaggggaacatcacactctggggactgttgtggggtggggggagcagggagggatagcattaggagatatacctaatgctaaatgacgagttaatgggtgcagcacaccagcatggcacatgtatacatatgaaattaacctgtacattgtgtacatgtaccctaaaacttaaagtataataacaataaaaaaaaaattaaaaatacccactagtctggcccaacaccctcaatagcaagtaagaaackggtcaggaaaggagagaggagttactcaaagtaaatgatggaacagtggtcagaatgcaggcttctgaccccagcatacagctctttctctgatgcctccagaggggaggtagaggtcagtaagaagctgaagtcacctccctttggctgcccgatctccttacctcagagttctggccactcttgtatagctcaggcaatgccaggagtgtttctgcagagatgtctttgtcaaggactccaaagacaagaggaggcaaggaggtaaagaagagattgaagaataycatctgccagtaatcaatcatggtggagctggagaaaccacagaagaactgataccagaagagcaggttgacgtagcactgcaggcagagagcatggccttgtgagtggggctccatgtgcagccrgtcaccagctcctgcttgggacctctgggagctgctggagtggcagttgcctcatttataacacacagggttatgtaaggatgagagagaattctaatcctcggagcagtagctaccactgttactactactactattgctactaacattcttcaggacctgaagggaattccactaacttgtttaaaggggagtggacagtaagtcttcacttaacattgccaataggttcttagaaactgcaacttaaagcaaaatgatgtatggcaagccccggaataacattgcttaattcaacatcacattttctaggaacctattgaggacattaattgaggacttggtgtactatgatggttaaaagtacagattttggaggcagagaggcctggttttgaatccccaattctgtcacttactagctgtgtgaccttggacaaactacttaatctttctgaatagcattttatcatctgtcagctgggaatagtagtacttagaccaatggcatgcgaaatatgaatggcagtggagtggtaatagaaagggatgtcactgacaaaggggtaatagaaagactgaaccatgagcaggacacctggtaggacggtgacctcgtgagaaggttgacttcactgtactttcctaatggtcatgcagctcagaagggtgaatgacaaaatctgcctaaatgttgttcatttttttctaaagctctttctcactcaagatctcctctcttgtgggtgggttgggtcactgttattgtctaccatattgcgatatggtttggtgatttgaccaaggtcatacatataagcagctggtcctggagttagaactagaacttctcagttatgtggggctgaggcacagagatgtgaagggtcttgcaagaaatcattcagcaggtttgtgttcaagctgtaactcctatttctgaactgctgggtcaatgttattttggaggggctctctattttaacatattgccactagtagtaacatcatttgtaaaatttgaccttctatatgtgccaggagtgagatatacatcagtatatcagcatatagtacatcattggatgtgcaatacacactatagattgtcctaacaaccttgcaaggttaatattgctatagtagtactacgttattgtactgatatatcacatgttgatattaacaataatattaacattattaggcccactctacagatgaagaatccaaggttctgacatactgttgccccctgcccaaattcagagctagagagtggtacaatcagcatctgaattttcaaagttctttctctttttaactacctctaaactttctcagtcctatctttggcttatacgattagacttttctagacacatacagcctgcaaagctgaaatatttattatctagctctttgaagaaaaagcttcctgagacctgatgtagacagcctcacgcaggccatgattggcttgattcctgctctatacccattgctcagccctgttcccgacatacagcagacattcaattgttatttgaatcaatgtagttaatcttagctctatgctaacacccatcctggagtttcagcgttacagagtgcttcttgcctcctgaggccctggtaagatcttgcttgtttttcacttctgcctaactggaatctttgtaccttgcagggagtgcattgaaccccatggcagcattgctgatattggatgcctgctctttctctcaagaagctacagtgcggtaattaattcattgttcaaatttcagagcaggccaggttttaatcccctctgaaattggtttcatatgtggaagtcatagttctccaccttctaattgcaacagggagataatgcggcattagtatcgcaattttgagcatggcattgggctggaaataaatatcatttaagctttgaaagcgtggctgcttggaaacgttttctttcctatttcacaaatttaatgcagagaagaggctgtgcttattcaaaagaattattccttgagctgccaaaaaaattaaacaggagcattttggattctaaataaacagtctttcactctcaaagtgagtttcaagtcagatggagtgacttgtttgcgtagacttgctgagataatattaccatcaagttgattgaatttacattactttttgtcatgctgtttatctacatatacattgaactttgcacagaaagtcattcctgagcaaaggtgactgtgtcagagtctgaaagaaagactggagcaagaggaaaaattgcaattttgtagctactacctggctaatgtttctcttccatcaccttggtcttaatcctccccttttacttatgcaaagaggagtcaaattgtttggaaatcttggggtttattaaaagcctttgaactagataatgaaaaactcttttgttccctccattagcctagcacggttctgacttcttcctattcccattgttaataaagggcttttcaaagaagagtcttctgaccgttttaatacctcagttggtatgtgtttgctttaggccctcatcaacaagacaaaccaacatagttttagaatacacaacttattgtttgtatttttatagggctatatgtttttcagagctctgacactaaggcctcttgacacagaattatagtttccccatattattgatgaaaagattaattaatctctgtgagcttcagtttcttcaaggtcatacagcatgctggagtcaggtaagactacccagacaaactctgcacctcaaacatctttgccaagtagatattttatttagtatcctgccctccagcaaatccctgaaagaaagcccaggggcactgaagtgatatgcaagtcccaagttgaagccatgggctccaggcttatattctgtgacgtacttttcaccctcactctcccaaggcatggggtatagctcttgcactgagctggctctatatacagaggaaatctgatacagttcagactagctcttcaaatccttctttgttacaataagaaaatctcatttatgagacttaactccaagagtaatgacagcaacaataataaaaaaaaggctaactttataaacgattacgatacgctaatcactttatatgcaaattctcatttagtcctcatagcaaatatgagaaaggtactattaccacccattttacagatggtaaaactgagatttggggacattatcacatatgggaatctggatttaaacccaacgtgtctgactccagagtctacacttgcagctattcatgctgccctctgtgtgccaggtgcttttcatacagcattgccaattctcacaataacttcacaaaaatagaaagtgaagagtctagctcaaggtcacagagctattaaggaacagtttcaagatctaacactatgccagcctgactccttcctttatgctgaggtgctttgcccactgctagggagagatctggccccgtggcaaggcctgccaaagccctgggtgagaggacgccataggctacttaccacgttcttgtagaggtagtacaccaccatcctggccaggcgcgagtaacaccagtggccatgcacgagcagcaacttcttgagatgcttaaagcgggtgatggcaaagtcgctggacatgacagcctgagaggtgagaacagacacatcagcttccatccatggctgccagtgccccagagggactctctcaagggcgttgctttggtctaggcctacggccagcagagtcctaaagaccccttgttgtgktcactcttgggtagctttttggattctgacaccccaccctcccttctgggaaatccaaacctctctagaatccaaggagggcagatcagaagggatcagtggtctaggctggctcttcatccgtttatccagcaagcattgactgtggcccagtaagtgtcaggcaccgtgctagggatgtgatggttaaccagagagaaggggcttccattcaagcaatttacaatcctctgaacacctttcaccaccccctgagtcaggccattggctccattcacagatggagctaagtgacagctcttcctttacctggagctgaaatatgtcttctgcccctgggattactcagaacaaggcacagtttatagtactcttttaaaaacatgaacactgaacatgcctgtttataagtcctggtataaactttggtctaattccctgtgcctcagtttccccatctaaaaaatggaatagcaatcccttacagggtgtgatgattattaaaattcaatgagatcctaaatgtgaagtgtctaacacaagcttgtccaacctgcaggtcgcatgtggcccaggatggctttgaatgtggcccaaaattatgagactttttttgcaatttttttaaagctcatcagctatagttagtgtgttctatgtgtagcccaatacaattcttcttccattgtggcccagggaagccagaagattggatacccctggtctaacagattgctggcatataggagatacgcaaaagttaacatttcagaactattctgcagcttcccagtcaatgctctctatcctcatcaacaaatttaagcagtgccaaatgtttacactggtggtggaaatacaattgttaatggctcaaaacccacaaaatgtctgtttaaatgggaaaatttagcagtcaagttagtttgcttcttccaagctgaattttgacactacgaaagtgtacatttgcaaaatgatttcaaatgtccttatgtctgtcattgcttatggagggcattgcaactttggatgtgggtggaagttctcagggagaagtttctccaacactctggatatttccttgtatctcaactaaggaccaaagaaagaagaatagttgcagagaacaatacctgcatgccttcctgtccagatattccaattccaatatcagcagcttgaatcatgcttacatcatttgctccatcacctgaaagagaggtcataacgtgtctttatttttggtccaactgctcagtgacaatgaggtagctctaaagtgtccccagttacatacaattgaatccttttaacattactctagtgctatagaaagtcattgctatagtgcttagcttgagagatgtcatttcttctttggaaaataagtccyaccattttctttaccattcagcaaatataggacttaccaagtgtctttttttctaggcacagtgttaggtattggrgatataatggtaatcaagagacttgggcagttttcaaaaaaatgccttcacaaatgttacaatgaactttactgatgagcaaatggagaatttgagcaacttagagacttggcaagggtaattccactagagaaaggacccaggagaaatggaactcatatctttcagattccagggccaacacacttccctcggtcaaacttgaaataccatatcaagacaactggacagtttggagagtgaaatcatcagaaattgtcaatggtttccaaggagagggatgatattgttttgtttctcagtgtagagaaatgagattgattcatgtttttgaaatatatttagtcacactgagtttccattcaatgaactgagttgtttcaggaaactggaggtaaggcatagacacacacacacacayaaacacacacacacggtctccttctataccaagactgttcaagatctttccatgatgagggaaacgttctatatctgcactgtccaatatagaaaccaggagccacatgtgtctatggaaattttgctggtgaaattcgatttaaatttaagtagccacagatagctctatacagtgaggccttccccagaagccgaactctccccagtgctttttctgtaaagggtcaggtggtaaatattttaggctttgtgagccaagaagcaaaattgaacagttattcttgctgaaagactattaatcctttataaattttacattgaaaaatagaaaaataattcttagtatccatacaaaaacatgccatgggttggattcagcctgcaggccatagtttgccaacccttgttcttgtagactatgctgccttcattcttttcctggccctacatgttttctagcagtttctcagaataagccacaattaaatttatattattatgatatagaatataaaatgggagggagagaatgattcttctagttatctgatgacacatttattggtcttaaaagttttgccataagtagcctttattctaaaatatttcttgattgcatagcaatgcataattttcatcttccccatgcaaaacaaatccaacctttaatctcttctgttagtgagccaggagaagtagaggtgtgaaaccatgctatttctcgccacactggttttgtttctgttgctatgggagtgaagccaatatctgacctcagagaaaatcattcttgggctattgccttgtgtgtgtctgaatttctgaagaggacaattccaggcataaaagtaggatgtcgttgctaaatttgttctctgctttctttctgccccactcttgttattctctactgttcttacctgaaaaccaggaacaaaaccatcacgtttaatagggtttctatttgaaatgttaggaaagaaaatcttatcccatgcctgtgtaggaggaggagaggctggcaccatctgtaagaacatccctaagagaaggcaatatttactacatgcttggtatgtgctgggcaggggatccaaaagtgaataaggctgacatctttctactcgaggaactcatggtctactgaggaggccatcacagaaggtatgacagtgctttgagctatgcgtactgggtgctgtgggagcccccaggggaaagcaaagttaggtaggattggaagaagtgttttacagaggaaataacttgtgcaaaggcccagaagtgagagaggacaaggcccatggagaatggtaaacagtttcatttgttggaacatggaaaggcaactgttggagaaagaaaggtggccacaataagagatatggctgagggtaacagaagatcacgaagattcttttaaaccaggtttggttgttcctgaaaggtgttaagtaagtgcagttttcatttctctgtcccaacatgattaaagtttagccccctctgaaaaattctttatcaaccaatgctagcatctattggtgatatgctttgtgctggcctcctatttagaaataaacacacaaattaaacatgagacagtaccaatctttaaaatctccccaccagccatcaacactcagaatatcaaatccctaaacacctgaagttgtggcatgcataaagtactaaagggaaaatgatctgtatcccagaattaagatgatctgaatataattactggcaacatttcttgagctatctggattcactgaattcaaggcccctgttggttttgacctccatctaaaccctgatttatctttagctgacttgctagtcccaagaactttgatgcactgtcccacttcatcccctagttgctgcatcttgattgtcattttgaactctctccctctaagacaatgactcacagcctaagcattctgactttgagacctgacctcccacctctggtccagcctttcatcagatcatccctgccaaagtgccacccgcatctcagtatgatgggtacctatggaaagggtcatgacgcgcaacttgtctcgcaccagcttgactatcatactcttctggagtggcgtggagcggcagcacaggacggaccgacaatactgggtcaattccagaaacttcttctctagctttccctggaagatggcattcaatgtcttcccatcgatgaccaatccagcttctggaaccacagcttctgaggtgatggatggtgtcttggaaggtaagcggaatccaaagagcttgcggtctggcttctgtagttcacgaaattgctttagctcttccaatgcacaattgaggatggattcacaggtctcctataaagaagcataataatacagtatttgtaagcaaccttggaaatgcatgttaacaatttcagtttattctttagtaagatagtcataaaactctactaccatagagattatttacaagctattctccaatttttatatttctctgcaatatttgacataatatcaaaggaatattaatttggaaccaaattaacagccaaaatagaagacactgcttgtgaatgggagtgaaagtagctcagcaagatggagatagatacaaggatggcataagataataaataatactaatataatggtagataatgacaatacgtcatgctggtatggtgctttctatttctcacaggtcatttaagttcccctttgttcctcagaacattcctgcgtggtagatagggtgtgtattcctgatcttagagatgaggagactgaaatgagatctttaataactcacccaagatcatccaaacttagtagtggagtcaggatcattactacttgaactgtggcttcctaactgaaaaaaatacattgtacctgtgtttatcaattgttgtattccatgaagggtgctaagaactgtggcatgaagcattgatcacattggtttgaacggactatggttataaaagtcttattgatggaaataaacttattaatttttttctggtgtttgccttgaaatatagtgagaaagtatttcctttttcaattttttcttccattacttttgattatatcaaaaatagtcatattttgattcaaatttattcttgatatcaacttctctgaacatcactttttaataaaatcatggcagaaaacagcattatcaattcatttatttttattatactttaagttctagggtacatgtgcacaacgtgcaggtttgttacatatgtatacgtgtgccatgttggttggctacacccattaactcgtcatttacattaggtatttctcctaatgctatccctcctccatccccccaccccacgacaggccccggtgtctgatgttcccccaccctgtgtccaagtgttttcattgttcacttcccacctatgagtgagaacatgtgatgtttggttttctgtccttgtgatagtttgctgagaatgatggtttccagcttcatccatgtcgctacaaaggatgtgaactcatctgtttttatggctgcatagtattccatggtgtatatgtgccacattttcttaatccagtctatcattgatggacatttgggttggttccaggtctctgctattgtgaatagtgccgcaataaacatatatatgcatatgtctttatagtcgcatgatttataatcctttgggtatatacccagtaatgggatgtctgggtcaaatggtatttctagttctagatccttgaggaatcgccgcactgtcttccacaatggttgaactagtttacacgcccaccgatagtgtaaaagcattccaaattctccacatcctctctagcacctgttgtttcctgactttttaatgatctccattctagctggtttaagatggtatctcattgtggttttgatttatatttctctgatggccagtgatgatgagcattttttcatgtgtttgttggctgcataaatgtcttcttgtgagaagtgtctgttcatatcctttgcccactttttgatggggttgtttgatttttttcctgtaaatttctttaagttctttgtagattctggatattagccctttgtcagatgggtagattgcaaaaattttctcccattctgtaggttgcctgttcactctgatggtagtttcttttgctgttcaggagctctttaatttaattagatcctatttgttaattttggcttttgttgccattgcctttggtgttttagtcatgaagtctttgcccatgcctttgtcctgaatagcattgtctaggttttcttctagggtttttatggttttaggtctaacatttaagtctttaatccatcttgaattaatattatcaattttagtagcattgttttcttcacataggtcttcattttacagtgtttcttcatccatggcaagggaggatgattttacatttattgaagtgctaaaagtttcttctaaaaataatattcaaagtgagtcaaattattaagtaaaaaaaagtacaagtcatatacagattttggaaaaaactgtgaaagcagttctgaagggccagggttggggaacattgatctagagatttagagatttctgtgtgggggaatatgtctgccataacttattttttttttttttgaggcagagtctcactctgtcacccaggctggagtgcagtggcataatctcagctcactgcaacctctgcctcctgggttcaagtgattttcatgcctcagcctcccaagtaactgggattaccagcatgcgccaccacacctggctaatttttatatttttagtaaagacagggtttcaccattttggccaggctggtcttgaactcctgacctcaagtgatccacgtgccttggcctccaaagtgctgggattacaggcgtgagtcactgcaccctgccctggcataacttattttggaaagaataaagacatagtttattattcctgtgtctaccttttaagatgctaaattgagtgttgcaggcactagaatatgcatagagcccagacgggccacaggaagcagttctaggagtgtatgcttataccagaggcacttatctggaaagagatcaaagtagtcctttggaagctgggactggcaccaattatataaattcctccaatatatgactaaagcaagtcattggagacataagctttaaaattaaatcatctcttaatttacttatttccagcttttaaagtatacaataattaccattcactgaacatttagtatacctcctatactgtggtaggaacctctaatatggtggttcccagtgatctccacttcctggtattcatgcccttgtgtaatctccttttattgactgtggtctagacctagagactcctttctaatgaagggaattctgcaaaaaatgatgggatgtcacctcccatattaggttataaaaagacagtggcttccaatttggtgctctttctcactttctcttggatgattagccctgaggaaaaccagctgccatgttgtatagcagtcctgtggagaggcccacagagtgagaaactgaggcctgctaacagtcatgtaggtgaatttggaagcagaactccttcccatgccaaaaccacccacctgttgagccgtcagatgagcccacagccctgaccaacagcttgagtgcaacctcaagggagaccttgagctaggggtgcccagctaagatgctcctgaacttgtaatccacagaaaccataagataataaatgtctgttgtttcagctcctaaggtttggagtaatttgttatgtaccaatagataattagcataggtaatgtactaaaagtaagtagttttcttctatgatcttatttaatcctaccagtaatctgtgaagttaatattttttatctgttttacagatgaagagaagttcaagaagaatggtgtttgagccatattaaaacttcaatataggttgttaattattaacaatattgcaatagcaataatagtggttttagtattagttcctatctaatactttagttccttttaaaattccttgactgatgaacacttcagtgattagttagtaattctctcatcttccggatgagaattctgaggtctaggtcgatcccataacttgattattgctttaatacacctagcaaagagataataatcctaaatcaatttatagtgaattaggcaaattaaaaaccttggaggaaatatccacggaatatgtaactacattaaactagggtttaaataagtctaagacttagaatgtatttccccagtttctggcttaacatattatttttcatcccaggtaaagagatgaaaagactaatcttacaggtttagtgagcccaagggtgtaggcatggctgaggattcaggcactgtcctggaagatactggacagaaagattcgtcattgactgaattaaaggtggagtatggctgactgttccttaggagctttggctgtttaaccaatgagcaggagtgcatggcatttagcagaacacatggaagcccactcgatctccctctggctggctgcctcactggtttgcagatgttctccttctagaattacctggagtgaaagaatcattgcaaaccgaatttccattacaagcaggacaggcaggcacagggatcaagcattcaagcaagctgaaaattactttccttcctaagcataatattaaagcccaagttttccctgagcttattttcattttgaaaattcattaaggtttaatctaataatctgtgcacctgacaggaaagtaaatgatttttccaattcatctaaaggtcctctggcatttttcataatctacactagttttatttttaaaaaagaggtgtatattgttgcttcatggaataaaaatgaaatataaacctccccaacattctactgtagtctacatcagcctcagacaaaatttagtccggtgtcctctctccctcctttcctttttccgtcttctttcgttttctccatggtatgtcctcggtgtaggtgccctacgggccctacgcccacacccctgcagtagagtgctcttctggttaatatcctccatggaatccaacccctgcttccttctgataggagcacacaatctcagtgcccacttcccatcttcatcagccaagaagatgtggtggaactttaccttctgcaatttgaattgtgaaaacagatacttccccctaaaatcaaaacggtgttatagctttgaatatgcctcttcagctttcccagtcttctctccaaacctcactccctgccacccgtaatctattccagttgaaaagtgccatttttagatctttgcttcattctttctctttctcatcccataaaaacatattggcttcatgcattattcctttcaggtttttactctgtggcagaccagcttgacatataaattgatgctgaaaatttaagctctgaataatttcaatttaattgggactttttcaatggataagttagtcttaaatagtaagaaaccgacagttgagtttccataagcaaacagtgtggtagaatgtaaatagcactagctcagttctagacttagttctacctatcagaaataagcagggtaaacctgagcaagagacttagccccagtagtcttcagtttccttatctgtggggaaatggggagactagaccaatagtagaatttgggagaggtaaaactttctaacaagcagtgccagaagtaatgtaaaagagaccagctagccatgtgtggggatgagataaaggatattgggctggatgacttccagggtcctctagactccaagattcagtgatctgttgggggttgggtgcttccctggtgtacccaaatcccacctagaagcctgtgtcctcttggttgaggggttgctctacacgttgatatctgcagatatcaatacagagaatcacctcacctgattctctgtattgatggtataaacagtgtcggtctgatttaacagtctgcaggaatgggcaatgttgaccgctgtctcctgcttatctccagtcaggacccagagctggatcccagcctcccgcagagtggcaat

SEQ ID NO: 94868 - DNA, 13439 bp, Homo sapiens
ggtggctcatacctgcaatcccagcgctttgggagggtgaggcaggaggattgcttaagtacaggaggtcaagaccagcctgggcaacatagggagacccccatctctacataataaattaatatgaaaagaaagccatctgggttgcttcccgttgggctattacaaataaaaatgctatggacgggctgggcacggtggctcacgcctgtaattctagcactttgggaggctgaggcaggtggatcacgaggtcagaagttcaagaccagcctggccaagatagtgaaaccccgtctctactaaaaatacaaaaaaatgtagctgagcgtggtggcatgcgtgtgtaatcccagctactcgggaggctgaggcaggagaattgcttaaatctgggaggcagcagttgcagtgagctgagattgcaccagtgcactccagcctgagtgacagattaagactccatctcaaaaaaaaaaaaagaaaaaaaaaaatgctatggatgttcatgtacagatttttaaatgccaagaaatgttcttgctgggtcatttggtaagtgtacgtttaattttagaaggaactgccaaactgttttctaggatggctgtacgattttccacttccacaagcagtgtatgtatgagagatccagtttccctgcattctcatccacacttggtattgttcgtattttgtatttcagccatttcaatacgtgttattggtagctcgtcatggttttcatgtgtatttccttaatggctagtgatattgaacatcttatgatgtgcttatttaccattcttatactctctttcactgaaatgtccgtttaagatttgcccattttcttttttttttttttttttttttttgagacagtcttgctctgtcgcccaggctggagtacaatagtgtgatcctggctcactgcaacctctgccttccaagtttaagcgattttcaagtctcagcttcccgagtagatgggattaacaggcgcccgccaccacgcccagctaatttttgtatttttagtggagacggggtttcaccgtgttggccaggctggtctcaaactcccaacttcaggtgatccacccacctcagcttcccaaagtgctgggattacaggcaagagccaccgcttgcttgcttgcttgcttccttccttccctccctccttccttccttttttctgttttttctttctctctttctctcctctcttccttccttccttccctttttcttcctttccttcctctctctttctttctcagaccctcactttgtcacccaggctggagtgcagtggtatgatcacagttcattgcagtgctgtcctcctgggctcaagcaatcctcctaccccagcctcctgagtagctaggactgtaggcacagaccaccaggcctggctaatttttaaattttttgtagagacaggatctcaccatgttgcccaggctggatttgcccattttctaattgggttgttcggtttctacctctcaagcttagagagtgctttatatatgctggaaacaagtcctttgttggatatatgatttgcaaatattttcttccagtctgtggctactcttttcatcttattaatgtgatctttcacacagcaaatgtttaaacattttgatgaagtccaatttatcattttttttttttgagacggagttttactcttggtgcccaagctggagtgcaatggcgcaatctcagctcactgcaacctccgcctcccggattcaagcgattctcctgcctcagcctcctgagtagctgggataacaggcgcatgccaccacgcccggctaattttttgtatttttagtagagacggggtttcaccatgttggccaggctggtcttgaactcctaacctcaggtgatccacccacctcagcttcccaaagtgctgggattacaggcataagccaccgtgcccagcccaattgtttttcttttatggattgtgcttttggagtcatgtctaagaactcttcgcctttagctgggcatggtggcatgtgcctgtaatcccagctactcaggaggctaaggcaggagaatctcttaaacccgggaggcagaggttgaagtgagccgagatcgcgccactgcactccagcttgggcgacagagtgagactccatctcaaaaaaacaaacaaacaaaaaaacaaaactcttcacctgaccctacaccatgaagttttttcctaaatctactatccattttgtattaactttttgcatagggctgaggctcatttctttgcctatttgtccaattgtttcaccaccacttgaaaggatcatcctttccccattgaaacgcttttatacctttgtcaaaaacaagttgtttggcagtggctcacgcctgtaatctcagcactttgagggagctgaggcaggaggattgcttgagtctaggagttcgagatcagcctggtcaacgtagtaagacctcgtctctacaaaaaataaaacaaaattagccgggtatggtggcgcgtgctgatagtcccaactacttgggaggctgaggcgggaagatgacttgagcccatgaggttgaggctgcagtgagccaagattgtgccactgcactccaagcctgggtgacaaagtgagacactgtcttataaacaaacaaaaaattattttttaaagagagatagttggctgcacttgtgtgaatctatttctgagctctcaattccatcttattgatttttgtgtctatcccactggggaaaccatactttcttgataactttatttatatagtaagtcttaaaatcaggtagtgtgattccaacaactttttcaaagtggttttaactattctacttcttttgcctttccatataaagtttagaataaacatctatatttaatacaaaaaaactgctgggatttttgtaggaattgcattacgcctatagatcaatttgggtttttgttgttgttgtttgagacggagttcgctctgttgcctaggctggaatgcagtggtgtgatcttagctcactgcaacctctgcctcctgggttccacctattctcctgcctcagtctcctgagtagctgggattagtaccaggcacgtgccaccacacccggctaattttgtatttttagcagagacggggtttcaccatgttggccaggctggtcttgaaatcccgacctcaagtgatctgcccaccttggcctccaaagtgctgggattaaaggcgtgagccaccatgcttggcccctatagattaatttgaagagaattggtatctttactataatatgttggatcttccaattcaatcccaatcttgtggttaatgaaagaatctgaagtaaaggaaagaactatgggattgaaatggggtgctgggagcaaatttctctagaatctgaactctcttcaacctttgatcaaatggggtcagactccatcctagggaactgagaagggcctgggagacataaatatgccaactcacctgtgtaggtttacagtttacaacattaccttgggtttcacaactcaactgcaagaaaggaattagcatccccattttttttaaaccagtgttttcatatcctttattcccaagtcagtgtatttgtcagtttgaatgttacatgtatgataaaacagattatgaaaagcatactaacgagaacattattttatataactgatcattgaatatgcaacctcttgcaacaataacttaatggacccaactctaccttctaaatggaccaattttatgattctcctaaaatgttttgagttgggtatagtttcttgttgcttcttcctgtgatccaaagcttaaaaatgaggctgggcacaatagctcaagcctgtcatcccagcactttaggaggccaaggtaggaggatcacttgagatcaggagtttgagaccagcctggccaacatggtgaaaccccatctctactgaaaatacaaaaattagccgggcgtggtggtgcacacctgtaatcccagctactcaggaggctgaggcaggagaatcgctttaacctcagaggcagaggttgcggtaagctgagatcgtgcctctgcactccagcctgggcaacgaagcgagactccgtctcaaaaaaaaaaaaaggaatgaatctctggaaactagcaattagagccagacctccctaggaccaaggagacaggagttggagaaaaagacactacaggtgatgcccacagtctcaagcactgtggcatatgcttgacctcagagcattccagtactcaaggtcaagtgtggcaccatccgtatatcctgtcatcgcaaatgcccgcaactgctacaattaacaggatatgggagagaggaggcacatcatgtgtggaggaatgaatcgctcccaacaattatgtgaacatttcgaaaatttctttttttttttttttgagatggagtctggctctgtcycccaggctggagtgcagtggcgcgatcttggctctctgcaagctccgcctcgtgggttcacgccattctcctgcctcagcctcccgagtagctgggactacaggcgcctgccaccatgcccggctaattttttgtatttttagtagaggcggggtttcaccgtgttagccaggatggtctcgatctcctgacctcgtgatccgctcgtctcagcctcccaaagtgctgggattacaggcgtgagccaccgcgcccggccaacatatcgaaaatttcaataccaaggattaacttctaaaatacaactttatatgctagtgcatgcccgtagtccaagctgttcaggtggctggggcgggagaattgcttgagcccaggagttcagggctgcagtgagccgtgttaacgccactgcactccagcctgggtgacagagtaaggccctgtctcaaaaaaatgaaataaactggccgggtgcggtggcgtgcgcctgtaattccagctactcaagaggctgaggcacaagaatcgtttgaacccggtaggcagaggttgtagtgagctgagatcacaccactgcagtccagcctgggccacagagaccctgtctcaaaaataaatgcatgcaagtttgtagacagaagctatacagctagccattcaataaaatgcatgtgcaatatggtggagctgttgtgaacatccccatttgaatgctgggcaaacagagtagttcaaggtccccagtgcagcaggtcctactcatttcagaagggaactctgcagaaactatgcccatctgggcagagcccccactccactggcctgagagccacgaatccggcgcgcgtcctccccaccttgcccgccagggggcggcaagtccctgatccggggtcgcctgctgcagagctggtgggagatggttgaggggcgtgggtgggtcagcgttccttggggacccgtgaagcctgggcttagggctcacagcgtgggtccccagcacagacaggaggcggacagcttcccgtgaactgcaggggagtcccgggacgctgtcctccagcgaggtggggaccggctatgtccctcagttccccctcggtcctcgggccacagggacattagactagggggtcagttctgccagccctgcccaggcctcttctgaccagaggagctgcgacggacgcggagttcaggccccttggcgaccgcggtctcctgaactcggccccttccctgctcccatggggaagaaccctgcccctagaacagcctcccctccaggtgtcttccctacgctacccctccgccggccgggaactccgccaggcctagagacgccgacccggccctttctagctcctccccggctcggacctggttcccgccctcggccgcccgccagttcccgaggcgtacacgtgtagatcccgtcacgcccggaagtctcgcgtttctcaaacgcctcgcgcagtcgcccttgcgctcagggaaggggcggggcgaacggaagccgggaaggcgattcatagctcgcggggtacgggcgcgcgtgcgcactccgcagcccgttcaggaccccggcgcgggcagggcgcscacgagctggctggctgcttgcacccacatccttctttctctgggacctggggtcgcggttacttgggctggccggcgaacccttgagtggcctggcggggagcgggcctcgcgcgcctggagggccctgtggaacgaagagagtaagcacgggakgggcggcggaggggcgcgagtttgagggcgacgcgatgaatgaatcggaacggggggtggggagacgcgggatctggaggtgagtgggagaggacgaggggccggaaggaaacagggacatcgagtgtgtcccttctcgggtgcaccctttatttttgtttttgtttttgtttgagacagaggcttgctctgtttcccaagctagagtgcagtggcgggcgcgatcacggctcactgtagcctcgaactcccgatctcaagcgatcctcccccctcggcccgggtaattaaaaaaatttttcttaagacagggtcttgctatgttgcccaggctgatctcaaacacccgggctccagtgatcctcccgcctcgaccttccraagtgctgaggttacaggcgtgagccactgcccggccaggtgcaccctttgtacaggaaaaggggtaggaaaggcttcgaggtccctctgagccctctgatcgcgtccctttcccacgccagggcacacagcatggcagaaaaccgagagccccgcggtgctgtggaggctgaactggatccagtggaatacacccttaggaaaaggcttcccagccgcytgccccggagacccaatgacatttatgtcaacatgaagacggactttaaggcccagctggcccgctgccagaagctgctggacggaggggcccggggtcagaacgcgtgctctgagatctacattcacggcttgggcctggccatcaaccgcgccatcaacatcgcgctgcagctgcaggcgggcagcttcgggtccttgcaggtggctgccaatacctccaccgtggagcttgttgatgagctggagccagagaccgacasacgggagccactgactcggatccgcaacaactcagccatccacatccgagtctwcagggtmacacccaagtaattgaaaagacactcctccacttatcccctccgtgatatggctcttcgcatgctgagtactggacctcggaccagagccatgtaagaaaaggcctgttccctggaagcccaaaggactctgcattgagggtgggggtaattgtctcttggtgggcccagttagtkggccttcctgagtgtgtgtatgcggtctgtaactattgccatataaataaaaaatcctgttgcactagtgtcctgccatcccactgccactgattctttcctgtgtaaattctgtgtgtgcctgaatagggatggtaggaaacgctacaggtatctaggtgaaaggggaacccaagtgtttcttgcctctatagagagcatagattatgctatgagcagtgtaacaaaacagtacagtgcagaaacccagtcatcccaatgtttgtttgtttgtttgttttttgagacagagtctcactctgtcacccaggctggagtgcagtggtgcaatcttggctcactgcaagctccacctcctgagttcacgccattctcctgcctcagcctcctgagtagctgggactacaggtgcctgccaccacaccctggctaatttttttgtatttttagtagagacagggtttcagcgtgttagcagggatgttctcgatctcctgaccttgtgatccacccatctcggcctcccaaagtgctaggattacaggcgtgagccaccgtgcccagccccaatgtttgttttaaagattttcgtcttctagttgggtgcagtggctccagcctgtagtctgagctactggcggaggctgaggcggaaagagtgcttgagcctgggagtttgaaggtgcagtgagttatgatcatgccacctgcactccaatctagatgacatactgagacctagtctatgcaaaaaaaccactttttttttttttctgagatgaagtcttgctctgtcacccaggctggagtacagtggtgccatcttggctcactgcaacgttcggctcctgggttcaagtgattctcctgcttcatcctccccagtagctggaattacaggtgagtgccaccacgcccagctaattatttttgtatttttttagtggaaacaccatgttggccaggctgttctcgaactcctgacctcaagtgatctgcccgccttggcctcccaaatgcaaaaaatttttgaaaactagatgggtgtagtggtttgcacctataatcccagctacctcgttagctgaggcaggaggatcgcttgagcccaggagttcaaggctgcagtgagctgtgatcaccgcactacactcctccagccttgctgacacagcaagaccgtatctcaaaaaaaaaaaaaaaaaaaaaaaggaagcaaactaagacttcaggaccttcttagtgtcaggctccatggtagggactgacaagtggcttcatttaattcctggacctgcagggcctacctagatgatacccgggctttcaggtgcagagcccttcagacccttttttttttttttttttttttttgagacagcttcactctgtcatccaggctggagtgcagtggtgcgatctcagctcactgcaacctctgcctcctgggttcaagggattcttctgcctcagcctcctgagtagccgggactataggcatccatcaccatgccctgcaattttttgtatttttagtagagaaggggtttcaccatgtcagccaggctggtctcaaacttctgacctgaagcgttctgcctgccttggccacccaaagtgctgggattacaggcatgagccactgcgcccggccttcagacccttctcactgggctgctccagtggcgaaggaacccctcactccaaataattactgggcacacaggtaatactttctgtttggatatttgtgggatgacctgatttttcatatttatcaaactaaagtcaactaaagcaatgtttatcaaagcgggttgtgacccatttgtgggtcacagcttcttaaaaaaagaaaaagccaggcgcggtggctcacgcctgtaatcccagcactttgggaggctgaggcgggcagatcacgaggtccagagatcaagaccatcctggctaacatggtgaaaccctgtctctactaaaaatacaaaaaattagccaggcgtggtggcacatgcctgtagttccagctactctagaggctgaggcaggagaatcgcttgaaccagggaggcggaggttgcagagagccgagattgtgccactgcactccagcctgggcgacagagcgagtccgtctcaaaaaacaaaaacaacaacaaaaaaaataaggctgggtgtggtggctcacgcctataatcccagcactttgggaggccgaggcaggtcagtctcttgagcgcaggagttcgagaccagcctaggcaacatggcgaaatcccatctctacaaaaaatataaaaagttatctgggcatggtggcacaaaactgtggtcccagctacttgggaggctgaggtgggaggatgacctgagcccaggagggggaggttgcagtgagctgagatcacgccagtgcactccagcctgggcgacagagcaagaccttgtctaaaaaaagaaaaagaaaaaagaacccaagttttaaaaaaagtgcaacttaaatggtggtgtttttattgcagatgtttttgttttttttgaggcagagtctctatctcctaggctggagttcagtagcacaatcttggctcactgcaacctctgcctcccaggttcaagcgattctcctgtctcagcctcctgagtagctggaattataggcgtgtgccaccacgcctggctaatttttgtatttttagtagagatggggtttcgccatgttgtccaggctgatttcaaactcctgacctcaggtgatccacccacctcagcctcccaaaatgccgggattacaggtgtgagccactaggcctggccagcaaatttttcagttaggcatgtgtgtatatatatatatatatatatatgtactataataggatgtacattgtgttttttaccgtttgaggtcataagagtttaagagcctctgatttacaggttaggaacagaatttcactctaattcaaggaaggtagtttggtttggaggtctgaagatcagtcttctaattcatcaaaatcccttcctctggcatctgcgtatgaaatggtccctatgttcaaggagctcgccatctaattgggaaggtggacacataattttttgtgaatgagtaagatgtgtgagacataagagtagcaatgataaggaaatgtggagatggaaagggctaataacttcctggtgggacccaaaatggtttcactcacctttgatctgggtgttgaaggatgtataggagtttgccaggcagaaaagaagggagatggcatatttggcagagagatcacagtggggcggggagatgggtggatttggctgggaatggtggccatgcctgtaatcccagcactttggaaggccgaagagagaaaattgctagagctcaggagtttgagaccagcctgggcaatagagtaagactttgtctctatcaaaaatttaaaaattaactgggcttggcggtgtgcacctgtggtccagctactcaggaggctgaggtgggaggattgcttgagcccaagaggttgaggctgcagtaagccgtgactgagggcttgtgaaacagcaagaacctgtctcaaaaaacagtgggcagggaggggattaatgaataggcagctacgttctgggactggagggactcgaggtggctagaaagcaagaggtactgggagacaaggctgcagacatttcttttttttttttttttttttgagacagagtctctatcgccaggctggagtgcagtggcgtgatcttggctcactgcaacctccgactccctggttcaagcgattctcctgcctcagcctcccaagtagctgagtagctgggattacaggtgcgcaccaccacacccagctaatttttgtatttttagtaaagacggggtttcaccatgttggccaggatggtctcgatctcctgacctcgtgatctgcccgcctacggcctcccaaagtgctgggataacaggcgtgagccaccgtacctggctggctgcggacatttctatcaggccacatcctttccatcagcctgactgcaaggcttccttgcccgggagccccccaatagccgagcggggagccggcaggaagctggatggagctgtgtctccctgcacgtatgtgctccgggcctgagcccagcagaggtggtggcaggcagcctttcccatctggtttgttttggcagttccctcctgcagcctatttgtttgttgtttctactccatgttttctcactgcttgccagtggggcttccctcagtggcagttctgcagaaacagacctccacattgccactgaaggaagagtggggcctggggctcactcttttgtgtgtgggggggcgtgaaccaggctcctgcatctactagagtccatgcagggcaggtggggcagggaaccctgcctgcaggcccgaccgtagggaggctagctccagcctctgttctcctccctctactggctctccaaagtgacttccgtcaaagcttgggaggccagaaacagtgagccacgtctgtttgtaatcccagcactttgggaggcccaggcaggcagatcacctgaggttaggagttcaagaccagcctggccaacatggtgaaaccccgtctctactgaaaatacaaaattagctgggcgtggtggcaggcgcctgtaatcccagctactcaggaggctgaggcaggagaactgcttgaacccgggaggtggaggttgcagtgcaccaagattgtgccattgcactccagcctgggtgacagagggagactcagtctcaaaaagaaaaaagcttgaaaaacgggagaggggtgaggagatggaggcagaaggtgtgtgcaaatgcaatgccctgccctcctttttacattttatttatttatttatttattttagagacagggtctcactctgtagcctaggctggagtgcaatggtacaatcatagctcactgcaacctcaaacttctaggctcaagcaatcctgcctcagcctcccaggtagttaggactacaggcaaaaaaaaaaaaaaagagctactattgttttctttgtttgtttatctgtttgttttgagacggagttgtgctcttgttgcccaggctggaatgcaatggcgtgatctcagctcactgcaacctccgcctcctggattcaactgattctcctgcctcagcctcctgagtagctgggattacaggcacgttccaccaagcccggctactttttgtatttttagtagaggcagggtttctccgtgtttgccaggctggtctcgaactcgtgacctcaggtgatccgcctgcctcagcctcccaaagttctgagattacaggcgtgagccactgcgcccggccaagagctagtattgtttagtatgaagccattttgctaagaaatggttttaggcttcttaataggaatggggagaagtgaaggaaggcaattttgtgtgcgtttaattctcaagtctgagttattagtagaaactaacaactgagccagactcagttgtggctcgcatagcagggaaggggacgggaccttgaaatattaagtggtttgatcaggctgatgatcctgctagagaagcccagcactttgtcccaggtgagtttctggtgcttggtcaggagttgagggaaaaatggtgtttcacaaaccctcaaaccactagagaggttggacgagaacgtgtcaattgtagttccttaggaaacagatgtccaattgcacagagatttgggatgaggcaaaggtcatcctaccagaaggaagcctgtgaaaatggccacttaaggtcccaagaccctaatgacattatgggtgtttttcagtttatgtgtttgagtttagcgctgttttctaattttggtcacgtattgtttttgtaatgagcaaaagttcatcataaaagttgctttttttttttttttgagacagagtctggctctgtcgcccaggctggagtccagtggcacaatcttggctcaccgcaacctccgcctctcgagttcaagtgattcttctgcctcagcctcctgagtagctgggactataggt

SEQ ID NO: 94869 - DNA, 27324 bp, Homo sapiens
  misc_feature (1)...(27324): n = A,T,C or G
taaatccctaagagatggccccagatcttagtcacatcacccgcatctacctgatcccaacacaggaatcatacacacatcacacacacacacacacacacacacacacacacacacacaaaacccacacacacgcaaacaacatacatacacacagacacaaacaacatgcacaacacacacataaacatacacaacacatacacacaacccacacaacacacacccaaacacacacaacacatacaacacacacaacacagacctaaacacacacaacagacataaacacaaacacacacacaaagacacacacagacacaaacacacatacacatgcacagacacacacgacataacacagacataaacacaacacacacacaaacacagacacacaaacatacacacgcacacacacgacataaataacacagacataaacacaacacacgaacagacacagacacacatacacatgcacatagacacacatgcacagacacacagacacatgcacagacacaacacacacatacacaaacacatacatacacacagacacacacatgcacgcagacacaagacataacacacacagacacacacacatgctgctgcctgctgaacaaaaggcatgcctgctttggggcagaggctatcagtgcatcacaacaagcacattagatgggccacctgggctctggcactggccctggcatctccgggaggagtggcggagcatcccgactcaggtgtttgagagcccctgctggggtgagcagggctgctgggtgaccttgaaggccccttctgaccttgccagtctacctagagctgatgcacccaccagctccccttctgtgcctgtgtccacgtttctaacacagctgctcatctgcgccctgccagcatcagagggttgctaggtcaagatcaaatcagatcgtttacagtttgttttatatactgcaaaagcctggacaatgaaggtgtaattctcctctgaagattcctggcctgtaacttcttcaaagcacatacactgttatggactgaaatgtgtcacccaaaaagtcctctgctgaaatcctaacccccaaagtgatgggattaggaagcgaggccttagggaagtaattgagatcatgagggtggagccctcatcagtgagatttgtgctcctttatcaaagaggccccagagggctgtctctgctctccgccatcggagagtaccacaaggagccggcagtctgcagccaggaaaagcaccctgccagaagctgaccatggaagcacccagatcctgaacttcagcttccagaactgtgaaaaatgaatgcctgccatgtataagctacccggtctgcagtgttttcgttaccgcagcctgagccaactgggacgcacatacaaacacctcctctccagttcttcattcttctcaccttcgggcagcgtactgagctggttcctccggacattgaggtcccgcagggaagagaggccacacagttccgagggcagggattggagctcgttgctgctcacgtcctggtatcaggaaggcagtgggaaggggccatgagaccaggcccagcagaacccaccctcccatctctgtctttgctccaggccctccccaacctccccctagaaggtcccgctgcctggctcaggggtccctttcctggtcccgtccccatcctcacaagctgtcgcaggcttcccagggtgccgatgtcagggggcagggctcccagcttgttgttgctgacgatgaggaccctcaggggcagctggcagatgtagggtggcagcagcgacagctggtttcggctgtggaagggagaaaggcagcggactggctccccaggcatggcatcccagcactgccatcctctcggggtcactgggtgggtcactcagtagtacttgagactgagaagcacacgctcccacgtggccctggctcggcctccctacctgaggttgaggtaggtgagggctgtgagattccccaaggctgggttcaggcatctcaggcaattgtggtagaggctcaggccctccagggacaccagctggcacgccgcctcgggcacctcrggaaaccggttccgggacaggtctggggaaaaggaggtgtcggggagagttgcggaaaggcccagcccggacaggaccttcagtccccccagagccggctgcccactccctcacctccacacctaaagattcaaggccatcaatgtggcctcccaggagagataacaaagccttctgccaacgggagcacattccaggcgtgaccagaatggcacagggaaggcaaaggccttagcgtcactgggctagagaagcctcagacttgggggttggggaatgtcaatggagggctatcctggagagcagctggaatctctaactcctgtggttcctgttcagagatgccaggtgaggcggaggaccgaaggtgagaggaggggtcagtgctcatgggaaaacagtaaggcgaggggctggggggctcccggagggaagatgggaaacccctggggcaaaccacagggagtgcccatccctcctcggggcccttcttccctactccagtgtgttttcaacacgggaaaaaccacaggtcactctatcttggttctagagataaagtccccgacaccggacgagtttttcgccagccccaaggaccagcaagccaggtccaaagaatcataaagttactgattcccaagggctgggagggaagggcaagaagacctggttggagatgggagctggagttcccaggtccctcccatctgggcttctctggcccagggcaggcatccttcctaccctctgctagccctagcagcccggctctgcttcctctcttactgacacagacttcaagagatcagcaactgtgtgagcatctcaggcacggcgagggtggagagtgtgggagggcctggggtctacaatcgccctcttatctggagcactgccttgctatgcggaggctggcagccttgggattccctgtagcacggacccactaacggcttagacctggagaagcctgcctttctgtttcctcggcccagcctgtcctgggaggggcccagggcccgcgaggcggagtcccaggccacagacctggtgagcttctccaagggcccttctcagggaagggcaggccagcaaaagcaagcagaggagagaagccgggtatatcccccaaggaaatgagtcttgtgacaggaaatgaagtagaaacaatctgtcaggttctggctctggtaggccccgtgtttaccagggtggatgacagcctgatgccccgggacccctttctcttcctctctgcccagccctggtgcacagacagaagccctggcctcagagatgaccgttctggagagggtggggggatggcatttgcccctcccagcctcgcctccacctgcccgctttctctgcaaatgtgtttgtgtgtgtgcatgtggacgaagggggtggagaccgagttctcagagttctgatggggtaggcggtggcggggacaaaagctaggagcggaagggagctcaggcaggaggcagggcactgggggcacaggatgtggtctgggagagaatgagctgcacttctcctttgcaagatggcccctccccgccacctcaggattcttcctactatcaccccagggagcctagtccaagggagatcagggacccaagactaggcgacacgcagcgaagacactcagaaagagatgggagacgggaggggaaggctcaaggcagtccgggcagcaaggcactgatgcttttcgtctgcttggagggcgaggagagatggagggcagggtatgggcaactgtatgtttttgtcacttcccctttctgtccctgcttgcggagaggggacagaggagagaattctggacaagagggaccccacttggcctagaacctgggccctgtgtagagagtggggcagaggagggttcttgggaagctgggatttccgacccccccccaagctcacaggagcacggctgcaccctgagccggaatgctgggggaggagggggccgggggcgggagctgggaggggccggggagctccgggtagttttccccaagagtccacacagggagagacagcctaaggaagtaaagaataacatttggtctttgtcaaaaaacaaccaagggggaggggaagggaacagacagtgagtgtcacacagctgctgaggtcaatctggagtgtggggttaggtgggggtgggagggaacagggctgtaaggggcaggaatggctcctggagctcactcattccccatctcaagtgttgcagagcaggcgagatcagtggggaggtttcgactggttctccccagaagagggaagaggatgtgtgccagtgccggcctgagtgttcccaggtgagcaggcacctgcttagggagaagtaagcactatcctccagctctggtcccccaccgtgcagatgagaggaggaagaggcctgggctggggtgaggcttcgggaatgcagtcctcctccctgatcctgatccccacccccagctgccggcccaaggtcataggctgcctcctgagtagctgaggcttgactcacctgtcacagttaagtcccccaccccctaccatccacagacaccagggtggagggtgcatggttggacagatcctgcgggtggaggygtggaaggacagtctctagctggccagcactcccagctaggagataagatttccttccctccagcaacggcctcaagtccctcccccgggggaaagcagaaactgaaatgggaattctaagatccctatgaggtcacaggctccacagtgacctcacaggcttaggaaggaggaggaggaatctcagataagccggttggggataataggcggaagagctcagggagaaaagagtgaggggaggtagagatttgtttctttcccataggctggagagctgcgtggacagtggagagggccaggaccttagggggcggggttgcggcacagaaagcagaaacctcgggcttaggggccagtcactgggaagggggtgcccggggctgctcggatctcggtgggacgggggttaagaggtgtagatgaagagggagagaaagcagttattagaggagctcgtggggactgcttcatagaccgattggagctgaggttaagagatcatgtaaataagccaaccaggtgaggggcgggaccatcctacaggtgcgcagatatgcaaataaagagaaaggaggaatctctcccaacgctcggaggcgcagggcgttctgtgcaaacgagaagcacgttcattgtctagggggttctcaaagatgggagaggatggctgcaggtttagggcaatcaggaggggcagcaaccctggccgccaggtgaaggggcgggcccgactcccgggccgggcggggcccggggtggggctatgcaaatgagggacccggttgggcccggggcccggctgcactcaccagcctgggtgatgtctgacaggtcgtagctacgggccgcgccccgggggaagtgcttcaagcgccggttagacaggttcagggtcccggtggccacggcstcctctagggcccgctctgcactgcgtctccccggcagacctggagacccgggcacggaggtcgtggctgccgcctcctcacccccggcggcgagtggagccgctacggccgccgccatccgctcccggcggctcccgctgcctgactgacgggaccggccgtccctccttcccccaccccctccttggagccgccgtagttgcctcaagggggagggagcggtgtccgggaccggacggaccaatcgtggccccgagacgcgtcagaagcggccaatcagaacccgtcagtgggggtggagctccggcgccggagtctgacgagagaagggaggggaacaaggatagagcgctcgccaacggccgacgctccaggccgtcccgcccagcgcagctgcacccaatcacaatgctcagatcgggaggtggagccaatcaggtccaaccaagaggaggggacaccggcactccactagcaggaaaacgggccgagggaccgcaagcagggggtgcctagtcctcgtcccccaaagaccaatcgtaagccagatacaggcgagtgactgtcaagaaggccaattagagcctccgaagggaatctggacctgcctcttctctgagggacggctctacctaccaatagcatgggcgagaaggcggtccctttgctaaggaggaggcgggtgagctagaactttaagactgaggttaagaatgaacgcggagcccctggccggcsgggaacgcagttcgccgctgcagtggcgagtgcgagctggacgtgttagggggctagccggcgtccagggcttgaggggattcgggcgactgcttgaggccagtgcactggcggttgtcgcagctgaaggggcagcggggggacctccgactgtgaagcctctggcaggggtctcgggacccccgggctgggggcgggcggggggcttcccagagcctggagatgcccagctcgaggagggagggtgtaggtgcagcgttgcacggtctgccgtctcacccgaggagctcccctggacaggaatggagaggggaccagaccacggggttttagaggcttagaaaggatctcaccgcctagaacacgcccttggtgctacgaatgcagaaactgaggcagagggaagttgatgcgttagcaagagcgaacagcaagttcctgacagctggcttgctctagaaaccaggtctctggatcctccacgcacagccctttcccgctccctcagttttcacagtggatgttttcactcccttcctctcttcctccctccctccctctcccttccgttcccttcctctttttatttttttattttttgagatggagtctcgctcagtcgcccaggctggagtgcagtggcgcgatctcggctcacagcaacctccactgtccgggttcaagcaattctcctgcctcagcctcccgagtagctgggactacaggcgcccgccaccacacccggctaattttttgtattttagtagagacggggtttcaccgtgttgcccaggctggtcgcaaactcaggagctcaggcaatatgccctcctcggcctcccaaagtgctggcattacaggcgtgagccaccgcgcccggcctttttttttttttttttaagaaggtctgattctgtcgcccaggctggagtgcagtggtgcagtcatggctcactgcagccttgaatgcctgggctcaagtgatcctcctgcctcagcctcccaagtagctgggaccacgggcggcaccactgcacctggctaatttattttcaatttttgtagagatggggttttgctatgttgcccaggctggtctcaaacttttgacctcaagcgatcctgcctctgcctcccaaagtactgggatcacaggcgtgagccaccgcacccggcccacagtggactttttctttcttttgagacagagtcgctctgttgyccaggctggagtgcagtggcttgatcgcagctcactgcagcctcaacctcccacctcagcctcccgagtaactgggactacaagcacgcaccaccatgccagctaattgtattttttgtagagacagggtcctactatgttgcccaggctgatctcaaactcctgggctcaagcaatgctcccacctcggcctcccgaagtgctgggattataagcgtgagccacaaagcctggcccacagtggactttttctattcacaacctctcgtttgcctcctggggtgaaatggagtggataaaggggacccaaatgcaagaggaatggaaaatacctttctgtctacttggagatcttcctttctaagtggcatgagtccctaatgcagtcccctccctatgtggtaggttgcccagaaataagtcactgaagttgctttctccttagttcacatctcagaggttgatattcctgagtagttgctgaagaattaaaattccatytcaggcatcccagcctagccatggctaggcaccatacataagggaatttgggtggtcagtctggtgcagtcaatgaacggatctgtgacactgtgtggtgagggctggtggtctggcaggatgggactcctttgagcccctgcaagagccagccactccttggatttattggtgtagatctggcctgagtgggacagacacaaccctgacccctgctgtttctcctgataaatgtcaccccacataagacaaagctaatatcagagaccctgggagaaatcctaagctttcagaggaaatccatccctttctcccaccttaataggttgtcctttatacatgcaatgatgttactgtccctcaggaaagcaaaagcagtcttcttttttgtttgttttttttgaaactgggtatcattctcgcccgggctggagtgcagtggcacgatcatagctcactgctgcctcaaactgggctcaagcaatcctcctgcctcagcctcctgtgtagctgggactacaggggtgcatcaccacgcctgggtaatttttaagtttttttttttttttaatagacgcagggtctatgttgaccaggctggtcttgaaacccatggcctcaagccatccttgcaccatggccacccaaaagtgctgggatttcgggcgttagccaccggcaccaggctgcagtctccttttggatgtgttttttcacaagtctaaagagtttgctgaatcatttgtgagctaaacgattattagcacagtcacctctccatctcacctgtcaaactgagtttatagttttttgagtctatactcttgagctaccaatccctagaggccttggcctgctgaaatgtgaggaattcactagtgtttctctacagagttagtgctaaaagggcctcaaataggaaaacttcctcctgctccctgaaataaagatgtcacctaccagtaattcacactttatttctccagtaaaatgcatatcccttgagccatgtgatggctagaactgagctagaacccaggagctgtctaagagatgggtcctgggcaagattaaagggaacaggtcacagtggccaaacagtgaggtcacagagaggtttgttagccccagactccatgggggaggggcctaggaggcagaggggcctcagaggtcccccaagcctaggctggggacatggtgtgggaaagccagcaggaacgggggggccaagggcctaggagacaggagggcaggagcagggagggggcaatcaggatggtcaggggaagccagagacggaagctgcaaaaattcaccaggctgtgtggacgggaggaggggctccgggtgagggggattggccgcaggagatcgggaggagttatttggagaagttagggatgggtctggagagagaggggaggaaataactgtgcccagctagagtcagatgagccccaaggtaggcggagagaagggaaaaaaggatgtgggaccctcatgggaccctatgcaccccttcttgggtaggtgaagagaagctgcccttcttgtggctcggagcttggggttgaagagaagagggggaaaggaaatccgatttccatccagttgttccccccagagctggtgagtccttggggagggggattgagaataataggattgggggccagatcaccgaggggccaccaaagactccccgcttcttccctcctccctcccaggtggagcatatcatctcattcctcccagtcagagaccttgttgycctcggccagacctgccgctacttccacgaagtgtgcgatggggaaggcgtgtggagacgcatctgtcgcagactcagtccgcgcctccaagatcagggttctggagtccggccctggaagagagctgccattctgaactgtacaccttccccagaacctcccgttctccttgcctctgtcccgccttagccttcctgctctctaaagtcccctgatgacccccacactcccaacagtgcttccagggcccctttctccggaagaaacgggtccagttcaaacattctcccttgagtacttcctccaagtcttcggaatccacccacagcccccgttagcggcctccctgccaagtctccctctgtacacagacacttcccgctttttccctagaggcatccctcactccccaaacctggagttttccctcctctaacccaaggcttctgaactcactgttgatattctgggcaaaataattccttgatgtggggagctgtcctctgcatggtgggatgtttaagcagcaaccctggcctccacccaccagatggccagcagcatcccccttaattgtgacaaccaatgcccttgaaggacaaaatcacccctagcctgagaaccatgccataaaccctcttcccctccagggatcccccagggtgtacttcttacactcactgggagattaaaagagaagggggacccagaaaacagatccaaagctaggggtgagggaggatgaccggccttcatcaatcattccttttcactcctgtttctgtctcttctcttttctttctttttctttgattttttttttttttttttttttttgagacagggtcttgctctgtcacccaggctggagcacagtggtgcaatcttggctcaatgcaacctccacctcccgggttcaagtattctcgtgcctcagcctcctgagtagctgggattacaggctcccgccaccacacccggataatttttgtatttttagtagagatggggttttgccacgttgcccaggctggtctcaaactcctgggctcccaaagtgctgggattacaggcgtgcaaaaattcactgagctgtgaggatgggaggaggggctcagggtgaggggggtggatgccgcacgcagcctctgtgtctttattcttagagttttcctcaacatcactgatgcaaggttgcaccaaagaactgctcactaagaagcaaatgtttgaccctgggctgaggtggggtggagactaaagttcacatgtcgagtataatctaagcttattttccacatctccttcataaggggtctgtttgttcccctgtcctggggatggggaggaactacaaaccagcgtgtctaagaaatctacccaagctccaactcatctccctcgtgtcatctcatcccttgaaccttccatctccttccttcctccagacacgaagggcctgtatttccaggcatttggaggccgccgccgatgtctcagcaagagcgtggcccccttgctagcccacggctaccgccgcttcttgcccaccaaggatcacgtcttcattcttgactacgtggggaccctcttcttcctcaaaaatgccctggtctccaccctcggccagatgcagtggaagcgggcctgtcgctatgttgtgttgtgtcgtggagccaaggatgtgagtagcagaaccctggcagctgagagcccacctgtattagtccattttcacactgctataaagacgtaccagaggccgggtgcagtggcttacacctgtaatcctagcactttgggaggctgaggcaggcggatcagctgagaccaggagttcgagaccagcctggccaaatggcgaaacccgtctctactaaaaatacaaaaattagctgggtgtggtggtgggtgcctataattccagctacttgggaggctgaggcaggagaattgcttgaacttgggaggcagaggctgcagtgagctgagatcgcacccttgcactccagcctgggcaacaagagggagactccgtctcgaaaaaaaaagacatacctgagaccgggtaatttataaggcaaagaggtttaattgactcatagttccacatgactggggaggcctcaggaaacttacaatcatggcagaagggaaagaggcacgtcttacatggcagcaggcgagagcacacaagcaagagcagggaaaactgccttataaatccgtcagacctcgtgagaacccactatcacgaaaacaacatgggggaaaytgcccccgtgagccaatcacctcccactgggtattacaattcgagatgagatttgggtgggggcacagagcctaaccatatcaccacctctcttttgaggacccaggcccccatcagtcttgaggtgtctttcctatgacttctgccctcccacataggaacctgaaatcaagggctcatttcccaactctggacccaagcatttcacttcccaccccaggatccagctgccccagccccatcccattttgmaactctagatcccagacgccctcatcttttcccccagtttgcctcggacccaaggtgtgacacagtttaccgtaaatacctctacgtcttggccactcgggagccgcaggaagtggtgggtaccaccagcagccgggcctgtgactgtgttgaggtctatctgcagtctagtgggcagcgggtcttcaagatgacattccaccactcaatgaccttcaagcagatcgtgctggttggtcaggagacccagcgggctctactgctcctcacaggtgtggcccaaagcaatggcttttgcaaactgtttcctgcagattcctcagaccctgctgcagaggagggggagggaggcccctcagactgggttccatatgccaccttatcctagtctccatctaaacagctctgcccttctctgtctcctagtctaggattctgcttaatattttatatgaataaaaggccctgtccaggtgtggtggctcacacctgtaaccccagcactttgggaggccgaggtgagcagatcacctgagatctggagtttgagaccagcctggccaacatggcgaaaccccatctctactaaaaaatacaaaaattaggtcgggtgcggcggctcacacctgtaatcccagtttttgggaggccaaggcgggtggatcacgaggtcaagagatcgagaccaacatggtgaaaccctgcctgactctactaaaaaaaaatacaaaaattagccaagcgtggtggcgcgtgcctgtagtctaagctacctgggaggctgaggcaggagaatcccttgaacccaggaggcagaggttgcagtgagccgagatcacgccactgcactccagcctggtgacagagcgagactccgtctcaaaaaaaaaaaaaaaaaaaaattagccggacgtggtggcatggacctgtagtcccagctacttgggagcctgaggcaggagaatcgcttgaacccaggaggtggaggtttcagtgagccgagattatgccactgcactccagcctgggtgacagagtgagactccatctccaaaaaaaaaaaaaaaaaaaaaaatcagatgtccccagcttccatgccaaccacctcactatactccaaactgctccctactttcccaatgtcctttatactcaaccacatccccaggcctgagaccctttaggctttttcttaaaatatttttttcttttttggagcaaggtagagatggggtcttgctatgttgcccaggctggtctcgaactccctgcctcaagtgatcctcctgccttggcctcccaaagtgctgggattacaggtgtgagccaccacacttgaccacctctaaacttctgaatgccaggcagggccctcaatccccagacctctcactcaaatcggattctaacaaatctgctagatttttctctctgctcatctctcatgctgaagtacttccctgatttatggtgggaactggagtctgggggacttggggtcactcttcccttatttctttctcagccccactctagggcagtaaatgtgtcacccatatggcctagggagtctcttgggatgtttatgtggatattggagaatcccctccccaactaattgcttcccctacccccagaggaaggaaagatctactctttggtagtgaatgagacccagcttgaccagccacgctcctacacggttcagctggccctgaggaaggtgtcccactacctgcctcacctgcgcgtggcctgcatgacttccaaccagagcagcaccctctacgtcacaggtatggaccacctccccccggctcaagcccgcagccttggttagaccctctaaacatcaacacccttcacccttactccagctgcatggtgaacccctgagggcatcctagtgaaaagatgtgtttagggccggcatggtgactcatgcctgtaaycccatcactttgggaaaccgaggcaggtgaatcacctgaggtcaggagttcaagaccagcctggccaacatggcgaaaccccatctctactaaaatacaaaaattagctgggtgtgatggcaggcgcctgtaatcccagctacaccagaggccgagacaggagaatcacttgaaccaggaggtagaggttgcagtgaactgagatcgtgccacttcgctccagcctgggtgaccgagggagactcggtctcaaaagatgtgttttcagttcccaggcatcatagttgatgcattcctagtgggtatgagactccttggatcttgtagctttcatcccaggtggggccttatccctaggaaatgggtgcccaaagctgctgagctgagggctcctgaccccccagaccaggggggagtgtattttgaggtgcataccccaggggtgtatcgcgatctctttgggacccttcaagcctttgaccccctggaccagcagatgccgcttgctctctcactgcctgccaaggtaggctcctggagggacggggcaaaccagaggggtggcgctgtagggattggaaggtctgaagtattataggaatcagattattgatccagaggggcaggggatccccagggagaggtatgccaaaagagatcagctgggggctcggtgcggagggaggctgaggagggagtatcgcttgagcccaggagctctagaccagcctgggcaacatagtgagatcccatctctaaaatatatatatagaaagagatcagctggggatggcaggttagtggcttggagactctggaactcagagttcctctggagggaatggaatccctatcccctttctatcttgcacgctagatcctattctgtgctcttggctacaaccaccttggcctggtggatgaatttggccgaatcttcatgcaaggaaataacagatacgggcagctaggaacaggggacaaaatggaccgaggggaacccacacaggtgagactatttcccagcaactctcatcccaacccctttcctccaattccctaacccccagatctgtccacttctccagattccacagaatccaatttctgttcctttgggaagttaagccactcagtatgtaatgccagtggtactacmccatgtcttacccagggttggcactacgaggtccattctgtgcagtgcacactgtaaatgcaataggaatttagtgaaggggtagggtgggtgacctgggcaggctagagacttctagaagaggtaagatgtgagcaggggccaggtgcagagcctcacgcctgtaatcccgacactttgggaggccgaggtggacagatcacttgaggtcaggagttctagaccagcmtgggcaacatggtgaaaccccgtctctaccaaaaatataaaaaattagctggctgtggtggcacatgcctgcaatcccagctactcaggaggttgaggcaggagattctcttgaacctgggaggctgaggttgcagtgagctgagatcgtgccaccctactccagcctgggccacagagcgagactccgtctcaaagaaaaagaaaaaagatgtgagcagggcatcgtgggttacataagacttaggtagggatagagaaggcattctgtgtgatgaggagggggataggcacgaaacttgcacatacctgggacagtgacaagacgggtctcactaaagcacagaaggcatcttgggaatcactgaggtatgaggtggtacaggtgggcacaagcttagagaggtgtagatttggggaagagtcactgcaggttctggaataggagaaggcaacccccaagaggtgactgagaatgtgtcaggagccttgtgcagaggaggccaaggaggggagcccgccaggaggctgttgagtgatgacagcacttgagacaagcgcctggtgctgcagcgagaatgggaaggaatggatacaggagctatttgggaagaaaatgaatagggcctcaaaactgattagatgtagaagagaggggtataagacagaggtggctctggaagaaagatatctcacacctgtaatcccagcactttgggagaccaaggtgggtggatcacgtgagcccaggagcatgagatcagcctggacaacatggtgaaaccctgtctctagaaaaaataaaaaattagccaggtgtggtggtgggtgcttttagtcccagctactcgggagtctgaggcacgagaattgcttgagcctgggaggcagaggttgcggtgagccgagatcgtgccacaacattccagcctgggcaacggagagagactctgtctcaaaacaaaacaaaacaaaaaccacactcaattggaaacgtctagctggcaattagattctacctgggaacatggttgaacaaacagaagtagagactgaaaagcaactctgagaagtaggccctgtggtagacaggggatgaagaggtgcctctaagacaggccgtgcacccctctaacactgtcccagaagccacatgagaaggaagttccaaatggggtgggtggtagggttaattgatggtgtgacaatgtaagatacatttactactgacatggaaaagatagtcatgccatatttttaggtgaaaaagacttttatgaaatggtttacatagtaccatttatttttatttttatttttattttattttcaagatagagtcttgctctgtctcccaggctggagtgcaatggcgcgatctcggctcactgcaacctctgcctcccaggttcaagtgattctcctgcctcagcctgccaagatgggattacagcgcccaccaccatgcccggctaatttttgtatttttagtagagacggagttttaccatgttggccaggctggtctcaaactcctgacctcaggtgatctgcacaccttggcctcccaaagtgctgggattacaggtgtgagccaccgcacccagcctctttttatttttattattacttttttgagacatggtctccactgcttcccaagctggagtgcagtgacacaatcgtagcttgctgcagctttcaactccagggctcaagagatcctcccgcctcaacctcccaagcagctaggactacaggaatgcgccactacgcccagataagtttttgttttttttgttttttttgttttttttttttttagagacagggtcttgctatgttgcccaagcttatattgaactcatggctttaagcaatcctcccacctcagactcctaaagtgctgggattacaggtgtgagccaccacacctggccccatcccattttttgtttaaaaatacacaacttgcccatcatggtggctgacatctgtaatcccaactactcaggaggctgagacaggaggattgcttgaggccaggagttgaaggctgcagtgagctgtgatcaccactgcactccagcctgggtgacactgagaccctatctctaaaaaataaaaaatatacaatttatgtgtatttgtttgtttagccaacagtgaagaatatctagcaagatgttaatagtagatggtgggatttccaatgattttaaaattaattttttgcttgccaatgtttcataatttttctagaatgaccataaattacttatcagtgtcttcagaattaaagcgctaacaggctcaggagaatgagggggcagaagacgccctgggatttagccactgagaggccaagtgcctctagagagagcatgtcagtaatgtaatagagagaaaagcgagatcccagggaggtgctggatagactggctgtgggaaggaacagtaatgtggtcagcctcagattggtcatgtaaccaactctgctgcttaagagagagaggcaggaagcggcaggaagcaagtagaagcttttttttcaaaaacagggtggccattttggaaaagaattatgtgataagttgaaaatgctaggctaagcatttcaactagctcacacctgtaatsstagcactttgggaggccaaggcaggtggattgcctgagcccaggagttcgggaccagcctgggcaacatggtgaaaccccgtctctactaaaatacaaaagaaattagccaggtgtggcggtgtgcacccatagtcccagctactcgggaggctgaggaaggagaattgcttgaactggagaggcggaggttgcagtgaactgaaatcgtgccactgcacttcagcttgggcaacagagcgagactccgtctctacaaaaaaaaaaaaaatgctagaggctgaggtgggaggcccggagttcgagatcaccatgagcaacatagtgagacactatctctatagaaaatttaaaaatttaaaatttaaaaattataggcacatgccgggtgtggtggcacatgcctgtattcccaactactcaggaggctgaggcagaagaatggcttgagcccaggaggtcaaggctgcagtgagctatgattgcaccactgcatttcagcctgggcaacagaatgagaccccatctctaaaaaaagaaaagagaaaataaaaatgctagagtggaggctgggctcagtggttcatgcctgtaatcccagcactttgggaggccaaggcaggcagatcacctgaggtcaggagttcgagaccagcctggtcaacatggcaaaaccccttctctactaaaaatacaaaaattagatgggtgtggtggcaaggacctgtagtcctagctacttgggaggctgaggtgggagaatcacttgaacccaggaaggcagaggttgcagtgagccgagatcgcactgctgcactccagccttccgactctgtctcaaacaaaaaaaaaaaaaagaaagaaagaaagaaaagataatactagagcaggaagggagggatagtggaagggaaagtccttcctcagggtggtgttggggtctaacctggaattgcacaagaagcaagtctccccgaggctggcaggcaggatgagaggctggactggcatagacgggtgggctgagaatgaggggtacaccacagcaggccctgggctcaggcaaggagctgattttctgggggcatagatgagataccaacagaagtgcaagaccctatgtgaccagttagagtatgggggctgcaggggtcagcagggcakacctggggcgtgggacagtgctggctcccatttcctcctccccagttcattctgccccgagccttccagtcaaccttttcccaccccagcccccccgtcccttggtgctccctgctcagggaccctggccrtgtgtccccaggtttgttacctgcagcggcccatcaccctgtggtgcggcctcaaccactccctggtgctgagccagagctcagagttcagcaaggagctgctgggctgcggctgtggggctgggggccgcctcccaggctggcccaaggggagtgcctccttcgtcaagctccaagtcaaggtcagagcggggtcaggagagtgggcacccagggaggatgaragccntgaaccaggaagcccacaggctgtagctggggctcctgcagggacccagggggtcccatttccctagcaccaccccacctccctcctctgccgcacaccacgctctctgctttctcccttagcagactgtgctggccttgcccaacctcacacacccctgggacttagccggctcagggctggtgtgagagggaagaatgcaataggcagattagcccgggcaccctgggaaaccctgcaaggaaagcaccactcagccatgccccctttctctcctcctccaaggtccctctgtgtgcctgtgccctctgtgccaccagggagtgcctatacatcctgtccagccacgacattgagcagcacgccccctatcgccacctgccagccagcagggtggtggggactcctgagcccagcctgggggccagagcaccccaggaccccggggggatggcccaggcctgcgaggagtacctcagccagatccacagttgccaaacgttgcaggaccgcayggagaagatgaaggagatcgtagggtggatgcccctgatggccgcacagaaggacttcttctgggaggccctggacatgctgcagagggctgaaggaggcgggggtggtgtagggcccccagcccctgagacctaatccccctcatgctagcctagtccctggaggagggagtccggccccaggccagggactaaggagcaatgaccattgtgcacatgcgtgtgggaaggggttgctagggggtggggacggctaaccagggtaagaatgttcagggggctgcccaggaggggcccccaacctgactatcatggacaagagatttgatggatagaataaaaggctgcagcgaggcctggtgtggaagccttgggggctgggagggacaggggcagggatggggtgggtgggtgcccggcttggtgggtgcaggagggcaggagcccaggcaggggcaggcagcacaagcagctccaggtctcaggtgcagcagagctgatgctgcctgaacccttcacattgttgtccactccctgctcccaagagcacacctggtcgtttggactgggaagttctggccctaccttctggaacaactctatgcacagatgctcttggctaccccactgggatcccctgcccactagacttgtccccatcctgaggcagcctgttcctcctgacccccgaaagcttcccacccatctcccttcggcctgaagccagcccccctcctctctcccttctgtttacctcccaggtttgggctstattttctactccttccacctcttcctgagtaacaaggacactcccttcatccacaccccatgcctcctgccttgcttcctgtaccttcaagtasttggaagaggtcatgggtgagaattccttctccttggcctagtctggcccaggtctggagagaaggcaatggagatgtgaagtggaggccaggtgtggtggctacgcctataatcccagcactttgggagtccgaggtgggcggatcacctgaggctaggaatttgagaccagcctggacagcatgctgaaaccctgcctctactaaaaatacaaaaattagccaggtgtggaggcatgcacctgcagtcccagctactcgggaggctaaggcacaagaattgcttgaacccgggaggcggaggttgcagtgagcagagatcgcgccactgcactccagcctgggtcacagaatgagactctgtctcaaaaaaaaaaaaaaaaaaaaaaagaaattgaagtggaaaatgagctggcaggggtggtcaggcagggggtgagcaatgagggctcctgagctgaggaagcaggggcggggggaggatgggggctagggagtcctcagaagttcccggagatactccctcactggacagagtggggttcccgatgacgttacttgaggcctgggagacggcctctgcccctcactgctcctccccctcctaaggtcaacatttatgtgtcctagacctagagaggtcccaggacacgccactgtcccgccttccccattgcccgccccactggccagtccccacgcccacacacccaaggctgccccatctggcgctgattatcctgctgctgccgccaccgctgctgctgctctgcaaaattcagctgctgcctctgtcttgaggaccccagcgcctttcccccggggccatgctgcctgcagccacagcctccctcctggggcccctcctcactgcctgcgccctgctgccttttgcccagggccagacccccaactacaccaggtaggtctcttggcatcttccagacagctccagtgaacttcagacccccgattcctttggggttatgcctggagatattttgggttcccttgctgacacaccactccccagattccccaccgcctcacccttctctggcccccaaatcctccccatctgctgcaagaccttggtctcctgcaggccaccactgctcccattcccccaccttcgtcctctggtctcttaagtctccccacccacccagatccttgaccccccatagaacccaagagagagccaagctcctgaacttgcctggtagctggattccaggaaggaattcgagagggattgtagggggaggagggggcagtgagtggagacttgggagtcagaatctgaagtagtttggaacaggggcagggctaaggtgtggagctcgcggagcctggcctccaggttcaatcagagggccatcgccactgcagctccctccatctctccaccccctccccccyaccgcctcgtggctgtgtccacatctggaagtagttaggcggctcctgtccctggactgccaggcagagtgaggcgggagtctggaaggggggccgaggaggattccgggaattcctgttggggtgggggtggggactcttggggttggagggatggtcgagttgccaggcccacttttcccttatctttgtgggagtctgggacaccccagccctgtcctggctggtggaagctgccccaggtctctcaaggcctttccatttcatcccccagcttccctccttggagtttcatcctcatcacctcatccccatcttgccagtgctcccccgtcccacccgtccctgctctttcctgaccccttttctgttctccagacccgtgttcctgtgcggaggggatgtgaagggggaatcaggttacgtggcaagtgaggggttccccaacctctacccccctaataaggagtgcatctggaccataacggtgagaaacccctctgggcactaccccttgttaaagtctcagaggcaaaaaggcctgactgcgaagggaccccccccccgtcccccccgcaccaccttctcaacctggggcagctccaagtgtcttccctctgtcactgaaggcatcattcccaccgtaacacgcatcatcttaacccttccctcaaatcttcattctccagtccccggccctccctcctcttccaaagcctcagctcttgtcccctgcacaggctaccagcagagctgcagagaccaggccctctgctctgcactcacatggaggccccttcccattcagtccgtttctgcaagaaacgcttggggcaggggagctgccctctggctgggttgtgtggggcctgactctgtgggtccccgcctctgtccccgctatcaggtccccgagggccagactgtgtccctctcattccgagtcttcgacctggagctgcaccccgcctgccgctacgatgctctggaggtcttcgctgggtctgggacttccggccagcggctcggacgcttttgtgggaccttccggcctgcgcccctagtcgcccccggcaaccaggtgaccctgaggatgacgacggatgagggcacaggaggacgaggcttcctgctctggtacagcgggcgggccacctcgggcactggtgagaactccctcacctccgccttccccccctccaggccccgccccggccgcagccccgcccccagccctaacytccgccccgcccaccccgcgccccagtgcctagggccccctacctccctgacccattttcctcactaaccgccccttcagtccctcctccccgtcttctctcccctcctcccgcacccacccatccctcttccagggccccccccaggcgcgaggcggaaatgggtcaccgacccgcgggtggaatgggcggcctggggttactgggacggtgagtaactgccggcccccgtccgcaatcgggctccctccgtcgggcgcgagggggcaccccagggctggggggactaggttcctccaaccccggggggcccctacacccagccctgggctcccgattgcggtcccatcaccccctcctggcggcagaagtctcccttgcaatgtttcaggcggggacctccctaaaggggtcctcgggggctgtgccccaagtcgaggacaccctctccagcctgaaaggggactctgctgcagggccggggagatgggatctcctaggggaagaggcgcggtgcggccgcgggtcggggaggggccagaagggggcgtccagccagttcctcctcccgcttccaccgcccgccagtgcgccctgcggccccagacttccccgagccgcgctcctcccggccgctctctgttaacctgcccccatcttacctccccttcttctcgycccctcatcctgagccccagacatccgagctgcctgccggggctcccagcctagagttctcctgaagctgaccgagggtctccaccgccccccacccccgctcctctctcccctccccagagcaccaattttgcggggggcggctggagaaggcccagggaaccctgaccacgcccaactggcccgagtccgattaccccccgggcatcagctgttcctggcacatcatcgcgcccccggaccaggtaccgaccctcctccccgggctgccctaggggacccaggcggcgccctccagcttgcagccagcagagatttattgaagatctgctgtgtcccgagcactgcgcttgcgctggtgggcacccaaaacagccccaacccctgcatgcacgcaaacaaaaatgtaaaaattacaactgagacaagtctcaggagagcgaggtacagggtcctggtataacacgcgggcctgtcacttgtgagtgcgccaggacttgaccttgccaaccacgacgaccgacacccctgcagggtcccatgggtgtgtgtggtcctccgtgctgtggtgtgaacgccttcaggaggggggcccagaggacgcgggaggtgggagtgggagctgctgcaggcacccagtaggagatgaggtgcaggcgcccaggggtgtcccgccgcgcagtccccgcctccgcccgccgccaggtcatcgcgctgaccttcgagaagtttgacctggagccggacacctactgccgctatgactcggtcagcgtgttcaacggagccgtgagcgacgactcccggaggctggggaagttctgcggcgacgcagtcccggggtgaggggcgggacctgggcgagtccgggagagagtcggcggaccgcacgcacgcggctgtttggaggggcggggttcagctaaagggacgggatctgaaccccagggctccaaaccggcgaggggagcaggttggaggccaggcaaagaggagatttggccccgggtctggggtccgcggatagagaggcgactggggctctgcgaagttgggacgaagttaaaaggccacctggccaggggtagtggctcatgcctgtaatcatagcactttgggaggctgaagcgggaggatcacctgagcttaggaattcgagaccagcctgggcaacatggcgcaaccttgtctgtaccaaaaatacaaaataattagctgggcatggtggcgtgcctgtagtcccagcaacttgcggggctgaggcaggaggattacttgaacccagaaggtcaaggctgcagtaagcctagatggagccactgcactcaagcctgggagacaaagtgagaccctgtctcaaacaaacaaaaaaggtcatggggctgagaagagtgtggtgcacgcccgccctgacacttcccccaatgctcggtggccacctgcagctccatctcctccgaagggaatgaactcctcgtccagttcgtctcagatctcagtgtcaccgctgatggcttctcagcctcctacaagaccctgccgcggggcactgccaaagaagggcaagggcccggccccaaacggggaactgagcctaaagtcaagctgccccccaagtcccaacctccggagaaaacagaggaatctccttcagcccctggtgagtctgggataggggaggaaggggaaacagactgaagggggccatttcaaaaagttctgacctgggctgtggctcacacctgtaatcccagcattttgggaggtccagacagcaggatcgcttaagcctaggagtttaccatagcaagaccctgtcttttcaaaaataaaaaattaggctgggctggtggctcacgcctgtaatcccagcactttgggaggccaaggcaggcagatcacctgaggtcaggagttcaagaccaccccggctaacatggcaacaccacatctctactaaaaatacaaaaattagccaggtgtggtggtacacacctgtaatcccagctactcgggaggctgaggcaggagagtcgcttgaacctgggaggtggagattgtagtgagccgagattgtgccactgcactccaacttgggttacagagtgagattctgtctcaaaaaaaaaaaaaaaacttagccaggcgtgtggtcatagctactccggaggctgaggtgggaggattgcttgagctgggaaggtcgaggcttcagtgagccatgactgtgccgctacactccagcctgggcaacagagcaaaactccatcttaaacaaacaaaaaagttcttccttggctacattcactcattgattcatctggtactcactggtgcctccttcctgccgatgacccctactgggtgctaggaccggaagcctgacagagctctgaacagttcaagtcaatgaggctgttatggggacagtgctccctcctacctgctgagcaggtcaccctccaccctcctccctcctagatgcacccacctgcccaaagcagtgccgccggacaggcaccttgcagagcaacttctgtgccagcagccttggtaagaatacccccaaccccattccagctcctcgaaccacctcctgcttctgtttccagtcctgccatctggaacctcccatctcctcatctctcactcccattctcccacagtggtgactgcgaca

SEQ ID NO: 94870 - DNA, 29177 bp, Homo sapiens
  misc_feature (1)...(29177): n = A,T,C or G
gtggcaggtggctcagaactccggtctgactctgaggcgacagcagttggctcaggatgcactggaagggctcagagggctcctccatagtctgcaaggtaggcgggtcctccccaggatggtcagttcccctcttccatagccagagaaacatccgctcctgcgtttttgggatcgatataattactcggggcagggagtcctgtttaaggcacagaggagactggagtggaatcatctttgtacaggcaaatccctctcttccttacacactcacagagtggcatttgaaaaatggtttccaagatggtctgatctggataacttttttgccctttccagactctctgtccaaaggttgggttctttttttaaatccttagctaattggctggagggtgggttctttattgtagctgttttggttggagtggggtgatctctgagttgggattttatttggaggatcttccatgggggagcagtctgtaagaccaacattgttgctccagggctccctgcagctkttcctgttcttcccttggagctgactgtcacctgcaacttcattatcctgagggcaagcttggcccagggtttcacagaggatcaggcccaggatatccagcggagcctagagagaggtgagggccagagattgtccctgattcccctgccatcttcagtctgggtttaagttattgcagggagatgggaggataaacaacatctgtcacctccatggagagaggtgcccttctctgtgctcttcagaccaggttgaggtattattattgtgacctttggggtcctgcaggagaggaaagccagagtgtgtggggagatggaggatgaggtgctacttcagctgtgtgtgtgtctatgtgtgtgtgtatactctacagtgctgkagacacaggagcagcaggggcccaggttggaacaggggctcagggagctgtgggactctgtccttcgtgcttcctgccttctgccggagctgctgtctgccctgcaccgcctggttggcctgcaggctgccctctggttgagtgctgaccgtcttggggacctggccttgttactagagaccctgaatggcagccaggtaatagggaaagtgacctgaagctgagggtctcctccttccttcctcctcctttctctccagctgcagtagcatcatcatgtactggacaggcggctgggttggtggtcggaaaacctggattctctctgggactcttgggtgaccttgccctggttggtctctcattgtggggattctcttaggagtgttttttaaaaattggacaggcatggtggctcatacctgtaatctcagcactttgggaggctgaggtaggaggatcacttgaacccaagaggtggaggcaacagtgagttgtgagctatgatcacgccactgcactccagccctgcagcctgggtgacagagggagaccctgtctcaaaaaaaaaaaaaatttttttttggatagggatagggctcttgtgatcttgctcaagtcagctctcagccttagtctccttattagtaactcaaatatggtccttgccctgagtgaggaggcacgctggaatagatcatcactgccccaggtttttcttccttttttttaattcttgcctcatagctatctatctcttagaattgggggaaactacaggcattatgcatagcttcttgctttgtaagggtagctgaggcctgtgtcctcaaggatcaagaggacccttgagctcaaggtctagccaggatagatggagataggagaagacggggaggttgtaggcttggagcttctggttgtccttctttccccagagtggagcctctaaggatctgctgttacttctgaaaacttggagtcccccagctkaggaatkagatgctccattgaccctgcaggatgcccagggattgaaggatgtcctcctgacagcatttgcctaccgccaaggtcagctagcaacctgactcatctcttctacctttaagtggtcctccagactcatgccctctctcttgtcccattcagttccatgggcttcttagacccttgttccccatcatgacccctgctctatagccctctccaagctcacaccctgactgtcctcaggtctcyaggagctgatcacagggaacccagacaaggcactaagcagccttcatgaagcggcctcaggcctgtgtccacggcctgtgttggtccaggtgtayacagcactggggtcctgtcaccgtaagatggtaaagacagtcctagggtggattggggaaaccacaagcattatgtatagctttttgctttgtaagggtagctgaggcccgtgtcctcctatccctttagggaaatccacagagagcactgttgtacttggttgcagccctgaaagagggatcagcctggggtcctccacttctggaggcctctaggctctatcagcaactgggggacacaayagcagagctggagagtctggagctgctagttgaggtagggaactgccaggtgaagatgtggggtggaggattcctgaggtgcttgtgatggggtgacttgactagtcaagatccaagtataaggaagtatggctcccaaagattatagatacaatttttttctttctcttttaggccttgaatgtcccatgcagttccaaagccccgcagtttctcattgaggtagaattactactgccaccacctgacctagcctcaccccttcattgtggcactcagagccagaccaagcacatactagcaagcaggtgcctayagacggggaggtgaggttccccttgctcacctgagcttctcttcccacttctgatgcctcccctggggtgtgactctgcttttgttcttgtgacttgggggatgaatgaggcagtggcaggacataggtcgccactcctcagcctcttaccttgcttctagacctgaactgaggactcttctctaagacattaaccttctctatctttgacactctgaagtctcttccccagtccattctgtaactggggtagatccatactgagccaaaattggagccctaagaccttccctccctttctcctcctcagggcccatgaacatccatctgttagctaagagagaacattctcaggacccttgcaggttccctgctagggcctagggtgaggcttatgggcttttactcctcagggcaggagacgctgcagagcattacttggacctgctggccctgttgctggatagctyggagccaagggtgggtgtgtcttcaagcttctctgcaatggggtagacgggttggtgtcccctttgaaatacagcaagactgcaattttttgttttttcctctattctgtctgtccagtctgggggcccaggactctgcatggtaccagagcctggtgaagaggttggggatggtggctcatgcctttcaagacactgcttcttcttcccactccagttctccccacccccctcccctccagggccctgtatgcctgaggtgtttttggaggcagcggtagcactgatccaggcaggcagagcccaagatgccttgactctatgtgaggagttgctcagccgcacatcatctctgctacccaagatgtcccggctgtgggaagatgccagaaaaggaaccaaggaactgccatactgcccactctgggtctctgccacccacctgcttcagggccaggcctgggttcaactgggtgcccaaaaagtggcaattagtgaatttagcaggtgagcccggggtcctagagggggtgtggagggatgattttctgattgggacctgagttggtgagctccatgttcacctacttaccctagagtttctgaaattgattcctcttcacccctgttctgtgtcctacttcaggtgcctcgagctgctcttccgggccacacctgaggaaaaagaacaaggtgatctaaactttcagttttcctcttacctcctggaagtggtagtggtggaagtgggttccctttaatgtgtcccagcccaccaggagacttaagagaaagggactgtggacacaagaagaaatagaggaggatttggggttttggtgactgtgaggctgggaagacacttcttgactttgggagtggtccccaggggcagctttcaactgtgagcagggatgtaagtcagatgcggcactgcagcagcttcgggcagccgccctaattagtcgtgractggaatgggtagccagcggccaggataccaaagccttacaggacttcctcctcagtgtgcagatgtgcccaggtatgtrtacttgcatgacgtcggctatgcatagatgtgcaaggacagagaggcccatgggaaatacttgggcgtaagtgtaagagtggtgttctcagacaggaggggtgattggggttgtgctatatatacctagggatatatccaggtgttcaaatatacacagtgtgtatgcagggctcccaagagttccctggtttccccgatatcctcagacacaaagaccatgactctgctgttgtgggttgcacaggagtagggggcagatgatggacactgggatgggaatggttgtgaatgatctgcccccgcttccatatgtgagtgtaggcaagatacttcctctctctaggcctcagtttccctttttataaaacaatgcctaagactatgtcaagttctaagactctgtactctgggctggggctacaggtaatygagacacttactttcacctgcttcagactctgaagaggctagatcggagggatgaggccactgcactctggtggaggctggaggcccaaactaaggggtcacatgaagatgctctgtggtgaggctcaggcctgctggcttggggctgaggggcagttggtgtcctagagtccttggacctattgtgggtggtgaacactgaaagcgggggtatggctgcccagctttctgccaatctttcacccttaggcatcatccttctttctctccaggtctctccccctgtacctagaaagctatttgagctggatccgtccctctgatcgtgacgccttccttgaagaatttcggacatctctgccaaagtcttgtgacctgtagctgccacgttttgaagagcttgagctgggtccccagtgggctgtctctctgtggggagggctttctgcttcaccatcattaggaatgtgaccattcctatataattcctggactggtgagattggtggtaggcctgtgaaatttgccctagttactaccattctcgttttggaggaaacaatctctgccaccaccaagtcattgactttgctcgaggcaccttttttcctgtttctccttttctgttgtcgagtaaaatttcatatttatctcgtctgcctactacatatacttgcgtgggaaggcttgtgaccgtctagttgagtgctagttgtctatgatgccctttcctgacatcgtctaccttatgaacttgaagtctgggtatgaggaaagggctacaggaatcctcactttggaggcagtggctttagtccttcacattgcctgaatgcagagccccaaagcccaggacagtgacaatgagtggagttgggtctgaagggtggtctagataggcctctcaggacaagggcaggtacctgttacttagagacaggcaggtttctctcagagtaactcttcactcccttcctaattccaaattctagaaattcgactcgtcttagtcaaatgtgtctgtgtgggtacagggtgaaaggtgaattgagtcagcatatcaccaacagctgcctgttgactactaacagggacccctgttatttggggcccaaggattttcaagtcccagcatatgcagttttcttgctaatttgggttctactgaattggctgtgtgttctgtggttgccctttgacttctctggatttgagtgccttattataaggtattaatattaatgacgggaggaagaaaggcacaagcgctgagaaactgcaaaggctgtgggattggggttaccagagggtgcagtgacaatggggtaggagtggggtgctagtcagaaagttcagagtaggggtggttggaggcagcgttgagaaggagcaagaagtgtcagggtggtgatggcgtcttagaagatctccaggttttgggagaagatgggtgtatgggttaccacaataggactagactaatacaagggttcagtctattgtgccacgttcttccaggaggataaactccggagccaatgaactggagccaagtgggagagtccgcctctaagggattaaagggtctcctttcactaatcgatctcgccctattcctttcgttgattggctgagaattccaatccgtcgaggaagcgtagcgttgcggccaattgacgtggcgttactaggcgtgtcgcatcactgaggcgggagccaggccgcaagcgaatttcctgattggctgtgatctgcgggttgctggggagaggcscggagaggcgggcgagagtccgcagggcaggcgctgattggctgaggtgggagcagcttcccttccgatgattcggctcttctcggctcagtctcagcgaagcgtctgcgaccgtcgtttgagtcgtcgctgccgctgccgctgccrctgccactgccacctcgcggatcaggagccagcgttgttcgcccgacgcctcgctgccggtgggaggaagcgagagggaagccgcttgcgggtttgtcgccgctgctcgcccaccgcctggaagagccgagccccggcccagtcggtcgcttgccaccgctcgtagccgttacccgcgggccgccacagccgccggccgggagaggcgcgcgccatggcttctggagccgagtgagtgtgcgcgcgccgttcgcttgctgcggcggcgcgcaccgggaccagccgcgcagggtaggcccggcggggcctggccgtgggcgcgtcagagaggtggagaccaggaaagagggaagggaagctagggggcgagtgaggggccgtggacccggcaggcccggctggggccagctgcgcacccgcgcgccccctaggcggggcttgcgttgggtccgggtcggagcctgggccggatcgtgctgtgtcatgcaggccccggcccgcccgattggctcccttagaacggacgtctgggcctggccaggtcttccggcccactccgccggsgcggcgccccggggctttggggcgccagtctgccgtccggcctaccacccgccgaaagcctttggtccccggagagagcaggccccgcgagcccgaggccccagccgggcccggtgggcgtggactttgcgccatgtgaaggcctcaggagctctgccaccgaggcggagcccggggtcggggaaggcccgccgagctcagggaagctcacagccgcctttttggagccgggtcggcggggccggaggtgggcatcctctgtgtgtgacctgagtcgtgaaggactgttagggagagggcgagccctacctttcgcttctggtcttcttactttaggcctgttgttcatactagaaagtttgagccagttttccttaatgttatgactcgtgggtggggagaaaggaatttttctttaacattttaggttcttgctaaagttggaatctcagttcgtgttttgtgcgcctttccagatttccaggtttcgtggtgtgcagtttagagttgcactaactcttcaaaaacacaaacgtgcgcgcactcctttccccaaccagctatattgagaaattacccgggctctggggctttctgaccccacctccatccttaggaaagcgttagataaaacttggctacctcagcccattcaatttagaatagagagcttttagaggcaaaaaaaaaaaaaaaaaaaaaacacagccagcccaaggaaactctatgcaaattaccttccttccttgaagagattagttttttgaggtgtgttcctttttctcaagtttctgaattcggataaagtattactcagttgcttatttaaaagagtcacttattctgaaagtattcttttggtttatatgcagtcagcctcttattttcaaaagtaaaaatctraaattcttggaacctggcatcatcagctgtttctaacctcttggtcaccttgatgactcttagctgaaacccttccaagtcccgtggagtcccctgtgcagttctggaaagggattgacttatacagaagacaatggaggattgccccaaagagtgtccagaactgctgttggcccatggtcaggccaaattcagtcttttagagattaccacatctgatctcagtaggtagatggggaattagaggctttaccttaagaaaagggcataccactcatctccagagccagagtccgggatggtaggcagaatggaggttttcctaggatacagctttgagattaaaatacaaactattgaccggrcacagtggctcaggcctgtaatcccagcattttgggaggccgaggcaggcagatcacttgaggtcaggagtttgagaccagcccgggcaacatggagaaaccccatctctattaaaatgcaaaaagtagccaggcatggtgatggtgcacacctgtagtcccagccactctggaggctgagacaggagaatcacttgaacccagggaggcagagattgcagtgagggagatcgcgccactgcactccagcctgggcaacagagggagactccgtttcaaaaaataaaaaactatggtgactagaggcatctggcgttttatttttctccagtcccagttctataagtcaagcaagaagatgggcagtccctggaagagtattttgatgggacaggagtgggagagctcgtgggtttacattgctctcaactgtcacattgagcatgcttggcctctagtgtgttgataagcattggaagagtctgcctactcagcagcattgtgcctggagtggcagacttktggaatgggggaagcaaatttgagcagaggaaactgtcgttagaaactagtttagaggcagtggttaaaaatgcagcctatgtgtgagggttagcagaaggcctaccattttgttagatgaatggggtttgtttttctcttgggtgtatcaggacccaaagatgtaagaaccccatggcttcctagctgagcacagcatttttctttgtctcttgcaaattgtgaggatatttccaatgggaatactattttgtcttgttttgttgacttcagtatccccagcccttagaacaatgcctggtacataatagagactcatgaatttgttgaatgaagaaattcgttttaaaaatttattttctttgcttccttcattgtctggccttcctactttggttaatgcttatgttttcctgagccttactaacacgaggccgctcttaaaaaagagagagcgctgggtgctgtggctcacgcctgtaatcccagtactttgggaggccgaggtgggcagatcacctgaggtcaggagttcgagaccagcctgaccaccatggtgaaaccccatctctagtaaaaatgcaaaattagccagktgtggtggcgcatgcctgtaatcccagctactcgggaggctgaggcaggagaatcacttgaacccgggaggtggaggttgcagttagctgagatcgcagcattgcattccagcctggacaacaaaagcgaaactccatctcaaaaaaaaaaaaaaaaaaaaaaaaagggagagggagcttgctgagtctagtaagtgacagctggaaacgggctaggtaataagttggtgtcactgtctggtgaatgatcctagcttctaggaaataacactgagtgtagacccagtcgactttgatttgggtgagagggatttggatttgccccatgtctcagcatttcttggttttgattttttgagccaactttatggaattgtgtacttttgcagatattactgtgaagttccttttgaccttgagcctctttctggcggtttgatgtctgttagtgttttttccaaatatgatggtctttatgcttggcattcctttggtactatggaatgccctggcatcagtaggtttagcctataaggagggtagcaccaatgattctgcttcgttgtccccaggcttgcttggtagaacttaaggcctccctgagcctcaagggaggttgtctggcttacttaattccctggaaagttagcttatgctttrctctatactgttaatcatggtgaccattaataccatgtgccaggtattatgttaagcattttacattcattatctcccttaagacaataagcctctgagataagtattatattccttcttttatagaggaggacatcaaagttcagaggttaggtaacttgcccaagatcacaattaagcagtggcataattggaattcagacccaatgggtctgactatagagttcctgctcttaaccactcttctgtaagtctaagactatttttatttctctaacaactattcagcctccatttctattatgtcwtcttcttaggccattattttctgaccctggggcaggatcactcacttggggccttatagctgggacactgacgctcaaaataccaggagctgctggaatgggtattgtaatatgtatggtagatactgctcctcgtgaccttggctgcctttccttcatctgagctttctggtctagggacagcttcatctattcactgtttctttcctaagtatgagttttagagactggcgaggcgcttggggcaggagtatctactgactccatttcctcctyctagttcaaaaggtgatgacctatcaacagccattctcaaacagaagaaccgtcccaatcggttaattgttgatgaagccatcaatgaggacaacagtgtggtgtccttgtcccaggtaagctgtggccacagactagtctttccttactrcacttacttgarggattttcccaggtttcttttctcatttttcttgcagtgactgcagatagagtggggtttactgggaatcccaatctccagggctgctgcttactccccgtcagcccaatgacccaaaggccttaactttctttcctcagcccaagatggatgaattgcagttgttccgaggtgacacagtgttgctgaaaggaaagaagagacgagaagctgtttgcatcgtcctttctgatgatacttgttctgatgagaagattcggatgaatagagttgttcggaataaccttcgtgtacgcctaggggatgtcatcaggtgtgtgtggggtttttggcttcacagggatgggaggccagagatagcctgcattacaggcaggacccatgtattacaggcaggaccaagttcttggcacctgtcgatgcaggaagcctcctggtcatgggaagacttatgcttcagggttgtctttaggttttggttctgcctccctgggacttcaaaatccatttctgcaggtcccttgagacaaattggcgttcctgtaactttcttgatggctttattttttcctactagaggtgtaatttatcatacttatatcctggcttaggataccactcgagggtgtgtatgtatatgccaaataatctcctcactactctcactagtatgtctaattgatggcttgtgttggggttggaatgaggtgggggtatgggcatggaaggtgagctgctagcaggtcttttaagcccctaagttaacccgggagagaggaatagttggagccagacctgggatagctctcaatgtgagtgattttgcttgttcttgcataattttaggcaagaggttaccccatcttggagtcatctctagccactcctacccaaccaaccatcacctggccaggatcatctcaggcttttgattcttttgaatggagtctaagtttcatgtagctttcttcttgggagtgcttagtcacttcctcaaggtgttctgaccacctggctgagataattttgtttttttcacttctgtttcactgaccctgacaattgttagcttaagaccttcccttgtaatattgggtcaccagtattagctagaaggggatcatccttggatatctccctgaagaccctgcatgtctttgtggggtttctaaatgtgtggctcttgattttggctcactgattaggagtgagtggggctgttccttcgccctcacttccaccctgttctccttcctctcttcgcctaaagccatcctgccttttctttttcacttactatcagctatctgtgccaggcccttttggacacccagtgcttgggcccgaagtgtggttggtaatatggagtctgcttgtcatcctcagcatccagccatgccctgatgtgaagtacggcaaacgtatccatgtgctgcccattgatgacacagtggaaggcattactggtaatctcttcgaggtataccttaagccgtacttcctggaagcgtatcgacccatccggaaaggtgagagctaattctgagcttaaggattattgactgtagggaataaaccttggaacatctttatctcattttctttttcttttttttttttttaaatcttttatgcttttcccctgtatttatttattcattttttaagagatggggtcagctgggcaccgtggctcacacctataatcccagcaatttgggaggctgaggcgggtggatcacttgaggccaggagtttgagaccagcctggccaacatggcgaaaccccatcgtgggcacctgtaatcccagctacctgggaggctgaggcatgagaattgcttgaacccaagaggtggaggttgcagtgagccaagattgggccacagtactgcagcctgggtgacagagcaagactctgtctcaaaaaaaaaaaaaagagacagggtctcactatgatgcccaggctggtctcaaactgctgggctcaagtgatccatctgccatggcctcccaaagtgctgggattacaggcatgagccatcaagcctagtctcattttcttttcttttttttttgagacagagtgtcgcgctgtcccccaggctggagcgcagtggtgcaatctcggctcactgcaacctccgcctcctgggttcaagcaattctcctgcctcagcctcccaagtagctgggattacaggcgtctgccaccacgcccggctaatttttgtgtttttagtagagacggggtttcaccatgttggtcaggctcgtctcgaactcttgacctcaggtgagccactgtgcccggccgctagactcattttcatatatttgtatacacacacatgcaaaccctgcacacatattcatatgtcttaccctctttttttcctccatccttcctttgctccatctctccccttctctgttccaggagagtaagctatctttatggatctctgaaggagaaagtggtccattttggctgggtcagggtccagagtgcacagttctaccattggtggttgtagtgaaaacttgggctacctatatggcagaagtcagaacttgatgggcttctgacatgtcaggttttgttcactgacctcttgtcagagggactcttcacagtttacctttctcatcttgcctgctgcttattaagacaggtggggtggagttggggagaggtagggcaatatctaatgaagggcactatctaatgagcttggcattttgaccccagggtctgatgagttctcactttgtcttgtagttgacacctctaactgtgcttgtactgtttgctctcgcaggagacatttttcttgtccgtggtgggatgcgtgctgtggagttcaaagtggtggaaacagatcctagcccttattgcattgttgctccagacacagtgatccactgcgaaggggagcctatcaaacgagaggtgagttttctccctgattccagtatccgattttatgattactcagtgtggcatcatgtggtaactgtcaggactgggtgctcggccggctgcggtggctgacacctgtaatcccagtactttgggagactgagatgggcagatcacttgaggtcaggtgttcaagaccagcctgggcaacatggtgaaatcccatctctactaaaaatacaaaaattagccaggcatggtggtacacatctgtaatcccagctactcaggaggctgaggcaggagaatcggttgaacccaggagtcggaggttgcagtgagctgagattgtgccactgcactccagcctgggtgacagagtgagactctgtctcaaaaaagaaaaagactgggtgttctttggagaactaaccatctttcagggatgagaaacctgccagctattcatttctgggcctaattgtttctyggatttacctaatgccaggaatttcaaaaaactagactgaacccaaaatatataagtgattgaaatcatttttgaagtaaagctgatggtggcttcaggcctctgcccattcccagggtttccagcttcagattttagagaccccttctcagtaagactacgagtaatgtgagaggcaaggactgtgctagaaatctttgccttgggatttttgtagttgttctttgaggccggatccctttagaggagaatcttttttaaatttaatttaatttttaatgagatggagtcttgctgtattgcccaggaactcctggactcaagcattcctcccacctctgcctcccaaagtgctgggattacagatgtgagccaccatgccgggttgagaatcttcttatacggtaggtttttgcacactaggtagtggaatgatttagagaaactcagcttttgctgatataatattcttgccttctcctttctttatctcctccatattcaggatgaggaagagtccttgaatgaagtagggtatgatgacattggtggctgcaggaagcagctagctcagataaaggagatggtggaactgcccctgagacatcctgccctctttaaggcaattggtgtgaaggtgagcatcctgggctctggaatcaagtctaaagtggtgccaatgtctaatcctgtcccaatgtctaatcctgggactgttttcatgcatggctttcattattgccttggattagaggggcaataacgtatcctttagtttacctaaggctctaaattcattagagctgatggtctaaaaccagagtaggctaatcaaattgtctgttgtgtgcgtgtgcgcacaaaacacacacacatatatatatgggtttttctttacaactcttagaatataaaagccattcttgtatcaatggaccctgtaaaaacaaatctcaccatagtttgccagcctgtctagagcaatgtcacccagtagamgtaaggaagttaaggaaattttcagagtgttaaagggttctgagtctaaaacatttgagaactaytggtctagagtgtagcttctcaatcttttcctagtgggaaagtgtttccatggaacacactgaagatgaagttactcattttcctagtgggtggcacacaaataatttcattttctatgtggacagtttacatgttctgcttgtggatgaggccatagaaagggtagtgttgaagaagaaaaatgatgattgtaaggaacagcattccagtgtgataaattctggagggcatgattactggagtgagtgatcctctggcaatgaagaaaatagaccctgctctcttaaatggcttagctagtctttggcccttggtctgtctaaaattgagcccttagtgtaatggcctcttgcctttccctagtcatgtatcttcaaacgcatttggactacagtttctctgcccttagtctcctatgcaagttgcaatcataaatgttgcccactttctagcagtattttccctgctagtaatagaaatgagtgtggcctaaagtaattgtcttcttagcatttactgcggagggcttattcttaatattgtcagggttgaagcctgattctcaccctctctggagcgctagtcaagccattttagggtttgggagaaggtgggaacctaatcacactctgcattggtccacagcctcctagaggaatcctgctttacggacctcctggaacaggaaagaccctgattgctcgagctgtagcaaatgagactggagccttcttcttcttgatcaatggtragatatttggttcatcttatgtctagctagacccaattttgaactgggcttatgagctggagcacttatgaacacatcctttttgcacccatgccctccttcatgtttatagcatatttcttatgctggggtatgttacagacagaagagcaataaagggaagatattttacattggtgctccctgtcctgccccctttgagaaagattgtggacagactgcagagcgggagcaagctagaatgagaaatcaaagggtgaatggttagtgatttgagagggtttggggcaaatgaactttgatcactggctcttggagaatgctgtttagtggtgtgccatctggtgtgccatctctcytgctctagccagaggtcctagagcatttgctgtcacctttacagttcaactgtgagaagagtatagtgagtccctgggcttctctccagccttgcctggtggctgtcctgggataatggctggtagaggatgtgagaagtaggcagaggttaccaccttctcacccaggacctgtctctgggccaaacaagcaagataactgatttttgggaggaattgggaaagactatcattttgttattgtctccattctgtatcctttcaggtcctgagatcatgagcaaattggctggtgagtctgagagcaaccttcgtaaagcctttgaggaggctgagaagaatgctcctgccatcatcttcattgatgagctagatgccatygctcccaaaagagagaaagtaggagcttacctgaggggatagaggggggttgaaaggccctgacttcacttctgaccagacatcctgttctggcagactcatggcgaggtggagcggcgcattgtatcacagttgttgaccctcatggatggcctaaagcagagggcacatgtgattgttatggcagcaaccaacagacccaacagcattgacccagctctacggcgatttggtaaggactccagatayttttgaccccgtccttgcttaggtcctacttctctccttcatctaagtcacctaatcctcttgaagcccttcacagtgattgggtccaggggtctttttcctttaccctacgtcctgtctagagtgaccaaccaccctggttttcctgagactgaaaggtttcccagagcttgagacttttttagtgctggcattaggacaatcctgtgctggctgagatggttggtcaccctaggcctgtctcttacctctggactagagatgagccctgtttatgtttgtgtactgtcccacaggtcgctttgacagggaggtagatattggaattcctgatgctacaggacgcttagagattcttcagatccataccaagaacatgaagctggcagatgatgtggacctggaacaggtgaagtgatgatgatggctgaccaggcgttacagtgtctctaggcagttgctgggaactggctagagacrtaaggttaagatgtgaggagatgggttttgatttctggacaggggaaaggaagtaatctgagattgaatccaggaaatgggagttggcatttttcatagttgacgctgcatttagagtaaatcagaattgttggagcagccttatttctaggtcccaagtccagaattaagtacttaaaacccagcccataaaggtattgatagtatatattcaaggaaatgagaggacccagggatagcagtcaggggaaggattctattgtctctgagcctcctgcagcagctgggtctttgaggcagcatagtaagtagatctttctctgcaggtagccaatgagactcacgggcatgtgggtgctgacttagcagccctgtgctcagaggctgctctgcaagccatccgcaagaagatggatctcattgacctagaggatgagaccattgatgccgaggtcatgaactctctagcagttactatggatgacttccgggtaaggaccacacccgtgcctcaggtacacacatacgtgctttgacccctcccttgrtaagtctcatccccagttttccctccttttctagtgggccttgagccagagtaacccatcagcactgcgggaaaccgtggtagaggtgccacaggtaacctgggaagacatcgggggcctagaggatgtcaaacgtgagctacaggagctggtccaggtagggcaacttggtccagggtgagtcactgtctcagtacattgtaattganctgggtgatctcagggtgtcaacacatttgctgcaakagttgtgagagcacgacttargaacctactgttcttaggtttgaggcactaaggagtcttcttctagagaacctggatctgataccattgggtacaccatgaaataatggaggggatgcttctgtttagttaggtttctttcaaaatgtggaggtagccttgaaccctctttccttttcctcctagtatcctgtggagcacccagacaaattcctgaagtttggcatgacaccttccaagggagttctgttctatggacctcctggctgtgggaaaactttgttggccaaagccattgctaatgaatgccaggccaacttcatctccatcaagggtcctgagctgctcaccatgtggtttggggagtctgaggccaatgtcagagaaatctttgacaaggtgagctrcaataggctgaactatgtattgatttgcctgagggcaaggaatagaggctgtttttctttaagagggttgaaatattcttagtgctggctgctcaactgcacagtaagtcacttgattttctttctgaggtctgagagacctagtgttattttttttttctctctctctctygagacagggtctggctctgttgcccagrttggagggcagtggtacagtcatggctcactgtaaccttgaaacctgggcttaagcaattctcctacttcagcctcctkagtagctgggactataggcatgcgtcaccacatctggctaattttttattttttgtagagacaaagtctcagtatgttgcccatgctggtttcggatttctggcctcaagtgatcctcccaccttggcctcccaaagtgctgggaatacaggtgtgagccaccacgtttgcctagagacatctagttttgttagtgcttgaatcaatccattcctcctacaggcccgccaagctgccccctgtgtgctattctttgatgagctggattcgattgccaaggctcgtggaggtaacattggagatggtggtggggctgctgaccgagtcatcaaccagatcctgacagaaatggatggcatgtccacaaaaaaaaatgtgttcatcattggcgctaccaaccggcctgacatcattgatcctgccatcctcagacctggccgtcttgatcagctcatctacatcccacttcctgatgagaagtcccgtgttgccatcctcaaggctaacctgcgcaagtccccagttgccaaggcaggtgcaagatcatgggctgtgggagacttgcatgagtcctcaggctggtacggagtgctctttagtttctggacaagattccactggggttagggttggtctaaagggaaggtagaatttttgaggatatcaagataatctagaatcaggaataaaatggggtggccaaagaaggggcaaactgtagttgggagtgctcgggtagcccaaagatctgcgtatctcgagaggagaggctaaatgctaaggtacctctgctgctgcttttaggatgtggacttggagttcctggctaaaatgactaatggcttctctggagctgacctgacagagatttgccagcgtgcttgcaagctggccatccgtgaatccatcgagagtgagattaggcgagaacgagagaggcagacaaacccatcagccatggtgagtctgcatcctttccccagatgtgccaatcatggagagccaggcagcagccaccaccatgccctggagttgagagtagaagctgttggaaagatcatctaactgagaagaattttaatagggcatcaaagataaagaatgctgaggtgaatccattcaatttggaataaggccgagaagagatggtcaggctccattctcagtctgaaccaagctccatgagggaaatcaaagtatgagagtgcagcaaacacagcaaggttttttttgttttttgttttttgttttttttttgagacgaagtctcactctgttgcccagactggagtgcagtggcacgatcttggctcactgcaacttctgcctcccaggttcaagcgattctcctgcctcagcytcccgagtagctgggactacaggcacatgccaccatgtccggctagttttttstattttttttttagtagaaaygtggtttcaccacgttagccaggatggtctcgatctcctgaccttgtgatgtgcccacctcggcctcccaaagtgctgggattacaggcgtgaaccacagagcaaggttttgagctgagatgagactcatatacttatccctgatggttggggaagggatagggtccacagacctcccaaaatgaaaaggcaaattcatgtgtttgtaagttccataaaggtaagatctctgtcatctcacttgttttccactatgtcttgtgttacccttaattaattcattaagttccaaacatgggacttaatgagcaaataaatggctttctttcccttttgaagggtctgtgacatcccttctctctcccataaaagcttaacaactactgatgaactaatcctaggaggtagtcacataagtcacagaaattggcctctcaatggaagagataggttttgagctgggctgtgaagagagtagaatttgaataaagggaataagcagcccaaataatgtgctctagtagtaggattgcaatcattgggaaaccctgggtagatttaagagtatatatgtcactggaagtgagaccgctaggtaggatgtaatccaaatgtggtaagcactgaaagccattggcatttccttttaaagtattaaggtttattaaggtatgatataaatacaataaaattcactctttctatataccatttccatgctttatgacaagtgtgtgtaagttctataactactaccacagttgagacttaaaatttctactatctcaaaaagtttccttagccacttcagtcaacatytcccctccttaagccccatcactgatgtgatttctgtccctacagttttcccttttccagagtgcattgacaagtttttaagcagagcagtgactcaattttaggaagcatggcctagcatcttacctcaggttggattggaagggcaaggagaccaataaactgcagtaatgggaggcctgggatgaaatccaggctgggctttaactagccctagtgatctgtgtttaccaactataggaggtagaagaggatgatccagtgcctgagatccgtcgagatcactttgaagaagccatgcgctttgcgcgccgttctgtcagtgacaatgacattcggaagtatgagatgtttgcccagacccttcagcagagtcggggctttggcagcttcaggtaagttggttgggagcattagacagtgcttaagttactttggggacctacaccaaaagggatgggagtcctaaggaagctagaggggtagttgtggaaatcttacacaggccctgtcctaaccctcttttttggctttgctcttgtacacagattcccttcagggaaccagggtggagctggccccagtcagggcagtggaggcggcacaggtggcagtgtatacacagaagacaatgatgatgacctgtatggctaagtggtggtggccagcgtgcagtgagctggcctgcctggaccttgttccctgggggtgggggcgcttgcccaggagagggaccaggggtgcgcccacagcctgctccattctccagtytgaacagttcagctacagtctgactctggacagggkgtttctgttgcaaaaatacaaaacaaaagcgataaaataaaagcgattttcatttggtaggcggagagtgaattaccaacagggaattgggccttgggcctatgccatttctgttgtagtttggggcagtgcaggggacctgtgtggggtgtgaaccaaggcactactgccacctgccmcagtaaagcatytgcacttgactcaatgctgcccgagccctcccttccccctatccaacctgggtaggtgggtaggggccmcagttgctggatgtttatataragagtaggttgatttattttacatgcttttgagttaatgttggaaaactaatcacaagcagtttytaaaccaaaaaatgacatgttgtaaaaggacaataaacgttgggtcaaaatggagcctgagtcctgggccctgtgcctgcttcttttcctgggaacagccttgggctacccaccactcccaaggcattcttccaaatgtgaaatcctggaagtaagattgcaccttcttcctctcctgatcaacatcggtatgatgtctcctgttgcctcaccctttgtctgcagtatcactggataggactggtggaaagggagcagcctgacagagctccaaatgtggagaatatggcatccctccacctatatttgatgtggacggtaaggctaggcctgcaggatcccttatcctgaccaaagactgtgttggggtgccatttgaaaatcgcagggttgcaaaagaatacaatcttacttgcaggtggatattctctatactctcttttaatgcatctaaaaatcccaaacatcccctggttggtgatcacttacagttgtgtccacctttattttatgtactttgattaaaaaaaaaaaactttttgttaatataaaattttagtattgaatttttttttttttccaaacagaaaatagactatcctcttcaacagtaatcacttagtgcttctagggtcagtacagtgatgccttacccagagagagagtagtgcagagaaaataaattactaaattaaatatatgttgattggctttgggacataatctcaaaagacagtcctgaacaccgtaattttgaataaaatactgtaatctccaaagatcaaaatccctaaagtctaaaattctgaaaatcacaatcccaaaaggtcaaaatcccaaaatacaattctggaagaaatactaaacattcttcgaaaatttacttacatttttaaaagcgtatttatttgagaaacaacacaacagaacgtttcataggccactgcacgataaaatagggaatagtaacatttttgcaagataaacactcaggtataccaatgacagttgcacggatataacggtgatgagcagatgaaacattcataaagaaataggtcaaaaagtgaaatgtataaatgctttgtcactatgcttggtaattgtgggcacctagctttatataactggtcatctgtaatactgtgacagaaaacctaagtcttgatgagatggttcaaaaactgttgcgttaccactgcattgtctcccaaagagacgaggtcttgagaaattttatccttcacaaatgcacgtgtacaaaaaacagatgtctcttcgtttattgaggaactttcaacatttttatgcacacatataatgcttacacacagagtcaacattgcggtcatggagtcaaatttttaatgtccaaggcaccagaagaaaaatctgtcctaggctgggcatggtggctcatgcctgtaatcccagcactttgggatgctgaggcgggcagatcacctgaggtcgggagctcaagaccagcctgaccaaaatggagaaaccccatctctactacaaatacaaaattagccaggcgtggtggcgcttgcctgtactcccagctacttgggaggctgaggcagagaatagcttgaacccgggaggcggaggttgtcgtgagctgagatggagccattgcactccagcctgggcaacaagagcaaaactcaatcttaaaaaagaagaaaaatctatcctacctcttagagaccaatttgccttctgtatttgttctctctgggcccccgcctgttggatggtacccaccaacattgaaggcagatcttccccactcagtccactcagacttacaaactaatccccggaaacaacctcacagacacacccagataatgctttaccaggtttctaaatactccttaatccagtaaaattgacacctaaaattaagtccacaattctgctcattggcaacttggcacccttatgtgtctaaaccatacttaagacaataacaaggtaatacttctgtataacatgatgcaactgtcttgtttacaaygaaaaacatactaatcctttccccagaatttgaaattttattttgtccaggttgtgattttaaggattttgatcttttgggacttcaacatttggggttatggtgtttgggattgtgtccttcaggattatgatcaacactggtattagtcatcctagactttatgctaggcaagaccaggctccgttttggtctacatagataatcttcaaggatgcatgatacttacactggttgactaaactggagcagctctggaactcatgctgtgaaatgggtatttttgcacttttggtatttgttatttcaggaggtttttagggaacaggtggtggttggttacatgaataagttctttagtggtgatttctaagattttggtgcacctgtcatctgagcggtgtacaccgtacccaatgtgtagtcttttatccctcaccgcccccccaccttttccctgagtccccagagtccgttgtatcattcttacgcctttgcattctcatagcttagctcccatgtacgagtgagaacgtatgatgtttggttttccattcctgagtgagttcacttagaataatggtattccagttgctgcaaatgccattatttcgttccttcttatggctgagtagtattccctggatgtatatataccacaatttctttctttttttttttttttttgagatggagtctcccgttgtctcccaggctggagtgcagtggcataatctcagctcactgcaacctctgcctccctagttcaagccgtcctcctgcctcagcctcccatgtagctgggattacaggcacacgccaccacgcccagctagtttttgtatttttagtagagatggggcttcaccatattggccaggctagtcttgaactcctgacctcaggtataccacaattcaatttatttatccactcattgatgggcattcgggctggttccattagttttgcagttgcaaattgtgctgctataaacgtgcgtttacaagtatctttttcatataatgatttcttttcctctgggtagatatccagtagtgggactgctggatcaaatggtagtgctacttttagttctttaaggaatctccacactgttttccatagtggttgtactagtttacattcccaccagcagtgtaaagtgttcctgatcaccacatccacgccaacatcttttattttttgattttttgattatggccattcttacaggagtaaggtgttaccacattgtgggtttgatttgcatttccgtgatcgttggtgatgttgagcattttttaatatgtttgttggccatttgtatatcttcttttgagaattgtctattcatgtccttagagcactttttgatgggactgtttttttcttgctgatttgtttcagttccttgtagatcctggatgttagtcttttgttgggtgtataggttgcaaagattttctcccactccatgggttgtctttttactctgctgactgtttcttttgctgtgcagaagctttttaattaagtcccatctatttatctttgtttttgttgcatttacttttgggttcttgggtcatgaagtctttgcttaagccaatgtctagaagggtttttctgatattctagaatttttatggtttcaggttttagacttaagtctttgaaccatctggagttgatttttttttttttttgagacggagtctccctttgtygcccagcctcagagtactccatctcagctcagcgcaacttctgcctcccgggctcaagtgattctcctgcttcaagcctcccaagtagctgggattgcaggcatgcaccaccacacctctggctaatttttgtatttttagtagagatggggtttcacccatgttggccaggctggtctcaaactcctgacctcagatgatccacccacctcagcctcccaaagtgctgggatttcaggcatgagctgctgcaccaggcctcgagttgatttttgtataaggtaagagatgaggatccagtttcattcttctacatgtgagttgccagttatacctgtatagctgtgaacaaggtgatagctcttttggggcctcaagtttcttagtctgacaaaatgattgaaaaatgctttctaaactgtggaagcctgcatacttaaaccaagaggcaaattgtataggcagtccatctttcccctcacattatacctagaaagaaactggaatgtgatcttaccgtagctgatcactttatatagggtaaacactgcgattagaggttgggtttcagaccaagaatgtggtatcaaatagaggaccagcagtatgccatagaggcaaaaacaaagatggaacaacatatctaatgtcttaaactatgtttatatttggccaggcgcggtggctcacgtctgtaatcccagcactttgggaggctgaggcgggtggatcacgaggtcagaagatcgagaccatcctggctaacacagtgaaaccccgtctacactaaaaatacaaaaaattagctgggtggtggcaggcacctgtagtcccagctactcgggaggctgaggcaggagaatggcatgaacccgggaggcggagcttgcagtgagcctgggcgacagatggagactccgtctcaaaaaaaaaaaaaaaaatcgatctatctatatatatctagatagatcgatctaaggtactgatcctacaaattcccctgaaagttcagtggacacaatgcccgtgaaggatgcaggtcttccatttcagctgaactgtggcaagtgtcaaatggtttgctaacccttgctcagccccacaacccactaggagctttaaaatacttaatataggatttggatttttttttttataaagctactcagataagtgtgaactcacgttcccatgtaaaatggaaattcagaattgcattgtctttggagaccatagtagtgggagagggaaaagtacctttagttccacccttggccagcaggtggtgagttttggactcagaccctgttgacaggtttgagctaaataaagctttggaacagaacagtgacactagtgagaggaatcaaggaagcagcatgtaccttctgactggctgattctcaaccaaatatacagagtagagggaatatgatagagtggaaagagcactggattgagaatttgagcttgacctcagagaacctcatgttaaagccttactatcaggaaacagaagctatcaacaaggcacacagtgttaatggggctgcaaggaaggcaatgccatgtaaaatacggtttctaggccttaaaggaaggtgggaaacttgatgtggagaagtggaggagaacagtttgaggcacaggtcagaaagtacagcacttgctcataaagcttaaagttagactagcaacaagagtcctggggtaaatttggagagatcaggaaccatgttgtgaagaccctcaaatgccaggactgaactttcttacaggtgtgggtcatctggaggattcaggcaagaaagtgacataggcttcagcgttaaataattcaatttatttcttgtggcaaaaaaaaaaaaatccaaataattcatccaacggtttccaagtgtacagtacaatattgtcaatcacatgtacgtggttatgcgtagacactttacattaaataaccttttatttttatagaagcagtaatgtgcattgtagaaatttagaaaaataggccagggcgtggtggctcacactggtaatcccagcattttgggaggccaaggcaagcagatcgctttagcttgggagtttgagaccagactgggcaacttggtaagacctcatctctacaaaaaatacaaaaattagctgggtatggttgtgtgtgctggtagtcctagctacttgggaggctgaggtaggaagatcacttgagctcaggaggtagaggccacagtgaacagtgatcttaccactgcacttcagcctgggtgacagaatgagaccctgtctaagaaagaaattggtaaaaatataagcaaaattaaaaaaatatttccaataaccagaggtcatcactgttttaataactttagtgcatatgtttctggatcttttttgtgtatgtgtacgtgtctatacatgtggtatttttaaacccaaattgagatcatactgcattataactttttcgttttggtcagtatcttttttttttttttttttgagatggagtcttgctgtgttgcccaggctagagtccagtggtgagatctcggctcactgcaagctccacctcttgggttcacgccattctcctgcctcagcctccctagtagctgggactacaggcacccaccaccaagcccggctaatttttttgtatttttggtagagacagggtttcaccatgttagccaggatggtctcgatctgctgacctcgtgatccaccaccgcctcggcctcccaaagtgctgggattacagatgtgagccaccgtgcccggccttg

SEQ ID NO: 94871 - DNA, 13198 bp, Homo sapiens
cttttatgaataaactatatttatagggttttcttttcttttctttttctttttctttttcttttgagacagagtctctctctgtcacccaggctagagtgcagtggcatgatcttggctcactgcaacctccacctcctgggttcaagcaattctctgcctcagcctcccaagtagctgggattacaggtgcccgccaccacgcctggataattttttgtatttttagtagaggcagggtttcaccatcttggccggccggtcttgaactcctgatgtcgtgatccacccgcctcagcctcccaaagtgccgggattacaggcgtgagccaccgcgcccggcctatggggttttctaaaatggccattaggtaccatggagatttgctccttcaasccataaaaggaaggacaataggaatagttagttttgtctagaaattttccaaatttcagttaattcaagcctgctatgtgaactcttttgtttatcaaatttaagatttaaaaaaaaaaaactgtccagcccatgtctagccaagttgcagcctatctcccccactgattgtaacaaaaattctggaaaaatacaagaaacaactatctaagaactctgagaagtagaagtagcagttggctgtgaaggaaagtcaaagcctgaagaacaatccaaatggaggcagtgagtttcctgggttgttttcttcctttacctaccaatttcgatccaaaggcaacctgagttggggaactatatagcaggaacagatagcaaaaactgagaaaatcccatttttcatggccataggtctggaaaagatggaccaagcaagctagagagtgtagagagaatccttggttttatttttctcttttcatcctttccaaaccatgcccaagaccagccctggtcatacggctgagctgtcatgtaggcagtggtacagaaacccagaaccctgagagaaaacctgttcctctggaaggaggaactgggggaaaaaatgcctctgaagtaggaagagtgtgtgtgggtggatggaagagttcctgttacttttctctctctcttttctctaactaccttgtcctgagtgtagacccaatcacacagaactgtatgattatggtggccacaactctaggagaaactccaactctctacgaaaggactggtaaaaaggggctcctgagaaacaaagaatgtattgaaaatccggcagaggagagagggggataagggatccccaacttccatgtgcattgtcacaagtccatactcaccactaagctgtgtatgttcagaacacatgaaaaaaaacacatagcaaaagctttgagagccgaactgccatatagcccatcacctatgtcccagactaacctctaagtagtgcatgcaaagagcagacccaaacagcatagcaaatactttgaaaactgaagtctttggaactactgcccacagaaagtgacagaactttccatccaaacctaacagggttaacttcctgctaaaataacaacaaccaacattctgcagaggacttaaataggcccggagtctcacaatttagtacacaaaatgtctaagattcaacctattaagaattaagaaaatgtaaccaattcttaagggaaaaataatcaatagatgtcaaccccaagatgttgacattattagacaaataccttaaagtggctattatgtgcatcttccagaaggtaaaagtaaacactattgaaataaatagaaatatagaagctctaagcaaagaaatataaattataaaaaggaacctattggaaatttaaaactgagaaatacagtatctgaaataaaatatttactggacacagttgagagcagaatggaaatgactgaccaatccacgaacttgaatttggaccaatagaaattttcaatctgaaaaacagagaaaaaaaaattggaaaaaaaaagatgagtacaatcatgaggactttggggacaatatcaaaaagataaaattcacgtcagtggaattccaggagaggagaaaaagattggtgtagaaaatatatgcgatgatataatagctgagaattacccaaatttagtaaagttataaatttacagatatgaaatctcagtgaccccccaaacaggaatgaattcaagaaaaccatgccctaacataggaggaaattgcttgatttcattttcccatcctggaaaattcaacttaactctattgatagaatacgtttcacagaattcattattaaagaactctgcaaaatctttatcttttgcttagaaatgctatcattttattatccataaacttcagaaaatgtaaagagaactgattaaggaattctaaaattaaacctagcaaagtttagttttcaaaaaccctttaatttctatggcctaaagcagggttcagcaaaccctgacacagctagagagtaaataatttaggttttgtggattttgcggtagaaaagactcctccaatctcctgcctctatagatggtataggtctggctctcgtactctcagggcacagtaggtaaagagagcaaggagcattcagctttcactacggtacactcactcttagctgtgcctggtccaggtgagtccagggtctctctgcattaatttttctggagcataaacctttaggctttgtccttttgtgggagaaggagtgttaaaagtttgtgaggagcagaagaggagatttaggtgtctattcttatactttcaaccccactttcagaggtagctgccaccaaatcctgagcctttagagttatttggctttattcttgtatagtcacttcacagatatttagccttgtcctttctcaggtctcctaaatcaattactactagtctatctgtttttcagcttgcaaaattttgttgacaatttttatttactgtcatctccctcttcctccatctgctttcccattttctttaatatcatgggttttttccttcttaaaaaaatattttatgtcattatagcagggtaaattaatgtgtttaaatttacctggaaatgtaagtctcaacaggatataggtagatatagcatttattaaaagttaagtttgctggaaaacagtaagttccttcaatatataatctaagctctttttttccactcaggaacattttattctcttgtaccttgcattattacttctttttttgttggttttcctccccattcctacaataaaagtcttttattcctacatttgattttcgtcctttggtctctatatctatcgtcttctcttataatgtctactttggagttttagttttgtttttgtttttacagtctggaagtacttctcaattgtatccttatacaacagaaatctcatttttccatgaatctcatgtcggttctgcttcttacacaacttttgtttcattgaaatctattctttctcagctaacattcctttcatctctatttacatcacatttgggttactagtcttttccaatcatctaaatgccttcctgtgatcacttgcttttctttttccctctttttcctttgttttatttttctttttttgatagacaaggtcttgctctgtcacctaggctgaagtgcagtggtgcaatcatgtctcactgcagcctcgacttcctaagttcaagggatcctcctgcctcagccccctgagtacctgggactacaggtgtgtgccaccatgcctggctaatttttttttttttttttggtagagacaggtctcaccatattgcccaggttgacacatttcttttttcttttctttttttttttttttttttttttgagacagggtcttactttgtcacccaggctggagtgcagtggcacgatcacagctcactgcagcctcgacctcctgggctcaagctatcctcctgcctcagccctccaagtagctgggactacaggtgcataccaccatgccctgctaaatttttgtattttttgtagagacggggtttcaccagacacatttattttattgaaaacccattaagcagatatcatagttcctaacatgtgcgtctgcttttcctagtcaaagcattttcagcagcatgtctttccaagtcttcagggatgatagttctattttctttacaatgcatattgtcactagtccatgttggcaggttggccttttttttttttcatccttgaatgaaaattgaagtaggtagtcctcatttcatattttgaacaagaaacattaacaccaaaacagtaggcagaaccaaaacctgcacagaagtatcaaagctagaaatgccaagagggaaattttaagggttcacaaagtaaagaagatcagaggcaggtatcacctgtttccattgcaatcagagaacaggtaagtccagacatggaacatgtggacatttcttttgtggatcagaaggtaaggatcgtctgggatataatgactaggaaccatggaggtggaaagattctttgacaaacagaattgtggtgatttgtgcagaaaggagcttaagatttgatgattggattcgtcctcttaggggtggtatccttgttatggtttggctctgtgtcccgacccaaatctcaccttgaattgtaataatccctacatgtcaagggtgggaccaggtggagataacagaatcatggaagcggtccccctcccacaccaccccaccaccaaccctggtgctgttctcgtggtagtgactgagttctcacaaaatcaggtggttttataaggggcttctgccttcgttcagcactcattgtctctcctgcttccctgtgaagaggtgccttctgccatgattgtaagtttcccaaggcctccccagccatgtagagtgtcagtcaattaaacctctttataaagtacccagtttgggatatttcttcatagcagcacgagaacgaactaatacaatcctctatcactataaatagtgttatgacaatgtgtgataggagcaaaatctatcatgaatatgtagtgtctatttgagaaacttccccctccccaccacttgtgattctggtggacctgtcaactacaggagtctactcttttatcggggtaggaacccattgccctggcaacagtaattcatccaaagggtgatgatgctgaggtgaaatttgaatctaatgtaaatggagttatagaaaaaatagctgaccatgagtgataccgccaccctctaagaaaccctagatataaggtgagaggaatgtagtgaagacaatcatcttataaatgaggaaaggatgacctcatgttagaggaagtgatgccagcaaaaacttaacattaaagtacctctcagagatatgtcataacattgaaagtacaaaggatgaaatgttagaagataatcaaaacttaggagtatgacaatttgcaaaggcatagaaaagctgttcatgccatattacaagttataccatgagaaggtaagtgctattcatatttttcttgataagtgtgtggtttgtttgtgtggtaagtttttttggagaaggtagaaatgttttattaaatcttagttcagagagtgcgtgggagcattatctccactattacacactatgcaacttaaaaagataatttttcaaagagaaatacatacttgccatgtacacggacaataatattgcaaaaagaaacgtccttgtttcttatgcaaattgttccataattttgaaaatttttgaatgtcactgaattgagtaaaaaacttagaaactcttgaatactagaatattcaaaagtgtgaacacaaatcatgagggagagtcaagagtgggtgaagagcggagcgtgtgagcagcacagaggcctcctctcctctcctctcctcacctcgctctcgcggcctacctttaccggcccgtctgctcggcacccagaacaccttccaccatgaccacctcagcatgttcccacttaaataaaggcatcaagcaggtgtacatatccctgcctcagggtgagaaagtccgggtcatgtatatctggatcgatggtactggaaaaggactgcactgcaagacctggaccctggacagtgagcccaagtgtgtggaagagttgcctgaggggaattttgatggctctatagtactttacagtctgaaggctccaacagtgacatgtatctcgttcctgctgctatgtttaaggaccctttccgtaaggatcctaacaagctggtattgtgtgaagttttcaagtacaatcgaaagcctgcagagaccaatttgaggcacacctgtaaacggataatcgacgtgatgagcaaccagcacccctggtttggcatggagcaggaatataccctcatggggacaaatggccacccctttggttggccttccagtggcttcccggggcctcagactccatattactgcagtgtgggagcagacagaacctatggcagggacatcgtggaggctcattacagcgcctgcttgtatgctggagtcaggattgtggggactaatgccaatcatgcctccccagtgagaatttcaaattggaccctgtgaaggaatcagcatgggagatcatctctgggtggctcgtttcatcttgcatcrtgtgtgtgaagactttgragtgatagcaacctttgatcctaagcccattcctgggaactggaatggtgcaggctgccataccaactttagcaccaaggccatgtgggaggagaatggtctgaaatacactgsggaggccatcaagaaattaagcaagcracaccagtaccacatctgtgcctgtgatcccaaaggaggcctggacaaggcccgacacctaactggattccatgaaacctccaacatcaacaacttttctgctggtgtagccaatcgtagcgccagcatatgcattccctggactgtcggccaggagaagaagggttactttgaagaccatcacccctctrccaactgtgaccccttttcggtgacagaagccctcatccgcacgtgtcttctcaatgaaactggtgatgagcccttccagtacaaaaactaagtggactagacctccagctgtcgagcccctcctagttcttcatcccactccaactcttccccctctcccagttgtcccaattgtaactcgaagggtgaataccaaggtctttaaaaaaaaaaaaaaatcatggggaatttttcctataatgaaatgattgaagcgttcatacctataaaatttttcaatgttgaaaaataaaaatacttttaaagtgcaccttccaaaatgtctcccataagtaggtaagaccaacctgtatatcttaagatattagttaagaatttagagacagaggaagaaaaattcttagcagtggttattttggtaagttttctttagaaaaacactttaaatctcaatatttctaatgttttaaattgcagtgtactaaataaatatttgttactacttttttcacttccctattcattataaccaacaagagatattttttacattttcatgaaaaaattttgaaaggtcactaaacaattgtagttttccccgttgattattaagatcactttgcatgatttcagcatgaacagtccttatgagtcccacactactgtgaaaagtgaggattcctgtgatggaaattgaatcaacttcagaatcatttttgttgataagaccggtagttctcatgttatgttccccaaaatcctgggttccatcaaagtgtttcagagttttcaaacatttcacaaacgtttgattttaatttcatttaaaaaaattagcttatttcttaaattaataaattttattctttaaaatagttttaagtttacagaaaaatttagcagacagtgctgaaagttcccattttattatacgtgtttactatgattagtgaaccaatattaatacattttattgatatgtaattgtacatattaaagcacatgtgatattttgataaaagcatacaatgtgtaatgaccaaattaggataattagaatgtctatcacctaaaacatttatcatttccttgtattgggaacatttcaaatcttctcttctagatattttgaaatacacaaaaaattattcttaactattgtcaccctactgtgctatcaaacattagaacttatttcttctatctaactctatgtttgcacccattagcgaacctctgtgcatctccccacccaccctttccagcctctgataaccatcattctactatcttcatgagatcaactttttttttaaaatccatcacctcaagcatttatcatttctttgtgttccaaacattccaatgatctcttttagttattttttaatgtacaataaatcattgtttactgtagtcaccctgttgtgctatcaaatactaggtcttattcattctaattatatttttcttgtacccagtaattacacacacacacacacacatcccaacccctggtaaccatcattctactctctatatctatgagttcaattattttaatttctagttcttacaaatgagtgagaacatgcaaagtttgtctttatgtgcctgacttatttcccttaacataatgtcctccagtccatccacgctattgcaactgacaggatcttgttccttttatgggcaggtagtactccattgtgtatatgtgccaacattttctttatccattcatctgttggtggacacttagtttggttccaaatcttggctattgtgaatagtgctgcaataaacatgggagtgcagatatctctttgatgatatactaattttctttcttttgggcatatacctagcaaagggatggctgaatcatatggtagctctatttttagttttctgaggaacctccatacagttctccatagtggctgtactaatttacattctcaccaacagtgtaggagggtttctttttctgcacatacttgccagcattcattattgcctgtcttttagataaaagccatttgaaccagaatgagatgatacctcactgtagtttcaatttgcatttttctgatgatcagtgagttcactgtagatgtatgcatttgtttctgggttctctgttctgtcccattgacctatgtgtctgtttttatgccagtaccatgctctttttgttactatagttctgtgattcctgcagtgctgtgattcctccagttttgttctttttgctcagatggctttagttattctgggtcttttgtggttccatatgaaatttaagattattttttctatttctttaaagaatatcctcagtattttcatagggattgcattgaatctgtagattgctttaggaaatatggacattttatcaatattgatttttccaatctatgaatatggaatatctttttattttttgtgtcctcttcaatttcttgcatcaatgtcaaatagttttcattatagagatttttcacttctttggttaagtttgttcctagatattttattttatttgtaataatgtaaatggaattgcttccttgatttatttttcagattgtttgctgttagcatatagaaatgctactgatttttgtatgttgatttgtactctgccactttactgaatttgtttttcagttctaatagttttgtagtgaaatctttaggtttttgcaaatacaagattatatcatctgcaaacaagaaaaatttgactttttcctttctttgggtgccctttctttctgttgtctgattgctctagctaggaatttcagtactgtgttgaataacagttaaagtgagcttccttgtctcgttccagaacttagaagaaaggctttcagtttttccctgttcaatatgattctagctgtgggtctgtcatatatgccttttattttgttgaggtatgtctcatctatacccagttgttttttttttccattcttaaaacttttattccatttacatgaatttaatacacgtgttcttaacaattatgtttgaattgttcatgaaaatttcataagacattaaacaaaggtagccatcatctcaagttatttccgtgttaactatttttacagcacatgcatgttaggcaagtatcaaaaaaaaaaatcacaaaagcaaaaaacctaaaaaaaaagttaaatacatgggtttttgttttactgctgtgcttgatatacatgaagtaatgaataccaagcaattcattttccctgcatctttacttttacatttgttcttaggttgcctaagacatttaaatacaaataaaatgagtgtagcaaaaataatgaaagctaacagcaggtaactttacaaataatggaatgtgaaccgtttctgcccttatccagagtaaaatgggtcacagctttgtctaaaggaacacttctgcagctatagtcaagggtatgcacattgagattgagtgttccacagatatacatggtttaacatgtggtatctgtgggatatctgtttctaccacagccttgtaagtgctccaaaccttaaaatacccacaattactacacctgtgactggaaccaatgatcccttttagtccccaccaggacaaaccaatatgtaggcagttttctttgcttagacatggaagcagttttaacactggcccttgtaaagccacaatgtaccaaaagtactatgccaaacattaataacttgtataaaaattccacatccccatattggccacctcaagatgaaaacagataactccctaaatgttaactggctctactcccctaatattaaacataaaaaccacgtgggaaatatagaaattcaaatagaagtaacataaacctgtcataaattgtaaacaactatttgtgggacagcatggatgacaaatggtctactgtgtaaattttagaacgaggcagacaaaagttggaaggccggttaattttcccctccttctcctgcttcagctttgtctcctcgggtatccgatgtccacaatgtcaagttgtctctcagtaattgcattattagtgtgctgtctttggatgactcttcacttaatgtatcaagttcagcaatggcttcatcaaaagctgtctttgcaagagagcaggctttctctggggaattcagaacgtcataatagaacacggagaagttaagggccagacccagtctgataggatatgttggttgcatttcctttttgctgatttcaaaagcttcttggtgtgcttgttgtgactgatccacagtccctttcttatcatcaccagcggcaacctcagccaagtaatggtagtgatctcctttcattttcaaatagaagaatttgctctcgcttgtgaagcactggggatcaagaacttttccaaaagggacagtacatcattgcagctatctcttagctaggtctcagttttctctctgtattcttgagccatctgctgtttttttctcagcaccttctgtcttttgttcaatacttgagacgatgctccaagatgacctacgggctcctacaacatttttataagcaactgagagaagattcctctcctcattggataattaagctccttgctcagttacagacttcatgcaggctgccatgtcatcataccactcagcctgctcggccagtttggccttctgaaccagctcatttttatccattactggatgttccagcagtggtctcaccttgtgtcggcatggcctcgccccagtctacctggggggtgctgctgggccgggcctgggctccggcccgcctagacccagttttttaagttttgtttttgttgttttttttttttaatcatgaagggatgttgaattttatcaaatgctttttcagcatcaattgaaatgatcatatgatttttgtccttcattctgttgatatgatgtatcacattgattaatttgcatatgttgaaacatccttgcatccctaggatgaatcccacttgatcatgatctttttaactgttattgaatttagtgtgctagtattttgttaaagattttttgcatcaatgttcatcagacatattggcctgtagttttctttttctgatgtatctttgtctggttttggtatcaggataatactggccttgtattttttggaatagtctgagtaggattggtattagtccttctttaaatgtttggtaaaattcagcagtgaagccattgggtcctgggcttttctttgctgggagacttttattatggctttgatctcattacttgttattggcctactcaggttttgggtttcttcatgatataatctaggtaggttgtatgtatgtaggaatttatctgcttcttctaggtttttcaatttattggcatagagttgcttatagtagtctgtaatgatcctcagaatttctacattatgagttgtaatctctttttccatctctgattttgtttaggtcttccctcttttttcctggttagtctaactaaaggtttgtccattttgtttatcttttaaaaaaacaatttttcatttcattgattttttatattgttttcatttttatttatttctgctttgatctttattacttttttcttctaattttgagtttggtttgcccttttctaggtttttagatgcatcattagtttgtttatttgaagttttttttactttttttgatgtaggcacttattgctataaattttcctcttagcactgcttttagattatcccatagattttggtatgttgtttccattatggtttgttttaagaaaatttgcaatttcattcttaatctctccattgacccactagtcattcaagagcatattgtttaatttccatgtgcttgtatagttttttaaattccttttattatttctagttttattccattttggtcatagaagatacttgatattatttcagttttcctgaaatttttaagacttcttttgtggcctaatatatgggctgtccttgagaatgttccatgtgctgaggagaagaatgtgtattctgcagccattggatgaaatgttctgtaaattttgattaggtccttttgtttctttgttgatcttctgtctagataacctgtccaagtctgaaagtggggtgttgaagtctccagctattattgtataagggtctatc

SEQ ID NO: 94872 - DNA, 28434 bp, Homo sapiens
  misc_feature (1)...(28434): n = A,T,C or G
aacgaaaaagcagcttcccagtctcaggcaacttaataattaaagagcattgttgctggcctttttatgacacagggatgccttagggtatgtgataaaatctacaagccttttctcctgaaaacttcaagtactgagtcatgcagggcctggtctgcttgaatcctgtgtggcggcccttttgtttcagagttcatttactacctgttttcttttgcagatctgcgatgagctgggagtgaagcggccatcttctgtgaaagtattctcaggcaaaagtgagtcgagtgtgcccacctccttgccctaattgcatggtggttggtgggcagctgcctagttcctattgggtgagtctaaaacctttacttttccccttggtttgcaatcaggtgagcgcagctcctctggactgctggagtgggaatccaagagcgatgccctggagactctgggcttcctgaaccattaccagatgaaaaacccaagtgagtatctgtgtgtcctgcaggcatcaacctggtgacctaatgggttggctggcttcaggccagggatgtccttcctgcccttgagataggaccccgggatcttcgcactgttggtgacacaggcaggtgggacctgctcatyaggagagcagcctgtgctcctcwtgggagagccagcctgactgcctgctgccactcactctgccagcttgggagttgctcaggcttgtcctccagggaggtggcattctcttctttgcatcagagactggcttaggtaggaaagccactctgttacctaggaaagaggcaacactatccagcaggtaaaacttgcccacccagttgctgggagaggcccattgccttgggctggcgaaggagataggaatgggattctctatgggaatgaaggaagagaaggagaaacgccgtgcataattggtaattggctcatcttgaagcctcacgttgggcagtcactccttagacccctgccgttgacctgcagaaaatgggagatgggtacaaacttgaggggacctgggtttggggagcctccaaagacgggaaccaaccaaacttgtctctcctttgcagatggtccatacccttacactctgaagttgtgtttctccactgctcagcacgcctcctaattaggtgcctaggaagagtcccatctgagcaggaagacatttctctttcctttatgccattttttgtttttgttatttgcaaaagatcttgtattcctttttttttttttttttttttttttaaatgctaggtttgtagaggcttacttaaccttaatggaaacgctggaaatctgcagggggagggagaggggaactgttatctcccaagattaaccttcacttttaaaaaattattgtacatgtgatttttttttttcctgttcatacatttgtgctgcccatgtactcttggcacatttcaataaaattgtttggaaaataaacacagcacttgctgggattccaggatgtctgcttttctccctctctgtcctgaagacacaggcaggcctgagcacagtcacaggccctctggaggcatacagagacccaagaggagcagggtgggctgcagactgagaatggtgctagcaattgagtctttgaggaaaatccatcaggcttagtggcattcttactgggccctgcccgagcaagctctatcaggcgcagtgggtcatcacacctataattccagcaatctggggaggccaaggtggggcagatactttgagctcaggagttgaagaccagcctgggcagcatggtgaaacgtcactacaaaaaggtgggtttggtggaacacctgtagtcccagctactcgggaggctgaggcaggtgggtcagttgagcctaggaggttaacagtgcagtgatcacatcactgcactccaacctgggtgacagtgagaccctatctcaaaaaaaaaaggtttccagccttgccatcatggtgaaaccctgtctctactaaaaatacaaaaatcagccgggcatggtggcgcatgccagtagtcccagctacctagcaggctgaggtggatcaccccaaccctggagggtgatgctgcagtgaactgtgatggggtcattgcaccccagcctgggcaacagggtgtcaaaaaaacccaaaacctttgtgttctgtatcatttcagagtgacttgtctttacccttgcagtatcattgtgtggatgtgtcatgatttaacctggtcccaaagggtagtttccaggtctatttttgctattgcaaacagcgctgtaacacgtatctacacaagtatcttggccagcttccctgatactgatcaggagataaattcctgccagtggaattgctgggttaaaggatatatatagctggatgtagtggcccatgcctgtaatcccagcactttgggaagccaaggcaggcagatcacttaaggccgggagttttgagacctgggcaacatggcaaaaccctgtctacaaaaaataagaaagtgggccgggcatggtggctcacgcctgtaatcccagcactttgggaggccgaggtgagcggaacacttacggtcaggagttcgagaccagcctggccaacatggtgaaaccctgtctctactaaaaaaataaaaattagccgggcatggtggcacgttcctgtagtcacagctactcaggaggctgaggcaggagaatcgctggaacccaggaggcagaggttgcagtgagccgagattgtgccattgcactccagcctgagtgacgagagtgaaactccgtctcgagaaaaaaatatatagaaaaatgatgtgggcatggtggcacacactgtgcctatagtcccagctactcatgggggctgaagcaggaggatcacttgagctgtgagctgtgatggcaccactatactccatcctgggcgaaagggcgagaccatgtctcaaaacttaaaggatctatataattgcatcatacggtagatagcttcccacttgcagatgcaaatctgtgaagatgccttgcggtggcgggtaccacccggaaggatcctggtttaaggattttgactcctactggagggaagaggtgacctgcagaggagcaggtcacaaaccttgaagtttatgcatgtgtgcttgagaatagcccactctggggaatttactgtgaataaaattttcttttttgagatggagtcttgctctgtcacccaggctggagtgcaatggcataatcttggctcactgcaacctctgcctcctggttcaagcaattctcctgcctcagcctcccaagtagctgggattacaggcatgtgccaccatgcctggctgatttttgtatttttagtagagatggggtttcaccatattggctaggctggtctctaactcctgagatccacttgcctcggcctcccaaagtagctatgatacaggcatgagccactgcgcccggccttacatttttaacatttaatgacatcacaaaagcatcatttggcagatgaacaagttttgcttcactatgggaagtttcaaacaatctttagacaaggaaaaactacagtcatcttgcagccataaataaaatcaactagggtttattgtttttaagccagtcaaggtgataaaaagtgaattttaccagtttgtctcctagcatccaatttcatttcctgttaccagtttgagtctccttccagagatattacatacatacaccatattctgtgcaggtccagctacactcttttttttgagacattgtctcactctgtcacccaggctgaagtgctggagtgcagtggcatgaggtcagctcactgcaaactctgcctcctgggttgaagcaattctcctgcctcagcctcccaagtagctgggattacaggcacctgccaccacgccccgctaatttttttttttttttagacagagtcttgctctgtggcccaggctggagtgcagtggcgtgatctcacatcagtgcaagctccgcctcctgggttcacgccattctcctgcctcagcctcccgaatagctgggactacaggcgcccgccaccacgcccggctaatttttggtatttttagtagagatggggtttcaccgtgttagccaggatggtctcgatcttctcaccttgtgatccacccgccttggcctcccaaagtgctgggattagaggcatgagccaacacgcctggctaatttttatatttttaatagagattgggtttcaccatgttggccatgctggtctcaaactcctgacctgaggtgatctgcctgcctgggcctcctaaagtgctgggattacagacctgagccaccgcacccagcccagctatactttcttacaccaaaggaacaaaggatcatactaaatgttctattacatcttcacatttttttctcacacatttttatttttgcatagaggtttcagagttttctatggtataaacagtctactgttgatgggtagttaatggttctgtctttcaaaagagcctgcttttctagtctgtgaaaacacacaggagacaggttcattaaggaaagatacttccttcaatctcactggcccagagacatctgttcaccgccttgctcaatgtctccccaaaaagcatacttaagcagttttacagtactttttttttttatttttttgagatggagtttcgctctgtccccaggctggagtgcagtggcgccatctcggctccctgcgagctccgcctccggggttcacgccattctccagcctcagcctccccagtagctggggctacagacgcccgccaccatgcccgctaagtttttgtatttttttagtagggacggggtttcactgtgttagctaggtcaggaggtcgatctcctgacctcgtgatctgcccgccacggcctcccaaagtgctgggattacaggcgtgagccaccgcgcccggccagcagttttacagtactttttatgccttttggtagctggcttttcccaagggaatttcggtttttttgttttgtttgttttttttaagaacatgaacttttttttcttctttttttttttttgagatcttgctctgtcgcccaggctggggtacagtggtgccatctctgctcattgcaacctccgcctcctgggctcaagccattctcttcccgctaggattacaggtgccggacaccgcacccggctaatttttgtatttttagtagagacggggtttcgccatgttgaccaggctgctgttgaactcctgacctcaggtgatccgcctgcctcggcctcccaaagtgcttgtattacaggcgtgagccactgcgccaggctaagaacatgaactctggtgccaggtaatcctgcaagcccaccgaccttgaacctagtgtcttcccgtgcctggccagtttcctctgcatatagtaggaaatagtacgacctcctggtgggagttcatattatacagtcagcgcttaatgttggcccgtctgtactcattcctttacctgagtaaactcacagtactgcaagttttcttttatttttagttaacatgatatatacatgcatgattacaagctctgctgcaattatgtccttggacatttcagctgtcgcctattattccaccattatgaaacagctgtgtgatgaactttagcgggagctgtttgcttttctgttttttttttgtttgtttgttttgttttttttaagacggagtgtcgctcggtcgccaggctggagagcaatggcgcgatctcggctcactgcaaactccgcctcccaggttcacgccattgcaggagctattttctttggccaggttcccactggggcaaagggtccatttctgagcctggctctatgtaaggcaaccggaaatcgactgcccttagtaaagatggcggaaagaacggcgtcattgcctgtcaggttgcggcatcggtgccctcgctcaacatggcggccttctgtgcccgccccctccgctaacsggcacgttactccgtccgaacgcagtagacgaaggcggcggmgatggcggcggggatagtggcttstcgcagactccgcgacctactgacccggcgtgagtcamctcttgccttatgggggtgcgtcgcgctgtcgtgctgttatagcagatgtaggacggggagggctatccggggtcacgaagggcccgagtcccctaaattcaggggtgcgtgtgctcccttttgaaggactccctaattcgataggcctgtgtcttgcagtctggggtcatcaaaggctgttcctttctccccaggactgacaggctccaactacccgggactcagtattagccttcgcctcactggctcctctgcacaagaggmggcttccggagtagccctcggtgaagccccagaccacagctrtgagtcccttcgtgtgacgtctgcgcagaaacatgttctgcatgtccagctcaaccggcccaacaagaggaatgccatgaacaaggtcttctggaggtctgacctgcagatcctggaggcctgcctgcggggggaggcggggctgygggactgggtgaaagtggaacgttgtgggaagatggacatgagggcagggtattcccgccccatttgtaacccttcactcgttgcttcacagagagatggtagagtgcttcaacaagatttcgagagacgctgactgtcgggcggtggtgatctctggtgcaggaaaaatgttcactgcaggtaccagacgctcttcacacaccctgscagccttcctagctcctggcaatagacagtggagcagtgcttctgaattagggttttaagcagcttctgacttacacactttttttttttttttttgagacggggtcttgctctgttgccacgctggagtgcagtagcgcaatctcagctcactgcaacctccacctcccgggttcaagcaattcttctgtctgggactacaggcgtgggccaccacacccagctaatttttgtatttttagtagagacggggtttcaccatattggccaggatggtctccatctcctgacgttatgatctgcctgcctcagcctcccaaagtgctgggattataggcctgaaccattgctcctggcccctaactcacacttttatctgtgtgtttttttttttttttttggagacaatatctttctctgtcacccaggctggagtacagttgcctaatcataaatcactgtaacctcaaatacctgaggtcaagcgattctcccacctcagcctgccaaaatgctgggattacaggcaggtgccaccatggccagccctatcatttttttaaaaaaaggcctactttaaaacattcaaatataagtattagtctgacagaacacgatgggatcataggctctgaagtctaggtttccatcctggatctgtggccatgaacaacatgcttaacctctcagcctatagctgtgtcagcatataatataataacatgctttcgtgcaactattcaactcactaattgatttccagttacaggtcagttggatctttggattgacccactgaccttttcttcagattggagaatttccactggtcacagttactaactgtttagtcatctctatccttctgtaaagcccatccagtgatttattttgttttattttgtttcagacggagttttgcttttgttgcaatggtgcaatctcaactcactgcaacctctgcttcctgggttcaagtgattctcctgccacagccacccaagtagctggggttacaagtgcccgccaccacgcccggctaattttttgtgtttctagtagagacggagttttaccatgttggccaggctggtcttaaactcctgacctcaggtcatccacccacctagggcctcccaaagtgctaggatgataggcgtgagccaccgtgcccagctactacccactgattttaaatttcagatattgtagttttctttcttttttttttttttctgagacagagtcgctctgtcacccaggctggagtgcagtggtgcgatctcggctcgctgcaagctctgcctcccgggttcaggccattcttctgcctcagcctcccgagtactgggaccaccagtgcctgccaccacacccagctaagtttttgtgtttttagtagaaacggggtttcaccgtgttagccaggatggtctcgatctcctgacctcgtgatctgcccgcctcggcctccaaaagtgctgagattacaggcgtgagctaccacgcccagcccagatattgtagttttcaattctccaatttccatttggttcatattttattttattttatttattcatttattttgagacagagtctcgctttgtcacccaggctggagtatagtgatgcaattttggctcattgcaacatctgcctcctgggttgaagcaattctcctgcctcagcctcctgcrtagctgggattacagatgcccgccaccaggcctagctaattttttttttttttttttttttttttggagaaggagtctcactctgttgaccaggctggagtacagtggtgcagtctgggctcactgcaacctccacctcccagattcaagccattctcctgcctgagcctcctgagtacttgtgattacaggcacccggcaccacgcctggctaatttttatatttttagtagagacggggtctcaccattttggccaggcgggtcttgaactcctggcctccagtgatcggcccccctcggcctcccaaagtgctgggattacaggcgtgagccactgtgcctggtcagttgtatattttttgtcatgcatgtttttcttcctgccattgagcatagttataatgactgatttaaaatccttgtcttctggccaggtgtggtggctcacgcctgtaatcccagcactttgggaggtcgaggcaggcggatcacgaggtcaggagatcgagaccatcctggctaacatggtgaaaccccatctctactaaaaataaaaaaaaagaatattagccaggcatggtggcgggcacctttagtcccagctactcgggaggctgaggcaggagaatggcgtgaacctgggaggcagaggttgcagtgagccgagatggcgccactgcactccagcctgggtgacatagcgagactccctctaaaaacaaaataaaaacaaaacaaaaactccttatcttctaatctcaacatctgggtcatcttggggtcagtctccttatcatcttttcgcttggaaatggcaggctgggctcagtggctcatgcctgtaatcccagcactttgggaagctgaggtgggtggatcacttgaggtcaggagttcaagactagcctggccaacatggtgaaaccccgtctgtactaaaaatacaaaaattttcccggcgtggtggtgcatgcctgtaatcccagctgctggagagcctgaggcaggagaatcgcttgaacccaggaggcagaggttgcagtgagcctacatcacgccattgcactccagccttggtgacaagagcgagactctgtctcaaaaaaaagaaaacggcttcactttcctgtttctttgtattttgagttagtttggattgtttcttggatattgggatataggaataagatgtggatactctggattctatcatatagttccaaagagtgttgagtttcgtgttttggtagcttagttggaattagtttttttggtttttctgtttttatttttatttttttgtagagatgaggtcttgctatgttgcccagtctggtcttcaactcttgaactcaagcgatcctcctgactcggcctcccaatgtgctgggactacaagcgtgaaccactgtgcctggcttcttgctgatttacagaccatacatgcacccccagcaaaagatttaaaaactaatcttcagccagggcaacacactgagaccttgtctctaacaaaaattagctgggtgtgatgaatgaccacactcccagctactctggaggctgaggtgggaggatggctcgaaccagggaggtcaaaactgcagtgagctgtggtcgtgccactgcacccagcctgggtgacagtgcaagaacccatctcaaaacaaaaacaacaacaaaaacatacatctcccagcaagagattagggcagagttgatacacagaattcgggactcctcgctctggctctcccctctttggaatatcccccctcacttcccggcagctttggtcaccttggactctatcctgtggctcttcaagcacaatttcagtctgccctcaggctgaaagttttcaaaaccattttcaaaaacaccgagagagtgttctgccactctcctaagtggtcactscctccagaatctgcccagtgccttcagataattgtttgtttcttgtccagccagcgtatgtarttgtccgtgggagggttggccctttaggactgaaccagaagcaaaatatttcatacactgatttctgcacagggcccagagcctggtgctgggaacccagtcttgactaggacagtcccaggccctgttgtcatggcgttcccaactcagtggggaagacagacagtaaactatttctttctgttttgtccattaacatattcccaggtccctttctttctttccctcccctttctccctcccctccctccctctcctcccttcctccttcccctccctccctctcctcccttcctccttcccctccttcccctccttctccctctcctccctgtcctccctctccatccttgctgagggccctggtccctctggctaagattaggcctagatatttgacctgctgtaggcaaagctgggcctttgacctagacaccttgtacccttgattagcgagaaagttcaagagatctagagtagcctgctggctcgaggcttctgaactgggagccaaaagtaaatcatccatatattgaaggaccagagtgcctggacttgagaagtggcctagatcttgggccagtgcctgaccaaacagatgaggcctatccctaaacccttggggcaagaccgtccacataatttgggacgtgtggtctgtgggatcctcaaaggcaaagagaaactgggagtcagagtgtaggggaatacagaagaaggcatccttgaggtctagaactgtgaaccattctgctgcctctgttatttgagagagcagggtataggtgttggttacagctggatatagagaaattactgcctcattgatgagtctaagatcttgcactagtctccactgaccatttagtttttgtactcctagaattggggtgttgtagggactgctgcatttccttactaagcctggagcttttaaatgtttaacaatattctgtaatcgtttatgagcttcaggctttaagggatattgcctttgataaggaaaagcagtgggatcttttaacctgatttgtaatgggcgggcattttttgcccttccaaattgtccttccaatgcccagacttcagggttgattccctccacaagtagggggacaacaaatgggtaacttgttccccatattgatgtagataatagctccagccttggctaatatgtccctgcctaataagggtgtggaactttcaggcataataagaaaggcatgtgaaaagagcaaagtctcccaattacaactgagaggtgggagaaatacctggttacaggctgtcccaggattcatcggatggtaacagaccttgaggacagtcgtccaggacaggagattaacactgagaaggccgcgccagtgtccaggaggaagtcagtttcctggccctcaatggttaaacgtacccggggctcagtgagggtgatgacatgagctggcgcttgccccgggcaccctctgtcctgttgttggatcatctggttgggggcttctgacctagggaaccttcgtccgctggggcagtgcaccttccagtgattgcctcggcatagtggacatggacgagggggcagcttgtttctcattggacaatcttttttaaagtgtcctagtaaaccgcatgataacaagccctaccgggtgattggcctctactatctgtcctctctgaaccactaaggtttgttagtctgagggccataactaaggctgcggcctttctccaatctcacttttccttttgggcctgttcctcttggtccctattatagaacactgaggttgccaggttttgataatgcctccaaattttgttcagggcccagggcttgcttttggagctttctcctgatatctgcggctgattggataataaacttatcttttagaatcaattgacccttgagtgattcgggtgaccggggagtatattttcttaaggcctcctatagctgctcgaggaaggcagaaggattttcttcctttccctgagttatggtggacatcattgaataattcatgggctttttctaattctccttagtccttctagaacacaggtcaacagatgtttacgactccagtccccatgatctaagtcaaggtcccagtggggatccatactggggatggcttgctgaccgatagggaatttgtccctttcttcaggtgtcattctatcatttacttgattaagattccaggtatctccaaactctcaggctgcagctaaagctgcattcttttcattaaaggccagggtttgatctaacagtagcatgacatctctccaagcgaggtcgaaagtttgccctagaccctgtagggcatgtatgtacctatcaggatcatctgaaaacttccccaggtctgccttgatctgctttaaatcagagatggagaaggggacatgtacccgggtgggaccaaattcccctccccctacagcttgaaggggacataaccaatagccaggagggttttgtggtcctttggagatttctttgcatatttccttctgggcaggggagattagaggaagattatcattaataggaatgggagctatagggaggctaggatatggtggtaagctgagaggtcctcctgtgggatgtaaattgtaagctttgcatagttgtgtattctccctccatgaaaagaaagcttggacataaggtatttcactccatttgccttccctcttacagaaaaggtcaagctgcaggatagtattgtaatttgtacttccctcaggtggccatttttccccatcagagagagaatactggggccaggccatagtgcagaaaaaaaatgagcctcctctttttcagggtttatgggtcaaattggtcccaacggcttaggatgcatttcaagggtgagcctgttgatggctgaatgtttcccatctgaaagacaaaaccacccgcggttttggtttgttttgtttctccccctgcccaagaaactgcaacagtccctgtaccctgctgatcggaatagttgtgctcatcaacgcagcagcagaaacactagttttcctctcagaccacatggaggaccaaggaaggtcggatttagtggcccttaccgacgcattcttgaaaacctgttagagttctaagcattctcctgttagtattgggactttacccctgtcctataaagatgttatgccccaaaaatgaagtggagggccataccctgagggagggaagggatctccagggttggaagagtgacaccttttgtcctcacttatatgaataggaaagctacaatttctgaggctccccatatcctagcttcaggaatacctttgttaggcctgttagtctgaggagggatcgtaaaattccaggtagtcgccactatgacagggctttgggcaaaaattatgtctttctgattggtgagcctgggtgcctaaagaatgtaacagagttctagaagtcgttcttataggagaaactagaaaagcaccagagacagcaaattttagaagcaggactaaactcggagaagagaggtgagaggaagtttgtctggcaggcattaggacccgggggcaagagtcaggatagataggatagatgggcgagtctcgcttgggcgacatgcctttgagtgttccgctcatggctgcagggtcaacgaacttgttgtcttgtcgggaccctagagctgcatggctttcctctctgtcgaccctcggctcagcccagaagtacaggaaaagcagaagctggttctaggcaaaccaacgctcccaactccaaagagtcgggagttgttagagagccctttcccagaaagcctgacacccatgtctttagtccagcggccatgctagtcacttttaactggcagacaggtgcctggtatttagcccccaaattctaaggaaaaataggacagaatagcaagtgaaaggggtccagtggtactcactgcttggcgataggtgatagtctcaccgctcagcgataggcagtggtctcaccgcttggcgataggtaatagtcccatctgggtcaccaaaatgtatccggaattggtgggttcttggtctcactgacttcaagaatgaagccgcagaatctcgtggtgagtgttacagttcttaaaggcggcatgtccgcagtttgttccttctgatgtgttcggagtttgttccttctgatgtttgggtgtgttcagagtttcttccttctggtgggttcgtggtctcgctggcttcaggaatgaagctgcagaccttcgcagtgagtgttatagctcttaaggcggtgcgtccagagtggttcgttcctcccgtccggagttgttcattcctcccagtgggttcgtggtcttgctggcctctggagagaagttgcagaccttcgcggtgagtgttatggctcataaaggcagtgtggacccaaagagtgagcagcagcaagatttattgcaaagagcaaaagaacagagcttccatagcatggaaggggacgtgagtgggttgccactgctggctcggacagcctgcttttattcccttatctgtccccacccacatcctgctggttggtccgttttacagagagctgattggtctgttttacagagagctgattggtccattttgacagggtgctgactggtgcgtttacaatccctgagctagacacaaaacttctccaagtccccactagattagctagacacagagcactgattggtgcatttacaaaccttgagctagacacagggtgctgattggtgtatttacaaaccttgagctagacacacagtgctgattggtgtatttacaatcccttagctagacataaagattctccaagtccccaccagattagctagatacagagtgctgattggtgcatttacaaaccttgagctagacatagggtgctgattggtgcatttacaaaccttgagctagacacagagtgctgattggttgtttacaatcccttagctagacataaagagtctccaagtccccaccagattagctagatacagagtgctgattggtgcatttacaaaccttgagctagacacagggtgctgaytggtgcatttacaaaccttgagctagacacagagtgctgattggttgtttacaatcccttagctagacataaagtttctccaagtccccaccagatgagctagacacagagcattgattggtgcatttacaaaccttgagctagacacagggtgctgattggtgcatttacaaaccttgagctagaaacagagtgctgattggtgtatttacaatcccttagctagacataaacgttctccaagtccccaccagattagctagatacagagtgctgattggtgcatttacagtccctcagctagacataaatgttctccaaatccccactagactcaggagctcagctggcttcacccagtggatcctgcaccagggccgcaggcggagcactcctcagcccttgggcagttgatgggaccaggcgccgccgagcagggggtggcgctcctcggggaggctcgggctgtgcaggagyccacggcggcggggggaggctcgggcatggcaggctgcaggtcccaagccctgccccacagggaggcagctgaggcccggcaagwattcgagtgcagcaccagcgggccggcactgctgggggacccggtgtaccctccgcagctgctggcccaggtgctaagcccctcactgctcagggcaggtggcgccggcccaccrctccgagtgcggggtcgccgagctcacacccacccggaacttgcgctggccggagagcactgcgtgcagcctgggttcccgcccgcrcctctccctccacacctccctgcaagcagagggagccggctccgatcttggccagcccrgagaggggctcccatagtgcagcagcaggctgaagggctcctcaagcatggccagagtgggctctgaggccagcgagcaagggctgccagcatgctgtcacctctcacttccttctctctctctttctttcatttttgagacagggtctccctctgtcacccaggctggaatgcagtggagcaatctcagctcactgcagcctccacctcctgagctcaacccctcccacctcagcccctaccacctcccctcatcctcccacttcagcccctcaagtagctgggaccacaggtgtgcaccaccatgcacagcaagttttttcactttttgtagaggcagggcttgctatgttgcccaggctggtctcgaacccctgatctaaagcgatcctcctgcctcagcctcccaaagtgctgggatcacaggcatgagccaccgcacccagcctcctgctttctttctgcatctccctctgttcctcctcttgttcatttgttcattcatttgacaaacattcagtgacacagtccagtgccagagccccctcctgggtgctgcagatgtggaaacgggaagcagccccgattcctgaccccttgctctcatagagatcatgtctgagaacagaaaaatggggcttttttgtggctgtgccgggcccaggtccttcatctttcagctcccagctgaatgtggccgtcttatcttattttcagcagcaagaccccgaaggccagaaggaagaaacggcaggtcatgcagtgacccagtgatagagtagaactactaattagagaaagaaaaaggtggccacaattatgtagcactcatggtgtgtgacgcccctttctaagcacgttaaacatattaattctaatcacagtccacaagacaggttctgctataagccccatttaaaggtgaaacagatccagagagcaagaaacttacccaataatcacagcttgtaagtggcagagctgggattttggaactcatgctgcctggctatagagtccttgctcttagctgctaaatgtctgtcatctgagtagctggcatgctggttaaaagtaagggggattgccgggcgccgtggctcacacctgtaatcccagcactttgggaggctgaggcaggcggatcacgaggtcaggaaatggagactatcctggctaacacagtgaaaccccgtctctactaaaaatgtaaaaaattagccgggcatggtggcaggcgcctgtagtcccagctactrgggaggctgaggcaggagaatggcgtgaacccaggaggcggagcttgcagtgagccgagatcgcgccactacacgccagcctgggcgatagagtgagactacatctcaaaaaaaaaaaaaaaaaaaaaaaaaaagtaagggggactttggcctcaggctgtgatctggatcctatttccacttgtcttttcacctctctgtcctgccattttcttttctttttattttttatttttgagccagggtcttgctctgtcgcccaggctggagtgcagtggcgcgatcatagctgaccgcagcctgcaactcctgggctcaaacgatccgcccacctcagcctccgaaagtgctgggattacaggtgaccatgcccagcctcatgtgcagctaattttttcattgtttgtagagaagaggtcttgcaatgttgcccaggctgttctcaaaatcttagcctcaagccatcctcctgcctctgccttccaaagtgctgggattgcaggtgtgagccactacgcccagccccaaaatatacttttttattcatttgtttgcctccccatgaggacagggactgttgtctgtattgatcatttattgagcagctygtgtgcgccaggccctgtgctaggcccaggggatgcagcagtggacagaaagacaaaaactcctgtgttctcagagctcacattctagaaagggagtcagaccctcaagcagataaggacctaattataggatagcagctgtgcagcccggaggtaaggcggggtcaggatgcgggggatggggccatcgttgagccaggttggccagggagggcctctctaggaggtgacctttgagctatagctgaaggaagtgaaggagtcagtctgtggctgttgaagagggagggatggttgtcagcccaaaggtccttggctccctccctctcctctgggtctttactcaaggtcaccttctcaatgagaagattctgtaccactgcacagccctcaggcagtgatctggatcctatttccacttgtcttttcacctctctgtcctgccattttcttttctttttattttttatttttgagccagggtcttgctctgtcgcccaggctggagtgcagtggtgcgatcatagctgaccgcagcctccaactcctgggctcaaatgcacgtgcccgcrcacacacacacacacacacacacacacacagagttggagaccagtgtgcccaaagtaacaggttgggaacagtgcacacacacacacacacacacacacacacacagagttggaggccagtgtgcccaaagtaacaggttgggaacagtgttcatgcagggtagtcatgacaaggacgttccattttgttctaagagccacaggtgggaaaaagagggtctgggccgggcacggtggctcacgcctgtaatcccagcactttgggaggccgaggtgggtggatcacaaggtcaggagtttgagactagcctggccaacatggcaaaaccccgtctctactaaaaatacaaaaattagccgggcatggtggtgggcgcctgtaatcccagctacttgggaggctgaggtaggagaatcacttgaaccgggaggcggaggttgcattgagccgagatcctgccactgcactccagcctgggcgacaagagcgagactctgtctgaaataaaaaaaataaaataaaaaaaaagaggatctgacccaagaaggtgtccactggcttcccctggctgcctgtagggaatagactggggacacaggtggaaacagggagagcagggtgggctcatggagaacaactgatgcaggaaaggtcagattcaggatcatcttgaagttggagccacagaaattgctgcatcgtgagatgtttctcatctcaggaaacatcacyaccattgactgcattgctcacgctgcagaccttgagtcccrggctgtctggcatcttggggaaaagcatggcctctggagccagctgcatggttccagattttaaaatcctacttctgatgcggcatggtggctcacacgtgtaatcccagtgctttgggatgccaaggtgggaggatcgcttgagcccaggagttcaagagcagcctcggcacagtcccagccactcaggaggctgaggtgggaggattgcttgaacctgggagttcgaggctgcagtgagccatgatcgtgccactgcactctagctggtrtaacagagtgagaccctgtctctaaaaacattaatgagttaatttaaatagttcattactcactactcaccagccagtgtgacccccttgggcaagtgcttaacctctctgtgccttagtttacccattggtaacacaaatagtaataggacctagctggtacggttgctgtgaggattctgtgagtaatgactccacaaatattagcttttatttccttcccacccaacatgcaatcaatccctcaccaagtcctgtgtgagttgttttttttccgccttggtggtttgggggttcgaacctgctgtgcctgggttctgatccctggttgagtcaatgggtggggcctgggagcctggatgagctccatcatgccttctcaccaggtattgacctgatggacatggcttcrgacatcctgcagcccaaaggagatgatgtggcccggatcagctggtacctccgtgacatcatcactcgataccaggagaccttcaacgtcatcgagagggtgactctaggggtctggaggggatctttctccatacrcgcctcccctgggccagccctgaccccactcttcctgttccctctcagtgccccaagcccgtgattgctgccgtccatgggggctgcattggcggaggtgagtctgcggctatcctcctgctcgggtnctccccaggtggggctgctgctccgatgccgsggccactggcatccagcctcagctctgtcatgggccagactgtgtcccaagaggcagccccacctcccgggagccagggttggttctggtggtcattcagcatccctggcctctacctcctaggtgtggaccttgtcaccgcctgtgacatccggtactgtgcccaggatgctttcttccaggtgaaggtgagtcatcctcccgagctcctgcttagagctgggcagtggggtgaggttggggggcctggagtgagcctcragggcttcatggaagagtcggagttgaacccgacaaagtaagacttgcccatagaggaagtcaagaggtgaagttgtgagtgggtaaggtatgaggtggggttgaggctggcaggtgtcagaggcagagattgctcctggggccatactggtgagggtgggaggcaggatggagccgggggatgcagtaaaggggtctcaggtagggtgaggagggttcctctctcacagatggagctgccctgagggaatgggagggtgcatgagtgggaaggtgggctctattctaggttgaaggaacttgcctgagtcaagaagctgcctgggcaatggaatrggactttggaggaagtcactggggtgaaggtggggcgggactctccagtagacatgaaatttcatggacgttgacattgcgaggggcacagtattgggcagaaaccaaacactgacccgattcctcccccaggaggtggacgtgggtttggctgccgatgtaggaacactgcagcgcctgcccaaggtcatcrggaaccagaggtgggtgcagggggtgtgggggygtgggcaggagaccccagagcatctcccagccccrgggtggcagccgcctcctgatgcacgcttgcctttgcagcctggtcaacgagctggccttcaccgcccgcaagatgatggctgacgaggcyctgggcagtgggctggtcaggtagggccatggccgtggtagctcagtgctgggggcagccaggcctggagggttggaggcctctccgggtccccttgtctcctcgctctagaattcctagtggcatcctttcttggtgagstcatttctttattgtggggtcagccccctgctctgattgggctgtttctctggggtcttgggccttcctctgtgagtggccacttcttcatctgcrggaggctggaggagagagcccttcccagcccacccggtccctgatctctttcactgcagccgggtgttcccagacaaagaggtcatgctggatgctgccttagcgctggcggccgagatttccagcaagagccccgtggyggtgcagagcaccaaggtcaacctgctgtattcccgcgaccattcggtggccgagagcctcaactacgtggtaaggtgcacgctccgaccaatcacagccctcctctaaccccaggcgaccaaccagggtgcagggtgctckcatgctttatcctgattggcccctgctaatctctctcctcgttctctctcaacaccctcggtaccaggcgtcctggaacatgagcatgctgcagacccaagacctcgtgaagtcggtccaggccacgactgagaacaaggaactgaaaaccgtcaccttctccaagctctgagagccctcgcgtcccaggccccagccagggggccggccttgtcccgcckcatccacagaaagggaggatgggcgatgacagttgtttctatgccttctgacccagtttcccagtttataactttatgacaatgagtttctcaagcccaaggccttatcttcaccccacaaacaataaagcaaagtaaagaacctggtgcccttcttggatagaggagaggtgggaggggctgggatgcacctaggggctccagagactgcagtcctgaaggctggggctagaggttggatgcatgggaatgggtggcatggaggtgatggccattcagactggcagcgggcaggcgaggggcacaaggaattccggggcggagggagtgagcaaaagtcgctggggtccctctgggttgcaaggcttcctggtctccctgcctgccctggggttgagggtggcgttcgtgccctgcctggcacctctcactgcacagcacatgggatctgatgctggcgtctcacacctgtaatcccagcacttttggaggctgacgcaggtggattgcctgagctcaggagtttgcaaccagcctagtcaacatgttgaaacccagtctctactaaaaatacaaaaattagctaggtgtggtggcaggtgcctctagtcccagctactcgggaggctgaggcaggagaatccttgaacccaggaggtgagtttgcagtgagctgagatcatgctgctgcagtccagcctgggtgacagagtgagactctgtctcaaaaaaagaaaaaacaaaacaaaaaaggactttggggtttctggccgggtgcagtggctcatgcctgtaattccagcactttgggaggttgaggcaggtggatcacttgaggtcaggagtttgagaccagcctggccaacatggcaaaacctggtctctactaaaaatacaaaaattagccaggcgtggagtaagcctgtaatcccagctattcagaaggctgaggcaggagaatcccttgaacctgggaggtggaggttgcagtgagctgagatggtgccactgcactgcagcctgggtgatagagcaagactctgtctcaaaaatgagcaaacaaaactttgggattttttatccatatatcatcccaatcttccggatttatgtttggaatgactgcaagaagaccaagcattaagttaatgacttctatatgctatgtcctgttctgagcatttattatcttaatgatcaaggactctatgaagttgatactattatgattattattattatgactattattgttgctatttttagagacggactcttagtctgtcacccaggctggagtgcagtggcatgatcatagctcactgtaaccttaactcctgggttcaagcgatcctcctgcctcagcctctgagtagctaggaatacagatgtgtgctaccatgcccagctaatttttattttatttttgtagagatgggggtctcactatgttgcccaggctggtcttgaactcctgggctcaagcagtcctcctgcttcagcttcccaaattgctgggattgtaggcacaagccaccacacccagcctaaggttgatactactcttttctttatttatttatttttctgagtggcagttggacccacagctagaacttatttggcagattaataacatacaggcattactggatcacaaattcatttttaaaatattttgatagctattcaatacttgtttcctctcttatgaattcctttttttttttttttttttgaaacagagtctccatctgtcatccaagctggagtgcagtggcgtgaccttggctcactgcactctcctccactcaggttcaagtgattctcctgcctcagcctccaagtagatgggattataggcacccaccaccatgcctggctaatttttgtatttttagtagagactgggattttgccaggctggtctcgaactcctgccctcaggtgatccatccacctcggccagtcaaagtgctgggattacaggcatgagccactgcacccagccgatactactatatccccattttacagatgagcacatgggcaaattgagggtaaggcactgacccatgatcatacagctgagaagtggcaaaggcaggatttgaacctagaacctctggctccacacactagtaatctaaaccactctccctacaatacaacatacgtggtaaagatgtgtggtgggcacgcaatcaacgtaggtcccttcacagttgctgggagaggcaggaatttgcagttcctccgcgttctcctcctccgctgcccacctgtcctgggtcattcctgcagcctgccctgccctgcctggtctcaccctccctctgccaacagaagtctgggcagggttttatgggctctgataaggccctggmagggccgaagttcatgagcacttcctctttgcaggagggcgtaggggaggggacccaggtgatttgggtcctggctggtcaccagggaagctggcaagggaagggagactagggtgcgctctaggagaagccgacagcctgagagtcccagaagaggagccctgtggaccctcccctgccagccactcccttaccctgggtataagagccaccaccgcctgccatccgccaccatctcccactcctgcagctcttctcacaggaccagccactagcgcagcctcgagckatggcctatgtccccgcaccgggctaccagcccacctacaacccggtgagatgccagctcaggccccactccgcccgcagctccgtccataagccctcacaccaattttccccactctgatcctggggggccccatctgactctgtggtctgatttacccaaagctgaccccgaccctcgatttactcctaccctgacctcaggctgtctgtgtccacgtctaactgttggccctcgtcatcttcaacctggtcctcccccatggtttcctctctcctgcttaagggactggggggcttttctgggaggggtaaaggctgcaacaggcagatggcttgtgagtcccctcaccaggcctcttctccagaygctgccttactaccagcccatcccgggcgggctcaacgtgggaatgtctgtttacatccaaggagtggccagcgagcacatgaagcggtaagaccctccccaagccaggccgggctggcaggggacttccaactgggtgctctgggcctggctgttgggggctttctgcccttaccccaccctggtggagaggggactctttttctgccccacccaatagccagagatgaatctggggcagatcaggagtggggacgtgggggccagaaggttcagggagggctcaccgtgagaggcagtccctgagttggacattagactgaagctgatgggtgcaatggcaggaattcagatcacaggctcagagccgggtccccgagttaaaatcccagctctgccactccccagctctgtgttggtgaaagagtgaaagtgactatacctctctgtgcttcattttcttttcttttctgtttttgttttttttgtttttttttttgttttgagatggagttttgctcttgtcgcccaggctggagtgcaatggcatgatcttggctcactgcaacctctgtctcccaggttcaagcgattctcctgcctcagcctcttgagtagctgggattacaggcatgtgccagcacactggctaatttttgtatttttagtagagatggggtttcaccatgttggtcaggctggtctcgaactcctgacctcaagtgatcctcccatctcggcctcccaaagtgctgggattacaggcgtgagccactgcgcctggcccagtcttagctttttaaaaagggccttaacacgttgataatgattggcctcataggactttttttttccttagagatagggtcttgctctgttgcccaagctggagtgcagtggcacaatattatagctcacttcggcctccaactcctgggctaaagtgatcctcctacctcatctttccaagcagatgggactacagacatgtgccaccatgcccaactaatttaatttttaatttttatttattattattatttgttttgtagagacaaagtcttgttatgttgcccaggctggtcttgaactcctgtgctcaagcgatcctctagcctcggcctcctaaagtgctgggaggatcaggcactggtatgagccactctgcccagcctgttgtttatttatttattgtttacttcttcactgagtgcctattctgtgtcctggcactagggatggaggagtgaacaggacagagacccctgccctcgtggagctgatgtcctagtaggggaaacataaaaaataagtccaggccgggcgcggtagctcaggcctgtaatcccagcactttaggaggcctaggcaggcagatcacctgagatcgggagttcaagaccagcctgaccaaaatggagaaaccctgtctctactaaaaatacaaaattaccagggcgtggtggcgcatgcctgtaatcccagctactcaggaggctgaggcaggagaatcacttgaacctgggaagtggaggtttcggtgagccgagatcgtgccattgcactacagcctgggcaacaagagtgagactctgtctcaaaaaaaaaaaaaaaaaaagtcaaatatgtaagatgtcagatgatattaagtgctatgaagaaaatgaggagggaagggagatggggagtgtatgtgcggacagaggttccctttaaattgtccccttaaatagggtggcctggccgggcatggtggcttacgcctgtaatcccagcactttgggtggctaagccaggcagatcacctgaggtcaggagctcgagactagcctggccaaaatggcaaaatcgcatctggctgggcgtggtggctcacgtctgtaatcccagcactttgggaggcagagacgggcggatcacgaggtcaggagatcgagaccatcctggctaacacagtgaaaccccgtctctactaaaaatacaaaaaattagctgggcatggtggcgggtgcctgtagtcccagctactcgggaggctgaggcaggagaatggcgtgaaaccaggaggcggagcttgcagtgagccaagattgcgccactgcactccagcctgggcgaaagagcgagactccatctcaaaaaaaaaaaaaaaaaaaaaaaaaaggcgaaatctcatctctgctgaaaatacaaaattagccaggcatggtgacaggtgcctgtaatcccagctacttgagagcctgatgtgggagaatcacttgaatcctgaaggcagagtttgcagtgagctgagatcgcatcactgcactccagcctaggtgacaaagggagactgtctcaaaaaaattaaaaaggtggccagagaaggcctgcctgggaagggaacatatcagcaaagaacagaaggaacggagagagggatccccagggacagctgagggaagggccttccaggcagagggaacagccagtgcaaaggccctgagacaggcctgtcctggggagtaatttcaaggatgctggtgtgcccaggggtgcggaatatgatgcgtcatgggtgtacacagggaccctctggctgcatgagggaaatgatcttcagggccaggaggggagcagggagacccaaagtgcataggacagggcctggcccgtggcagacttgtaacagtcataactggaagttgggaagagggtggaggaggtggtctaagaaggcaaggtgggctgggtacagcaactcacacctgtaatcccagcactctgagaggccgaggtggtaggattgcttgagcccgggagtttgagaccagcctgggcaacatagtgagaccccatctctacaaaaaaaaaaaaaaaaaaaaaaaagccaggcatagtggcatgcacctgtagtcccagctactagggaggctgaggcaggagaatcagttgacccaggaggttgaggctgcagtgagccaccatcgtggccactgtactccagcctgggggacagggtgagaacacaagaccctgtctcaagaaaaaaaatgtcaggcacggtgtctcacacctgtaatcccagcactttgggaagccgaggcaggtggat

SEQ ID NO: 94873 - DNA, 27640 bp, Homo sapiens
  misc_feature (1)...(27640): n = A,T,C or G
aagttaggaaataggtaaaataataacttggggtagaggttatgcttgtgtttctccaggactgactcaacagccgatttggataccatcaagacacctgaaaccttatcatgagccagatgctgaggaagagattccgggaggaaactgaggacccccccccacccccggttgcagccatgtcgagactgacgctgaggaagaccccaactgtcacgagcaacacctgtcaaacacagccacccacctggagacagatcaagaagctgtcacagatggtggaagaaaacctgaggaaagtgggacaaccagtcgcaatgagtaatttaatggtagctatgatagcgatgatcaccactgccatgagtattccttcaataagggctgacacagaggacaattatacttattgggcatatttatcaatcttggctggcaataatgcctggatgtaatcactctatgacacagttatacaagctttctgatctcataataaatctgctcctataattgaggcatactgccctcaaaaacatatttgtaaacaggattggacccagttagcaaaaatgaacgtacttgtttaggaagattgctttgcagaacaggcagaggtgctgcacaacaattcctatggaatcattattaattggtcacctatggggatgtttagcttgaactgcacctctcagtctgcatgccatggccacactgtgatcagctcatctgaacaaaatggtcagatgatagaaatggtaagaaatacagcaagagttcctattatctggaaccatggcagtatagtggcacctcagcctcaaatgatatggcctgctctaggagctaaacataagcatttgtggaaactgttaatagctcttaataaaatcaaaatttgggaaagaataaaaaagcatctagaaggccactctacaaacttgtatttggatattgcaaaattgaaagaacaaatatttaaagtatcccaggcacacgtgaacttaatgccaggaactggagtgcttgaaggagctgcagacagattagcagctagtaacccattcaaatggataaaaacacttggaggctctgtgatttcaatgatgattgtgcttttactctgtgttgtttgtctttgtatagtgtgcagatgcggatcctgactcctgtgagaagtagctcaccgtgacaaagctgcctttgcttttatcactttgcaaaacaaaaaaggggacatgttgggaacaggcccctgaatctggccataaactggccccaaaactggccataaacaaaatctctgcagcactgtgacatgttcatgatggccatgacccccaccctgaaggtcgtgggtttactggaatgagggcaaggaacacctggctcacccaggatggaaaacggcttaaaggggttcctgtaccacaaacaatagcatgagcgatctgtgccttaaggacatgttcctgctgcagataactagccagagcccatccgtttattttggcacatccctttatttcccataagaaatgcttttagttaatctataatctatagaaataatgcttatcactggcttgctgtcaataaatatgtgtgtaaatctctgttcgaggctctcagctctgaaggctgtgagacccctgatttcccactccacaccctgtatttctgggtgtgtgtctttaattcctctagcgccactgggttagggtctccacgacccagctggtctcggcactctgggatcctgccacggggctgtgtaaccagccatctctgtgcaacatgcccagcactgcctgtcagcatctcctgttcaggtcaggctagcacctctctcatcagaattccagaattccatcagaggccaagtcccccacccccacctcctgcccttgctttgggggcaacttcctgcaaggtaacacttccttttctccacactcctgtatacagactcctggagcagagtgtgccatgaggaaaagctctcccatccccccatctccctccacttctctatttctcagctaggcatggccaacaaactagctcaataaaactggtgccaaatatgaggggatgggcaatttttatctgtaatcagtgcacttatctgccaccagctctgatcctaaaagaccttgtggcctcatgtttacaatcaggagaccctcaggaggctgtgtgttgagcgtcaagaggaactcggagacagctatgatgctccaaacagctctcaagcatgcacccttatcagcgccatttggtccaggctcagagtgtaaacaacctgcccaaggtcacccagccagtaagtaggggaggcagggcttggagcagtgctgggctccagagcccaatgatataaacacagttccaacattgttttttcttttttctttttttgagacagagtctcactctgtcacccaggctgcagtgcagtggtgctgatctcagctcactgcaacctccacctcccaggttcaagcgagtctcctgcctcagcctcctgagtagctgagattataggcacatgccaccatgcccgggtaatttttgtatttttagtagagacagggtttcaccatgttggccaggctggtctcaaactcctgacctcaagtggtcggcccacctcggcctcccaaagtgttgagattacaggcatgagccactgcacctggccccacttcttaaatcttacatggccaaaaacatgatcaggtgcagtcagcattatcatcagtgccattttccaagggaggaaaccgaggcccatagagggaaccaacatagccaggtctcatagcaattatgacggggagcagaatttgagctcaggtgaacccagtaataattttatattattatataatataatggtggctcacacctataatccagcattttaggaggccaaggtggaaggatctcttgaggccaagagttcgagaccagcctggacaacaaagccagattcccactctaaaaaaatggaaaagttagccaggtgtggtggcacacacctgtggtcctgactactcaggaggctgaggcgggaggatctattgagctcaggaggtcaaggctgaagtaagctttgatcatagaaccgcactccagcctggacaacacagtgagactctgtctctctctctacacaaacacacacaaacacacacacacacacacacacacacacacgtataaaataaaagaacagctcccgggtgtggagcagcacaccccattgaatcctttccacaccccttccacatcaacattacaattactgccattttccagctgtccatgcttgagggcagagtttatgtgcccagaacccatggcctgcaggaagaagacctgggcctctgtgccacctacctgactcctaagcttaaaatacagtagccctctgccrggcgtggtggctcacgcctgtaatcccagcactttgggaggccaaggtgggcagatcacccgagctcaggagtttgagaccagcctggccaacatggtgaaacgctgtctctactaaaaatacaaaaattagccaggcctggtggtgtgtgcctataatcccagctactcgggaggctgaggcaggagaatcatatgaacccggggggcagaggttgcagtgagctgagatcaggccactgcactccagcctgggcaacagagtgagactttgtctaaaaaaaaaaaaaagagccctccgtgcgtgttatgcacatagagcatcgaatttaatcttcaccaaaccaaacaaaggagataccaccaatggagctattttctggaggaaactgaagctcagagatgtccactgccacagccacacagagggcaaatactccacaaggggatttacatcacaagcgccagggtctgtttattaaaaccccttcccagcagagggcagtacagtgtcttgtcccagcagaaaaggtccttcaggccacccctctaaacacaggagccaagggtgttgacagaggggcaccctttgcacccccaggactcctatggcttaatagtggtcctgatggaagaggcggagccaggacttgaatccatgagtggctgcctctagaggcgcaaaggccagcatcggaggaccctgtggcagccaggagcggaaggttcatgttctgcaggggcgcccagcccactgtgcccccagccgtcacttcttctgcacgtggccacagtcgtacttgccacgcacaacggtgagcttgacgcctggcaggtcctgggtgcggccgccctccacaaggacaatctggtgctcctgcagggtgtggccctccccagggatgaagcagacggcctcgcggccagtgctgagmcgcactcgacagcacttgcgattggctgagttgggcttcttcggcttgcgggtaaacgtgcacaggaccacacccttcagctgcggccggccttccgtggggcccagcttccgaggcggccgcttggggggccccaggcggtgcatctggttcagggtagccatggagcaggtrgcccagagccggggaaccagagctgggcctggagagggccgaaaggggttattatcccagagaacagatcttagagtagtagcaactcaattttggtgttttaggcattgtttaaagcactttacaaagatgcatttgttcacatctaatgttatctacagacaaaagtaactctttattcttcaaggaagcattaccttttttttttttttcttttttttttttgagacaaagtctcactctgtcgcccaggctggagtgcagtacctcaatcttggcccactgcaacctctgcctcctgggttcaagcaattctcctgtctcagcctcctgagcagctgggactacaggcacccaccaccacgctcggctaatcttcgtatttttaagtagagacggggtttcaccatgttggtcaggctggtctcgaactcctgacctcggcctctcaaagtgctgggattacaggcgtgagccaccacggctggccaggaagcattatttttaatgctgtttaaaataatagtaggctcagtggctcatgcatgtaatcctagcacttttggaggctgtggagggtcacttgagctcaggagttaaggccagactgggcgacacagggagacctccctctctacaaagaatcaaaaagttagctggttgtggttctgcaggcctgtggtcccagctacttgggaggctgaggcgggaggatcacttgagcccaggaggtcgagactgcagtgagctgtgatcacaccgctgcacttcagcctgggcgacagagggagatcttaaataaataaataataaaactgacccaaacgccgcttgacacgcagtagccctccatgcagctgcttcccacctcttgctctagcagccctagctctgccaaaaccccaccgtgtttttccacccccgtttccctcggggctccgacggaggcacacaagtccaagagcgaataaccctccccctctagcctcgtccctgaagcccaagtcccccacttaccacaagttagggacgtgttgaggccayggagaaggccagaccaggacatcctgccrcctgggccgtccctgtggtaggggataagagactcagaaaggaggaaaaagtgaccgatccgcaaatgctccccgatccgctctcaggactttctggcttaaatcaaaggaaatacctctataggtctaaccacaggccctcatgctgctaacagaaagtccctccgtaaatttagmctcgctctgagtgggttcccgagggcccaaccactctcgcccgcacrcaggaagaactgggaaactggggagatggcctggtagatttggaggaccccaggattccaccgacctcacaggacctaaaggtgaggtcgcggacacgctgaatccagcttctagcctcttccgggcgctatccgtgcagggattggctggttctgcctcgcgtcactgaagaggcgggacacagacgacgattgggcgacgaaggactctatcgcggtcaactttcctcaggatctgattggctcgtcacggtcaggttcgctgccttgcaattggtctaaacgcggagtgggcgggacgaagtgccgccttgtycccggtccaagatggctgcgtccatggcgcggcgcttgtggcctttgctgactcgtcgggggttccggccccggggaggctgcatctccaacgatagtccaaggagaagtttcrctacagagaaacgaaaccggaacctcctgtacgagtatgcgcgcgagggctacagcgcactccctcagctggacatagagcggttctgcgcatgcccagaagaggccgcacacgccctggagctccgcaagggggagctgcgctyggcggacctgcccgcgatcgtgagtgcgcctgcgccggccggggggcgcagacgtttgctttacggaagaattgggtttgcaagatgccctccggcagggggcgaacctgtagtaggaattttagttatttcccaagttagccaacgtcttgtgcatggcacccacttatgtgccagttgtccagtgagtgctgaggccctactatgtgccaagaatgcctactgtgtcctggacacccattatgcgcttgtttcatactgctcgctgggtacctcctgtcctttaggaacttgctatgtgacattgccctccgtgctgcaacctcatgccagcctttccctaagaccacaaaggaaaatggggagccaagtgtgaatcggacggggtcagggctggggtgtggtggagctcttgcgtttagagagagaggtagggagagttgtgcacctccgccacacatagcaggcagttaaatagagttaatgaatgaatgaatgaatccattaatgaatggttctattaaactgatacttaaggtgcaactgctatattccggtgttctagatgttgcaaatatgcggtgaataataataaaattgctagcacttataaaagggaattaggaccgggttcacaatatctctgtgttgaggtgctaacgatagtggggtccccacgtcttcccattcctctcttggactcccctcccagcctgtttgaagtgctttattcactttaacctcgtttaattttcacagcaactctatgaagtaggtgccattatttctcccattttatcagaggggaaactaaggcttcgagaagctaattcacttgcgctaggtcatgcaactgggaagtggcagagtgggaattttaacctgtgctttctggcctagaatccactttttttttttttttttttgagataggrtgttgttctgtcgcccaggatggcaggatggagtacagtggtacaattatagctcactggaaccttgaattcctgagctcaaataatcctcccactcagcctcccgtgtagctgggactacaggcagacaccaccacgcccggctaaacttttgtattttttgttgagacagggacatactatgttgcccaggctggtcttgaactcctgcgcccaagtgatcctcccaccctggcctcccaaaatgctgagattacaggcatgagccaccacacccagactccacaatcttaagtaccctgctgtgccctctcatgatctgagttcacagtctagtaaaagacattttttttttgagatggagttttgctcttgtctcccaggctggagtgcgctgcgacttctgcctcccaggttgaagtgattctcccacctcagcctcccgagtagctgggattacaggcacatgccaccacatctgcataatttttgtatttttagtagagacggggtttcaccatgttggccaggctggtctcgaactcttgacctcaagtgatccacccaccttggcctcccaaagtgctaggagtacagatgtgagccaccatgccccactaaaagacatttaacatatacaactatacatatatactaattacaatttctggtaaatttgactacctagagtaatcaaattcatagagacagatatactcattataatctgtggtaaatgctgtgaaggcaaagtggaggacagcctgggaggacttctcagaggaggtggcattaaacaaagatctgtggattgagaaatcaccagggaagagggaagaagagtatcccaagtaggggaccagaatatacaaaagcctggaggtaggatggaaaattccatttgatggccatgtagataatttagagcgtcacatcctttagcaggctttttcaaactttgtggccaagagtaagaaatacatttcacatcctgacccagtacacacacccaaaattgaaaccggtttcattaacaattattgctcttaccacgtgtgatgcattcttgttctttaattatattctctttcatttgtaaagtgctagttgttgtttttttttttgcggggggggggccaggggtgtgtttttgttgtttgttcgtttgttttttaagactgagtcttcctctgtcgcccaggcctgagtgcagtcgcacaatctccggtcactgcaacctccgcctccttgattcaagtgatcgtcgtgcctcagtctcccaagtagctagggttatagttgtgcaccaccacacccaactaatttttgtatttttagtagagatggattttgccatgttggccaggctggtctcgaactcctaacttcaaatgatccactggccacggcctcccaaagtgctgggattacaggcatgagccactgcgcctggctattctcttcattttcaaagtagtagtttagacgtgcatttgagcagctgtttgtttgtttgtttgagatggagtcttgctgtgtcgcccaggctagagtgcagtggtgcagtcttggctcactgcaatctctacctcccgggttcaagcaattctcctgccttggcctcctgagtagctgggattacaggcgcacgcctccacccccaattaatttttgtatttttagtagagacagggtttcaccatcttrgccaggctggtctcgaactcctaactttgtgatccacctgcctcggcctcccaaagtgctgggattacaggtgtgagccaccacacccagcctcaagtagctattattaaaaacaaaacagaaaaggacaagtgttggcaagaattgtgttgtggaaacgtcggaatcgttgtgcattgctgttgggaatgtgtataaagtggtacggctgccatggaaaaccgtatggcagttcctcaaaaaaataataawttttttttttttttggagacaaggtctcactctgtcacccacgctggagtgcagtggcatgatcttggctcatggcagcctctcaggctccgtgagacttccaggctcaagcacaagcaatcctccmacctcagcctcccaagtagctgggattacaagcatgtgccaccatgcccagctaatttttgtagagacagggtttctccatgttgcccaggctggtctcgaactcctgggctcaaatgatccacctgcctcagcctcccatattatgtacattktaacaattttttttgtttttgagacaaggtgtcaatctgtcacccagctaatttttttaaagtttttttgtagagaccgggtgctgtggctcacacctgcaatcccagcactttgggaggccaaggcaggcagattgcgtgaggccgggaattccagaccagcctggccaacatggtgaaaccctgcctctattaaaaaatacaaaacttagccaggtgcagtggcacgtacctgtggtcccagctactcaggaagctaaggcaggagaatcacctgaacctgggaggcagaggttgtagtgagccaagatcatgccactacactccagcctgggtgacagagtgagactctgtctcagaaaaaaaaaaaaaaaaaaaatttcttagaggcaggtcttcctgtgttgcccaggctggtctggaactcctgggctcactcaagcagtcctcccacctaggcctcccaaagtgccacacccagccatgattttttaaagtgctagtttagagaytttttttgtttgagacagagtttcactcttgttgcccaggctggagtgtgcagtggcacgatctcagctcagtgcaacctccgcttcctggtttcaagcgattctcgtgcctcagcctcctgggtagctgggattacaggtgcctgccatcacacctgggtgatttttgtatttttagtagagatggggtttcaccatgttgaccaggctggtcttgaactcctgatctcaagtgatccacccaccttggcctcccaaagtgctgggattatagttatgagccactatgctcggccagtgtgtctgaattctgggcatctgtgtggccagctgaacctcagggcattccagtactgaagggaggaggggaggatggccactgagggctaggtagggatctctgcctcactgcgccgcaggtccaggtggccagtgggctccagagagaagggtaggggtgatggctgcttcawntccttttctcttatatccaccccagatctcgacatggcaggagctgaggcagctgcaggagcagatccggagcctggargaagagaaggcagctgtgactgaggcagtgcgggccctgctggtgagcatggtgccctgagtaggtggggagtggccacgagggtgtctctagacacaggtaacaggaaaccgaatttaaagaacttgaacaggctggcacggtggctcacgcctataatcccagctactcgggaggcctaggttggtggatcagctgaggtcaggagtttgagaccagcctgggcaacatggtgaaaccccatctctactaaaaatacaaaagttaggcggcatggcggtggacacctgtaatcccaggtacttgggaggctgaggcaggagaatcgcttgaacctaggaggcggaagttgcagtgagctgagatggcgccactgcactccagcctgggcgacagagcgagactccctaaataaataaataagcaagcgtgaacaatgtggacatgcattacctcacatagcgagctgttgcaggaycctggcatccctagggctgattaattagcggttcttccagcatccccagcccaggtcctttccttctctctgtaccggmaacttcactgcactgatctttcctcagtttcccatcagggtttccagatggctgctgtagtccagcatctcctcacatgactgtgccaggggaaggagacagagacttctctggcttgagttcctttttcaggagcaagtacacctttcctgaagcatccagcaaagtcccctcgtgtcccctgggcccagacccccaccacactccagttgtcagccggaggaatggagttccggcagccggcataggctgatcagaggccatcctccacctgggcccacttcccctgaactacaggctaccagggaagggtgaactgcgtcagagttctgtggggaaggaggaagaagggatctttattttgtttttatttttttgagaccgagtctcactctgttacccaggctggagtgcagtggcatgatctgggctcactgcaccctctgccccctgggttcaagtgattcttctgcctcagcctccccagtagctgggattacagacatgcgccaccacgcccggctaattttgtatttttagtagagatagggtttcaccatgttggccaggctggtctcaaactcatcacctcaggtgatccacccgccttggcctcccaaagtgctgggcttacaggtgtgagccactgcgcctggcctggaaggagggatcttgggttatacaaccaacagtgtctgccacagacggcttaaaaacaatcataaaaacaacagcagacctttatgtagaagtcgctacacaccataccaggtgttttccatactcttaatcctcacagccatttgtcacacaggaacaatacaaacccaattttacagctgggaaaaagtgaggccctaagagattaaaacgggcctaaatggccgggtatgggggtacgcacttgtagtcccagctactctggggctgaggcaggaagatcgcttgagtccaagagtttgaggctgcagttagctatgatcgcaccatcacactgcagcctgggcgacagagtgagaccctgtctccgagaaaaaacaaccagaaaaagtacgtaagtctcacagccaggaagtgggagaggcaaggttcgcacctaggcagttggtttttaccactctgtttggaggcctctgccaccaagaatcacatctcccagcacctactgagtggccagcctcgggctgtctacatcatggacaaccaatgaaagcaacacaatggatcatttaatgttctttgagtgctaactcatctcagggaagctgcacaacagccctgcccagggaggtcctgttatcatcccacttcacagatggggatactgaggctcagagggggcagagattttcccaagggctcacagcatgtaggtgcccaacattcagacccaggctgttcgattccctcagctgcttaggatcatggaaggttcagaatgtcaaggggccttggttgcaggccctcaaatgcacactgatagactttacctctcygagcttccattttcgaatctacagacagggtatattagtccattttcttcttttttttttttgagacagagtctcactgtgtcacccagaccagagtacagtggcacgatctcggctcactgcaacctccacctcccaggttcaagggattctcgtgcctcagcctcctgagtcgctgggattacaggcacgtgccactgcacccagctaattttttttttgagactgagtctcgctcttccacctaggccagactgcagtggcactatctcggctcactgtaagctttgcctcccgggttcacgccattctcctgcctcagcctcccgagtagctgggactacaggcgcccgccaccgcgcccagctaattttttttctgtatttttagtagagaccatgttagccaggatggtctcgatctcctgacctcgtgatccgcccgcctcagccttccaaagtgctgggattacaggcgtaagccaccaagcccggcctgatttttgtatttttagtacaaggttttagagatgaggtttctccatgttggccaggctgctctccaactgctggcctcaggtgatctgcccacctcagcctcccaaagtgctgagattacatttgtgaaccaccacgcctggccccattttcacactgctataaagaaaacctgaggccgggcgcggtggctcacgcctgtaatcccagcactttgggaggccgaggtgggcggatcacgaggtcaggagatcgagaccatcccggctaaaacggtgaaaccccgtctctactaaaaatacaaaaaaattagccgggcgtagtggcgggcgcctgtagtcccagctactagggaggctgaggcaggagaatggcgtgaacccgggaggcggagcttgcagtgagccgagatccccccactgcactccagcctgggcgacagagcgagactccgtctcaaaaaaaaaaaaaaaaaaaagaaaacctgagatcaggctgggcgcggtggctcacgcctgtaatcccagcactttgggagaccaaggcaggtggatcacaaagtcaggagatcgagaccatcctggctaacatggtgaaaccttgtctctacgaaaaatacaaaaaaaattagccgatcgtggtggcgggcacctgtagtcccagctactcaggaggctgaggcaggagaatggcgtgaacccaggaggtggagcttgcagtgagccaagatcgcgccattgcactccagcctgggcgacagagcaagactccgtctcaaaaaaaaaaaaaagaatacctgagactgggtaatttataaagaaaagaggtttaattgactcacagttccatatggctgggaggcctcaggaaacttaaaatcatggcggaaggggaagcaaggcactttcccttccacatggtggctggagacagccacagggggtaactgccaaacgcttttaaaccatcagatctcgtgagaactcactatcaggataacagcatgggggaaaccgcccccaggacccgatcacctcccaccaggtcccttcctcaacaggtggaattacaatttgagatattatttgggtggagacacagccaaaccatatcacagggtttacacgaatgcctacctcctaaagtggattttgaagaaatcatggcatgggagarccctgtacatagagcctggcatggaggcatcacttcctatacggatctgcggctgtgattactgttaattatcttgcctccttgtagcgttagcaatagagaaacagaaacacagagttgcagagggacccagctaggcactgacagagcaggagactaagatcctctggccttgtttgacctttcaccattttttctcttccccaccctcgactttgtcaacctaatcacccaccctgtytcttttctaccaggcaaaccaggacagtggtgaagtgcarcaggtactgtgaagagttgatgtcctatccagggttgggggtgggcagggaggataccctgccagtcacgattctactattgtaacagaaaacaactcaaacaggtttaaggggaaaaaaaaaataggctctattgatgcatgaaactaaaactggcttcaggtgcggctggatccaggtgctggctccatatttggtcctacgttcctcccattcccaggccagctttctctccttgtgtaagtaggaggcaaagtcaagcacgctttcctgatagttccagttaaagtcctggggctgattctcatgagttcagctgacatcaggtgcctgtctctgagccagtcattgtggccaaggcaatagaacgttctagttggccaggcctgattcttttccccacaaacctgccatgtggtggtaagggaagttctgcgaagacgttcaggatcctgggcctggagaagaggcatgaatgtccaccacaggggctctgccggtcaggatcaaggtcacactggatgagggagtcctgaccctctcccgggctgagcccacctgtgctgcccccaggaccccaagtaccagggtctgcgggcacgtggccgggagatccggaaggagcttgttcacctgtaccccagggaggcccagcttgaggagcagttctacctgcaggcgctgaagctgcccaaccagacccacccagacgtggtgagcaccgtgctgggtggcagggaggccaggggcccacctagtgccacctttccgtgactcctgctgtctccctgcagcccgtcggggatgagagccaggctcgagtgctccacatggtcggagacaagccaggtgggccacaccccaggcctgggagctgacaagccctgcggtgtgggggttctggggtctcggggtgggggcccctggggtctgggaacatgtctggagcctggagaactcctggcggtacaggaggtggctccagcttcctgccttggccgagctcgagctgtctctgagaggcggtccttgggttttcattctctcccccttcaccattgggcagtctcaccctgtgttgtgtgattgtatcgtatgtgtgtgagtgtgtgtcgtgtatgtatgtgttgtgtgactgtgtgtcatgtgtgtctgtatctgtgtatctgtgtgtctgtatctgtatgtgtgtgtctgtatctgtgtatctgtgtgtgtctgtatctgtgtgtgtctgtatctgtgtgtgtgtgtctgtgtttgtgtgtgtctgtgtctgtgtctatctgtgtgtgtgtctatgtgtgtgtctatctctgtgtgtgtatatctgtgtttgtgtgtgtgtgtgtctgtgtgtgtctatgtatctgtgtgtatgtatctgtgtgtcttcctctgtgtctgtgtgtatgtgtctgtctctgtgtgtctgtgtgtgtatctgcatatctccgtgtatctctgtgtgtatgtctgtatctgtgtctgtgtatctgtgtctttgtgtgtatctgtgtgtgcgtgtctgtctttgtgtgtctgtatctgtgtatctgtgtgtctgtctctgcgtgtctgtgtatgtgtctgtctctgtgtgtctgtatatgtgtgtgtgtcttcgtacctctgtgtgtatctctgtgtgtgtatgtatgtgtgtgagtgtgtgtgtgtctctgtctctctctctgacccccctgctttggtccctgtctccggggctttttctccccaactctgtgcctcctctctgattctcctcctcccttcctcgtggtgtttccttctcctctggcctctctcctctgtttctaactctgccttccccaccccgcgccctcttatttccctctctgcctcctctcatttcctctccctgtctctstttttatctccctcccttcctgtctgtcttttcttccctttccctccctttccgtgtcttcttctcccttctctcctcctgcccctcctttattttctctcaccgtccctcctctctgctgtctctggaagcttctatctgggccccatccctctctccccgctgccttacaccggtgcttttcacccacatccagttttctccttccaacctcggggccacctggaaattggcgagaaactcgacatcatccgtcagaagtgagcccctcccctggctccccacgcccctctcccagctgcctgcaccccgacagctggctcctgcctcattggcctcagcgtgagatgtggaaatgccatgaatctttgatgccccagccccacccagcagccgggcctcttcccccgggtgttttcatccccacattccctgccagcctggcccatgtgcacccgcctgtctgtctgtctcccaggcgcctgtcccacgtgtctggccaccggtcctattacctgcgyggggctggagccctcctgcagcacggcctggtcaacttcacattcaacaagcttctccgccgggtatgggccaagataggagggctgcctggagggggtggcatcgaagctgagctcagagggcccaacggggatgggagtgatctctgctctgccctagtcactgctctcagagcttcatgtgtatcattgacacatttagtccttacgacaactttatgaagtgggtgctgtcatcatccccactttacagagagggcttgaggcccagagaggggaggtacctatagcccaaggtctcacagccagtctggagctgggcctagagcctgtgcttgtaatcatygcacctcactgcctgcttgcggtataaagggagcatttgggaatcatagcatccattgaaacatggcagggactggttgcatggagcattggtcacggtgaggaactcagacattttcagagggtactagggagccatgggaggcttttaagcaggggagggtgtggccaaatctgtacttttttgttttttgagacggagtctcgctctgtcacccaggctggagtacagtggtgcaatcttggctcactgcaacctccacctcccgggtttaagtaattctcctgcctcagcctcctgagtagctgggattacaggcacatgccaccatgctggctaatttttttttttttctttttgacagagttcgctctgtcacccagactggagtgcagtagcacgatctccatgccggctaatttttgcctttttagtggagagggggttttgccatgttggccaggctggtctcaaactcctgrcctcaagtgatccgcccacctcagcctcccaaagtgctgggattacatgggtgagccactgcgccagcccctgcctcagtttcgtctgaggaggaaggggctctgcagcaccccttcttcagggctgagcttggggtctggtaggggtcccagctctgctcactcatcctctcccctgaacagggcttcacccccatgacggtgccagaccttctccgcggagcagtgtttgtgagtgaggcctctccgcttccctcrcccacctgggtgtcaggccctgccgtgggtgcccgaggcagggaaacctgaggagaccgccctggggctgggttgagggggccaggccataccagggaggccagggcagctccagatgttttcaggggaggagctggggttgkgactgtaaaacgagaggccagggttacctgtcccctgatccctgtggcctggcctcctcccccaggaaggctgtgggatgacaccaaatgccaacccatcccaaatttacaacatcgaccctgcccgcttcaaagatctcaacctggctggaacagcggaggtggggcttgcaggtgaggacctgtgtgggtggtggggaggagcaggagtgatgtggaaggacaactgggagcgtccagggagcactgggggggatcacctgccccgagcagctcagcagccccagggccaacatgtacggctgtgtaggttgtttactgtacagcagtacagtgataatccagccccgggccttgacctggggttgcatccaccagagggagtgcctcttaatcttccaaaggcttcctctgggcactggcagccctggctcaccctgtggtctctcctcccaggctacttcatggaccacaccgtggccttcagggacctgccagtcaggtgacacctggtttccttagaccttgaccccacctgtgacaatcastcttccctccttgacccgactttccctgctctctgccaggatggtttgctccagcacctgctaccgggcagagacaaacacgggacaggaaccccgggggctgtatcgagtacaccacttcaccaaggctggtgtcgctgggactaaacggggctggggtggggggccaccccaagagctcagagcctcctgactcctgtgccctctgtcccaggtggagatgtttggggtgacaggccctgggctggagcagagctcacagctgctggaggagttcctgtcccttcagatggagatcttgacagagctgggcttgcacttccggtgcggagaggggccagggatccagggatggcaggggtggggtaggggagggacaaggggctggccagctgctcttcgctctggaaccacctctccagccccctcgttgcccccattttcctgtacaagrattacaggagcatatacaggatcccaatctgtctgccgtgtgccggtcgtccctcacaggactgtaacagaagcacgaacagtgcacggtgtgccagagtggagacccgggcccctttcctcctgctgctccccctctctctgggccgctgcctcatctgtgcaacccaagatactttttcacctcccagtggagagtgggggtgggaaaagggggagccagaggttgggaaccccacttcctctcaccctgtcagtcacacgcagctttcaagagaggctgagaaatgtggacttcttttctgggtgacccattgtaaaaaactgggagcgtaagccgggtgtggtggctcacgcctgtaattccagcactttgggaggccatggcaggaggattgcttgaggccaggagttcaagaccagcctgggcaacacagcgagagctcgtctttacgttttttaaaattagccgggtatggtggcacacacctgtggtcccagctacttgggagactgaggcaggagaattgcttgaacccaggaggtggaggctacaatgagctgtgatcatgccactgcactctagcctggggcaacagagtgagaccctgtctctaaaaaaaaaaaataaaggccaggcacrgtggctcacacctacaatcccagcactttgggaggccgggacaggcggatcacctgaggtcaggagttcaagaccagcctggccaacatggtgaaaccccatctatactaaaaatataaaaatcagccgggcatggtggcacacacctgtaatcccatctactcaggaggctgagacaggagaatcacttgaaccctgaaggtggaggttgcagtgagccgagatcgcgccactgctctccagcctgggcaacagagccagactccgtctcaaaaaaaaaaaaaaaaccgagggtgcctagaaggtgcaaatgtgtgaatggccactgtgaagagccggtggaccctgccacgtgcctttttcccctcccatcaacctcttttgtgcttccccctccatgtaccaccttctccataaccacccctggcctcacaactctctcctttggcactatcgtctccttttttttgtttgtttttttggagtagatgaggtctccttatgttgcccaggctggtctcaaactcctgggctttttcctgctttttggctgccttctcttccatcgtttccatttkttcctcttgctcctcctctcacccgctgaccttccccacaccttcgtccttgaccgcagggtcctggatatgcccacccaagaactgggcctccccgcctaccgcaagtttgacattgaggcctggatgccaggccgaggccgctttggagaggtgagccctgtgccgctggggacggggtgggcaggaggacaggcctgccccccatccctgatccgctcagcctgccgctcctccaccccaggtcaccagtgcttccaactgcacagacttccagagccgccgcctccacatcatgttccagaccgaggctggggagctgcagtttgcccacacggtgaggcccrcacagcctcctgcccgcgtgccctcgcccgcagcctctgccgccctagacccacccaccttggctcctccccgggctcagcttggggtgggcgccagttccgagcatggctgtctcacaggtgaacgccaccgcctgtgctgtcccccgccttctcatcgcgctcctggagagtaaccagcagaaggtgaggggctgaggggcccacccagagaggcagctcagygccggggagggctggggcatctgcagtgtcctgaggtctgctctgtccccaggacggctcagtgctcgtgccccctgccctccagtcctacctcggcactgatcggatcacagcccctacccacgtgcctctccagtacatcggccccaaccagccccggaagcctgggctgcctggccagcctgctgtaagctaagaacccacccacagcagccctcgggggtgtcactgcttcctggagttcaggagaccccggacacctgggacctgtgttsctgagcccgtcctgacatckgtgttcttcctgtcagctccacgcccgggcccctggaccacggggtccacctctcctctgtccttgctgcctcagagtcagtcactgaccctgttatcattgagggtcccagtgggaagcaggacgtctgggctttacggttctagggacaggagaagcagaggaagaggcttccatccctccttccttctttcctcctacagtgctgagcaaaaagtccccaataaatggtcaggacaaaggcctctgtggatctgtgaacaagggagatgcctggctctctaggagctgctgagcagccgcttggaggcactatcctcaaagggtctgtggctgcaaagaccatggctggaagtgcctagccaccccccagtgcacatggaggctggcctggggccaccagggttgctgagaggatgctgaattctctccccttcctctgggacaagccagaacagagtcaccctctgagggttccttcgagctgaccccagccccagcctcacccctcagtccccagctccccatgcagctgtcccttctgcagctccaggtaggggcccagtgggcatcccaaactcagggaaactacctggtcctctgatcacttggcctgcacctgctcctcctcaggcatgcccatcccagcacattctcccggctgcccaggccacagcccttcgggttagcctcgacttttatctcatatccactccacttcattagcaaccctggcaacaccgccttcagaatatttccagaatctggccaggtacagtggctcacgcctgtaatcccagcactttgggaggctaaggcaggcggatcacctgaggtcagttcaagaccagcctggccaacatggtgaaaccccatctctactaaaaatacaaaaattagctgggcgtggtggcgcacgcttgtaatcccagctactcgggaggctgaggcaggagaatcacttgaacctgggaggcggaggttgtggtgagtggagatcgcgccactgcactccagcatgggctacagtgcgagactccatctaaaaaaaaaaagagctgggtgtggtggcgggcrcctgtaatcccagctgcttgggaggctgaggcagaattcttgaacccgggaggcagaggttgcagtgagctgggatcacactactacactccagcctgggtgacagagcgagactctgtctcaaaaaagatttccagactctgcctactgttctctcctccctgaccccacctgggccctgctccccgatccctcccctttggttaaccctggaagcctcttcactggctccctgttctccatcctcgccacacagccagagggacctgtgagcacctcagctgggtgtcccacccctgctcagaggtctcctgtggcttcgtctcagagtaaaagggtaaagtggtcatcgaggcccctaagaccccacctgagctgctccaccttcctcttcagcccatctttctgtcttgtttggtccacccgacccgccttgacattgaaactctccaaactccttcctgactcgtgcacttacattggtgagtctccctctctggctgtctctcccctagatggtgtgtgctggcctccatcttgtcactcaggccttagctcaaatgtcacctcttccaagaagtcttccgtgaccacagtaaaacccccccagcactcagtacctacatctgagatactttttttttttttttttttttttttttgagatggagtctcactgtcccaggctggagtgcagtggtgtgatctcggctcactgcaacctctgagagattcttttgcctcagcctcccgcatagctgggattacagggaggtgccaccatgtccggctaattttttgtatttttagtagaggcagggtttcgccatgttgaccaggctggtcttgaactcctgacctcaggtaatgcacctgccttggcctcccaaagtgctgggattacaggcatgagccaccacgcccagcctgagatactatatttttgatgcatttctgccttctttccttaatatgtattgatgtgtgtcaaataccagctccaggagggcagaggtatccacccattggctcagggctgtagcctcaggtctaaaagaggacctggcatgtagtagatgctcaacaaaaattactgcactgaagatgcttggacgtgtgccgttcccagtaccaggcacttccctaaacactgtacacacaactatttaatcctcactgtccaactgtagagtaggttgtcaccaaccctatttacagtgaggaaacaggtcttagagaagttaagcggttatcctgggctgcacagctggcacgtggtggagctggggcttaggccagaagccaactgcagcctctgaggaagcgggtttatgagacccactctcagccaagcatagtggctcacccacgcctgtagtcccagcacttcaggaggcccaagtgggcggatcatttgaggtcaggagtttcagaccagtctaggcaacatagcaagaacccctctctacaaaaaatgaaaaaaattactgtggcatgataatgcaagcctgcagtcccaactgatctggaggctgaggcaggaggatcccttgtgtgagagtttgaggcactgcactccagcctgtaacaagaccctgtgagaaaacaggcccaggaagggaaggagttgcctggggaccatctgtgagtggctgcttctgggttcccaccccggtccacctgccagcgtggagggcgagtgtaccagaccctgctgctctgggaagagatccccccaggccaggtgtggcacctcaggcctgtaatcccagcactttgggaggcccagacgagaggatcacttgagcccaggagtctgagaccaacctggccaacaaagtgagaccctgcctctacaaaaaataaacattattagccagatatggtggtacacgcctgtggtcccagctactcgggaggctgaggtgggaggatcaagtgtgttcaggagcctgcagtgagctgtgatggcgccactgcactccagcctgggtgacagagccagaccgtgtctcaaaaaaacgaaaaaagggaggcctccaccatctgcgctgagctcctggcctgaagcctcgaggggagcgcgtgcagggcggaggcctcatgaataattgagggtctcaggcaggcagccgccccgcagatgtcgccccgccgcgggcggggagggggcgggggtgacatcatttcctcccctgcagggtccccgcgtgggttataaggcgctgcaaccctggcccgcacagcgccttggacccgttggacgcccaccatgccgccccgagggccagcctctgagctgctgctgctgcggctgctcctgctgggggcgggtgagtgcgggacctgccgagtgcgggacctgccaggggccggggagcggggactccagtgggagggggcaggcagtgcacccagtggagaggcttcaggggccgagcctccagcgggggacagtacacccgccgggtgggatggggaggggatgtgtggggaccgggacgcccatggagctggggtcggtaccggggacagcagccagggcggcaaagcccagtgccatctcctttctccacagccaccgctgctcccttggcaccgagaccctccaaggaggaggtgaggagtgtggaggccttgccctgcctcacctagctggggccctgccctccctgcacagcctgccccatgatcctcattgccctcaaaccagctgctctcctccccatctcccctgccctcaacctcccctctgacccggcacccctgccccccagctgacccgctgtctggcagaggtggtcacagaggtgctgaccgtgggccaggtccagagaggaccctgcactgctcttctccacaagggtaaggaggccccgggccccacttgccctccacaaccccatgggaccctaccctaccccacccagggtcctgcccaggtgcccacatgctctcccacccaggctacctggaggaagaggtcctcattcccagagccctgttgcctggaccagcggggcactgcccagcattcacacctgacagagcctggccaccagcaacacccttgtggttccctgcagaggggccagatggggcagggaacatcccctcccaggtgggatgaaataggaccctccccctgtagtctgggcagcccccctgtgagaccttcggcagggcccagaactcctcaaggcctcagtttcccaattcaaactcctgacctcaggtgatcggccgccacggcctcccaaagtgctgagattacaggcgtgagcctccatactcggcctcagtttcccaattggatgcttagagagtgtcctttccctttctgccagagttgtgcgggacagagccccacggctgtgcgtccaccgaggagaaaggcctgctgcttggggatttcaagaagcaggaggctgggaagatgaggtccagccaggaggtgagggatgaggaagaggaggaggtagcagagaggacccacaagtctgaggtccaggaacaagccatccgcatgcaagggcatcgccagctccaccaggaggaggacgaggaggaggagaaggaggagaggaagagggggcccatggagacctttgaggacctgtggcagcggcatctagagaatggaggggacctccagaagcgggtggcagagaaggccagtgacaaagagacggcccagttccaggcagaggagaagggggtgcgggtgctgggcggggaccgcagcctgtggcagggggccgagagaggcggaggagagaggcgcgaggacttgccccaccaccaccaccaccaccaccagccagaggctgagcccaggcaggagaaggaggaggcttcggagagggaggtgagtagggggatgaaggaggaacaccaacacagtttggaggcagggttgatgatggtcagtggagtcacaactcacagccaccggtgttggccctgcaccaccagatccatcactagtggatcacagtggccaagactgacaccacgactggctaacaacttccgtgcaaggcctttaccttatacttccacactactgtatggactacagcaaccaagatggcaccattgcacagaagcaagccaccatcactagcaagttggccactgtgaaaagtggctgctgtgcctacttcactaggtgacagacagacaccattgctgggtcatggaaaacaagatgtcaccatgattggtggcaccaaaagtgccgtaacagggtgggcatggtggctcacacctgtaatcctagggagggttaatcctttcagaggccaaggtgggagaatcccttgaggccaggagtttgagaccagcgtgggcaacatagtgaaaccgtgactctacaaataatttaaaaaattagccagcaatggtggcgcacgcctgtggtcccagctctcaggaggctgaggtggtgggattgcttgaacccgggagtttgaggctgcattgagtcatgattgtgccacagcagtcccgcctgggccacagagcaaaaccatcttaaaaaaaaaaaaaaaaatggctgggcacggtggttcatgcctgtaatcccagcactttgggaggctgaggcgggaggattacctgaggtcaggagttcgagaccagcctggccaacatggtgaaaccctgtctctactaaaaatacaaaaaatcagccaggcatggtgttgcatgcctgtaatcccagctactcgggaggctgaagcaggagaatcacttgaactcgggaggtggaggttacagtgagccgagatcgtgccactgtaccccagcctgggtgacagagcgagactccatcttaaaaataaaaataaagcgccatcacgaggtgctcatcccaggcacctttgccagtcccaagctactgctgttggctgtggtcgcgttagccagcaccactcttccggggttatggcaatcagcatggtcaccatcgcggtccacgacgatcagaacgaccgctgctggatgccactatgagaaccgacatggcccacaatcacagtgaccgaggtggcctgcctttgaaggtgggtgctgactaccccgtttctgaccccaccaggaaaaggaggtggagcagctggagcacttgagagacgaactgaagaaggtgacagagacg

SEQ ID NO: 94874 - DNA, 78555 bp, Homo sapiens
  misc_feature (1)...(78555): n = A,T,C or G
gatcttgggttcccacagaatgctcaccctagacggcaggagtacaggtgcgtttccaagtgtaaacctgtccctgggcaattcccttctagaagtttgtttttcagcctgcaactcttccatgaactcgacttgtctagccaaccccctacacgtcaccatgaggctctccagtaagtgccgcgcaccacgcctccccagcacagactccagattattcggcacccacctggccctctcctagtcttctcatcaatttttagcatcctgggccagaaacctggggtcaccctccccagctgtgagctggtggaagtctgccattcaacccacctagactgccaatgaaaagaaccaccagatgccctgtggggcaaggggctgtggctaccctctctctcccccacctgtggaccaggtccccgagagccaggcagccctttcctgggagccctccctgcattcctccggctggttagcccagtttggggttctgccctggtaggctgatagcccctcacctcatgccgaggctgctgccccgacttgcaggaaccctcagatgaaggaccctaaggagggccagctctgtgtccatgcccacttggatcttgagagctgccccaggcacgtgtggactggtagtgcccctggactcagagctttgggttttgcccaccctggagctgcccggctctgttcctcagcatatactctcttcctcattcctacttcatggttatatgtaaatgcaagcacacagaagttttctactttaaaactcagaagatcagcagatcactgctctctcctggtgctctggggagccacgtggcctctctttgcaccaaaactccccatccaagtccagctccactctctctctgcctcagctgccctgcagccctttcctcttgctctttgatgttttgtaggcctgcagctcccaagcacagaggcatgagtgggragaatgtcaccaaggtcagcaccttcatcctggtgggcctccccacggccccagggctgcagtacctgctcttcctcctcttcctgctcacctacctctttgtcctggtggagaacctggccatcatcctcaycgtctggagcagcacctccctccacaggcccatgtactactttctgagctccatgtctttcctggagatctggtacgtgtctgacatcacccccaagatgctggagggcttcctcctccagcagaaacgcatctctttcgtcgggtgcatgacgcagctctacttcttcagctccctggtgtgcaccgagtgtgtgcttctggcctccatggcctacgacygctacgtggccatctgccaccygctgcgctaccacgtccttgtgaccccggggctgtgcctccagctggtgggcttctcctttgtgagtggcttcaccatctccatgatcaaggtstgttttatctccagcgtcacgttctgtggctccaacgtcttgaaccacttcttcygtgacatttcccccatcctcaagctggcctgcacggacttctccactgcagagctggtggatttcatyctggccttcatcatcctggtgtttccgctcctggccaccatactgycatattggcacatcacccyggctgtcctgygcatcccctcggccaccggctgctggagagccttctctacctgcgcctctcacctcaccgtggtcaccgtcttctatacagccttgcttttcatgtatgtccggccccaagccattgattcccwgagctccaacaagctcatctctgccgtgtacrctgttgtcacgccaataattaaccctttgatttactgcctgaggaacaaggaatttaaggacgccttgaaaaaggccttgggcttgggtcaaacttcacactaagacaactaaatgtcctagagtaaaatctgtagtgatgaaacaacattgtatgtggcactttgtgctctttaaattaatttttaagttaaatttaacaaacctacagaactaagtgaaatttaacaaacctacacaactgtgcacaagtaacaagccttcgtctgcatatgttttcacaaaaggactgtgctcatggaaccagctcccagatcaagaactagaagctgccttcacgccctctcccagtcattaacccttctccacaaaaagcactgtcctgacttccaaaaccagatgctagcattggtgtttctgaggggcttacacataaagtatgtgccctgttatgttcagcttctttcattcaccgtgttgcttgagtgaatccttgatgtttttgcatgtaacaataattcatgcattctcattgctatccaatattcataataaataatacatttatactgtataatacacaatgcataatacattcatactgggataatacatatactgggataatgcatatactgtattgtgtattatatatacataatacattatgctgggtgaaaccctgtcccacctgtcccagcaggtgtgagccactgtgctcatccataatttatgcatctaaacacagataaggtaagtcaaaatataatgtcataatcttatgggaccaccatcttatgtgccgttcagttcatcattcaccaaatgtcattgtgtggtgcactactgcgtcagttgagaatatttgtgctggcttatttctggatcctctgttctgttaaattgatctacgtatctatcaatatcacaccctccatccatacaacacagtcttgatttatatgattatgtagtaaatcttaacactggaagagtgactcctcccactttattcttctgcttcaaaattattgtggctattgtacagcctttatatttttatataaattttatagtaagcctgtcaatgtctacaagagaacctcgctgagattttgctagaaattccattaaacctaaaaatcaatttgggaagaactgacttcattactctgttgagtctttcaatccatgaacatagtaaacccctccaattattgaggtcttcattctttaaatcagtgttttgtactttttaatatgcagattctgtgtgtgttttgctggatttagacctaaatattatattttctttgaagcaactgtaaatggtattccatcttttatttcagtttccttctgtttgttgttagtacataggatgcagctgattttcatatgttgacattgcagcctgcaaacttgctgcgctcactcattagttccaggaggtttttgtagattcctttgggttttctatgtgaacagtcatgtcaactaaaaatagacagttttatttcttcctttctgatctgtatgaatttcattttttattttttgccatactgcatggcctattactagaacttccagtgctctgttgaataagagtgggcagagcagatatccttgccttgtttcctccttagaaggcaagcattcagtctttcatgattaagtacaatgatgcagagttttcacgcatgtgctttatcaagctgaagcagctcccctttagtccttatttgctgagagcagtttttgtttttatcataaatgagtatttaattttgtcaagtgatgcagaaaactgcatcaggcaatctggtcatagatttcgtctttcacctgctggtaaggtgtattacattggttgattttcaaataccagattagccttgcatcttctgaataaaccaccttgggttgtggtgtatgattcatttcatatagtgttggattcaatttgctaacatttcgttaaggatttttgtgtctaagttcacgagagatattggtctattggggtctgaagttattttcatgctgtctaatatagtgtggacgtcaaagcgacctcctagagaacattcctagctctcagaacgttctagctggggagggaaaacggaaaaaggggggcgagaagcggagggacggggaagtatatagtaatacttcccttgaaccagtaaaactgtaatgcccaacctggtttttactaactgttttcagactctcccttttcctttaatcacctagccctgtttccacctgaattgactctcccttagctaagagagccagacagactccatcttggctctttcactggcagcccctttctcaaggacttaacttgtgcaggctgactcccaccacatccaagaatgcaattaactggtaagatactgtggcaagctacatccgcagttcccaggaatttgtccgattgataacgcccaaagccccgggtctatcatcttgtaatagtcttaaagcccctgcaccttgaactgtttactytcctgtaaccatttacccttttaactttttgactactttacttctgtaaaattgttttaactagaccccccccccttcctaaaccaaggtataaaagttaatcaagccccttcctcggggctgagagaattttgagcgttagccgtctctcggtcgccagctaataaaggactcttaattcgtctcaaaggtggtgtttttctaactcgctcaggtacaacaaaacatccacgcaaacaggttgtgagaagttacgtctgcgtgctgtgatacctagaggaaccactacgaaaactatacataatgatatttcccaagacattatcagtaaatcaagatggaattctaaaaaaatgtactgtatccattggaaggcacaaaaaaaaaaaaaaaaatgcaaaggaaacaaggcaaaaaacagcagacatgaaccctaaagcttgttaaatggatttcaggtgccctccaggatctaaaaaccagaccctcctgcgttggggaccgggaatccgtatttttgacaaaaagcaattcttcaattatagaaacatccatagaaccggccgtagtttacacagctgcattcccactgttttacaatcgcatgatcatttctgaaaagttgaaaacaaagttaaagaatatttaaggggttaagaacaaaaagcctggggaacacaaaagattataaaaacccttcccaacagcaggcatacttggaaggaaacctcacatgcaaggctccttcgtggagcccagagcccaggtcctgacgggagcacattttaagagatggacttgccggcgcggtggctcacgcctgtaatcctagcactttgggaggccgaggcgggtggatcacgaggtcaggagatcgagaccatcctggctaacatggtgaaaccccgtctctactaaaaatacaaaaaattagccgggtgtggcggcgggcgcctgtagtcccagctactcgggaggctgaggcaggagaatggcgtgaaccagggaggcggagcttgcagtgagcgcgatggcgccaccgcactccagcctgggcgacagagcgggactctgcctcaaaaaaaaaaaaaaaaaaaaaaaaaaaaaaaaaaaaaaaaagagatggacttggagcgtgtgcttttgttttctatgctattcaatgtgttcacagcaggtcccctggatgagaccacttagccttcagctccggaggcgacccaggccggccttgccaggtccctctccctgacaggcgccccgcgacaggggtcccaccccgtccctccgctcctcgccccctctttttccactttccctccccagcgagaacgttctgagagctaggaatgttctctaggaggtcgctttgacgtccacaccgcgcctgggggattctgcggggagcacaggaccctgggacgagacgcagaagtcgctccacgccctgggcggcctcagctcccgcgacaccgcagcaactcagaacccaggcaggggccgggcagccagcatgctgcccscacgttcacctccaactcccacctctcggccctcgccccaacccgcaggaccctggcagcgcactggctgtctccgcggaagcccccgagggcctcggcgcggccccgccccctggaaggttcccgacaggcgccgcgggcaccccggccgtgacgtcacggcagcgcgccggccgcgagagagggccccgtcgcgaccgcgtccccttgggtccttgatcctgagctgaccgggtagccatggccttgcggctcctgaagctggcagcgacgtccgcgtccgcccgggtcgtggcggcgggcgcccagcgcgtggtgagcgggcggcggggtggcagggtggcggggtggcagggtggcggggtggcggggtggggagcagttccacatctcccccggcctctggcggcggctcccaggtcgctctccgggtgggtttgggggacccctcctgcctccggaattgtttggtctttggtcgtggacagacctcagggggccacgagcttctccaggccattttatctcagctttaagcaaaacgctggagcgcggaggtgatcagggccccgaggctgccctgatgcgggaggcccgtgtgcaggtggcaggccgggggcacacgcgcttgtcattagataattcacgtagcagccctgtcaagagccgtttaaaggtcgggccctgctgggtgcttgggtgatgccatgttgagcagacacggagttcagtgcttgtgtccgcttccttttgcctttactctgactgactactctcatttcttagcattttgcccccaccttcttcagtgaaatcgtttcatacatttgtaacacagttggattgctttgtcacattctgccttacatcttgggatccttctacctaatgcgttttttaaaatgtgcatacattgagcgcattctttgtgctataaggttctatggattttttctttgtgctataaggttctataggttttgacacgtgtgtaatagcatgtctccaccattataggttcgtacagagtagcttcactgccttaaaaaattcccctctgctttacctattaaacccttctttttctccaacccctgacaaccacagatctcattaacatttccatagttgccttttctggaatgtcatataattagaatcatacaatatattgccttttcagacgccttgaatacttggaaatatctatgtaagattcacttatgtcttcgtggcttggtaactcatttctttttaatcactgagtaatatctcattgcatggatgtacttcaattcattcagcaattgaagggcatcttggttgcttcaagtttttggcaattatgaataaagctgctgtaatcgtgtacatgcagatttctttttggaaatacatttttatatcatttgggtaatacctggaagagtgattactcatgtagtaagactagttttctaagaagctgccaagccatcttccagagtgactgtgccatttgactcccaccagaagtgaaggctctccttgttgctctgcgtgctcgccagcatgcggggctgtcggttactttggattgctatccattctgatagctgcgtagtggtatcttgtttcaactttggaatatctcatgatatacagtgttcatcttttcatatacttatttgctatctgcgttaatttcatttgcgagaggtgtttacatcttttgcccatttttaaattgggttgtctgctttgccttgttttgtaacttgtttcttccttactcttcagttatcaaatcaagatcgaaaaatatcttgatatttcatattctcctgttttatttaaatttcactataaagtattttaatatttttgtgtttttctgagtacttagtattccataatatggatatgccttaattttgtttaactattcctccgttgttggacatttaagggtttctatttgcatttttggtgttacatcatacttcattgagcatccttataggtcaatcttatgtatatactctttgaatggattcctaatgctgtagacccagcgtcctctaggtttcattaccattagcagtttaggatggtactcattgtcttgtcctaactctgtaatcattttttaaattatttctcattttgacacatgaaaaactaatgtttccttgttaatagtcttttgtttttttgtagcaaggttgaccactttttcatgtggtttttggctatattttataattttaaaataagctgtgtgtttttattctttgttttcttattgttctgtacaatttctgtatatagtaaggttattaccccatcatatctgttgaacttcttcagtttgttttacttttggttatgtttcttttctttttttggaaggaatgttcccactttagtgtggagagtaaattgggctgctggagacaggcattgaagcaggtctttgccttgtagatgagaggtgtgagggtgccgacagagtcagcacatggcatagggaggcgatgcagtgtccagagagtctgaacagttaggattttgtgtgtaattctgcagttgaaggaaggagaaaggtatcaaagacgacactcaaatttgctctcttttgcttgttaggtagtggatattccttgctgtgagggaaagcagacttgggggctaggatatggatgttgcatttcaccttagctctgttaccttcaggtgccttcaggacatctaggtggagctgtttaataggcagtggggtaacgaggtcaggacatggggacagaagcttggattagagaaatgttttttattcccttcccttcactcctgagcttccctccatccctgtctttcttcctcccgtctgtccgtccatccatccatccatccacccctccctccctccctccaatttttattgaacatagtaaacatatttaataaaaatttcaggcattgttccagggcctgaggatttagcagtgaacaaacagacagtatatctgcctttaacgaaacttacatggacagagtggtgggggatagacagataattaaacaaattaataggcaataaagatgtagatgttggcatttttatcacyaagaggtttcttggtatttttacctaatagttactaatgcctacaggaaccagagtggtcacaatgtgctgctgtgtgattttgtgtttttcagagaggaattcatagcagtgtgcagtgcaarctgcgctatggaatgtggcatttcctacttggggataaagcaagcaaaagactgacagaacgcagcagagtgataactgtagatggcartatatgtactggaaaaggcaaacttgcaaaagaaatagcagagaaactaggtatgattttatgttacacagaatgatacctttttctcagatatatggttgcttatttcactggtttttcttcaatattaatattaaataatattaaatatttaataattgggcctaaggtgggtatttcacatttttgtttattgaaaaagctgttttataaaacnaaacaagaaaaagctgtttttaatcttttatgtttggaaaatttgtgaaaatccatgctggttgtcaatttgaattggaattttatgtgggcagtgtaagcagggcacttccacataaactgtcgtgtttgaactttgtgacagcctctgaaatagagccgaggatggtactcactcacagatgggtgtactcctgagtgagcagatgccacatagctgggtcccaaagccaaggttagagccccttcctgactcctggtgcagctgagtgtccattgtacctttctgtagcacctgcatgacagcagctgcccgctagagggggctcctgtggttacagggagcagtcctttcaggaggaacctggataagggcactgtgcaagctctttcgctcacatgcttgcttgtatatgttgtgtgttcccttcatacgtgatgaaacccaggcatgtaggtgactttctctaggtcattggctccatccctggcggtgagattcgggcgggctgtgtgttttggctagtccccactgctccctgcggggagtgagtgatgtgcatcagactgcatcygactgtttctcttttcaggcttcaagcactttcctgaagcggggattcattatccagacagtaccacaggagatgggaagcccctcgccaccgactataatggcaactgtagtttggagaaattttacgatgatccgagaagcaatgatggcaacagttaccgcctgcagtcctggttgtacagcagtcgcctgctgcagtactcagatgccttggagcacttgctgaccacaggtgcagtatttctgggcagttagatctgttctgtacttgaacactattctagaattcaaccacgttaaattgccactgagtcgagctttcctttaagggtgtttgatgaggtgagttctgtctttccaacaagatcatgaatttcttgagattgtgttatttttgcttcagaattaatttaatgctgtttcactatggatactggagtgagatttatggattgtatagaattctcaaggcactactttaagcttctatacttacatattcatttatatatgaaatgtgtcaaaacaaaggggtaaagagagcacagaagtgtccaggaggaaacgggatcacacttatgaagactgtgcatgtgccatgcagacagagatgtggatgccaacaacatagggttgtcccggagggcccagagataggccggaatcaccataaagccacgaggcagacgtgaatcttgataagatgacggggggaggcagaacacacagggtcccataggccagtgcagtaggggaggatgcttcccttgaaggtatccaaagcagaaaggaagagctgtgtactggggagcctgggagacggaaacagggatcagaaagtatagttaggagaggaagggaaggtggatgaaagggcatgaacatggactacttgtgtgcagaatgaggttagggtccagcgacgggttactgtaatcattctgggaaacagcagtgcatgctagacatcctgagagttggaccgcagatgcactgccaatttttggtcaaagctaccatgccacggcggtcctcagttcacaggtagcagcaaatggcacatctgtgtgcggagagagggagatgggtggactcttagggccttcgtgtctgttttatattgcagtgcttgctgctttygttgattggcagtgcccctgatgagcttctcacgcacaagctcagccgccactagggttggcttcatggggtctgagccgtgagaacaagaatgtggttttcactgggagtggccggctcacaggcttcttctcagagctgagctaggagccgctgcctatgctccttcaggtctccacggatgcagtgtgtgtccatgacacgtatctacacagttgtacggtggtggagttattgtcttgctttgaaaaagttgaaaacattttattagtgcttctttttttcttatatgaacgtaaaccctgatcttggttagtgttactcctaagaaaacaatgtggtctgctgtttctggtttgaggttctttaccaggagccaatccaggagctgatgtcgtagcgtggacttcacactgacatccaggcttactccacgttctttttttttttttttttttttttttttttttgagacggagtctcgctctgtcgcccaggctggagtgcagtggcgggatctcggctcactgcaagctccgcctcccgggttcatgccattctcctgcctcagcctcccaagtagctgggactacaggcgcccgccactacgcccggctaatttttttgtatttttagtagagacggggtttcaccgttttagccgggatggtctcgatctcctgacctcgtgatccgcccgcctcggcctcccaaagtgctgggattacaggcgtgagccaccgcgcccggcctccacgttctttttaaagcattcttcaaccctgtcttctgactactcatttcttaaaatgaaaaagaaacattttacttgttaaataaagccttgctttttttggtgctatagtaacctatttcccatttagaaaaaaaaagtgcagcttgctcccatctcagtattcttggggcaaattggaactgggttaacgtattcattaaatatttagtgcatgtctgctgtgtgccagacccattctgggagctaagggcgccacagggagggaagcctgtgttttagtagagggatgaagactcgatgtggaaacaggaatgtcttgccccaagtgagtggtggctgctctgaggaaggaggctgtggggagaggctgggtaggaagattaggggaggcctctgcccagacacagcagggctgactgcaaggaggctggctggggaccctggggactagtgctctgagctgcacaagtgtccgtcggggctgctgtgatagtaacacagccagtgaggctgggagtggacagaggtgaggttgagaagtagcccaacatcagtagatctgactggaatggtgggggcaggagcaggatgggggtgggcactgtaggggtggaatacgttatttaaaaacaagcactttttgtattaaccggatgctttctgttatagctgacttaatgaaacgatgttatattgctcaaaactgaaaagatacttcagtttttgaaaatggtttcccacttacaaatatgtctatgttcttttcagtattttggtgtggaaatggaattgtaaatgattgttattttcttttctctgraatgcagtgatcagttgacagtgctttgctatctgtctgattttcaatttctgtttgcctatgtttaaacaggacaaggtgttgtgttggagcgctccatcttcagtgactttgtgttcctggaggcgatgtacaaccagggattcatccgaaagcagtgtgagtcagcattgcagacccacttctgggtgtgtggtgcgactttgcaagggctgtgatagactcaccttgcacttactgtgtttatgaatgtctgttagatagatgaataaatgccattacttaatcggtctccgctggaaaaaggaacttcctaagtatcttccaycctttctccctcctgaaataggtgtcttttgtgctgtcatgtctccctgtgaaagcagattggagcyctggacctcaaacacacgcagcttaaagtgcagcccccacagcctcccgttagaacctcccccgctcttagcttgccctagcaatacctaggctgtagctctaattgtaacagactttccagtttctagtgtgtgattttgatgaattgggatgttagccctgccagttgccagcatcatcacagtgcttccctctgacacgctgccgtttttcaggacagtagctttgtgttgctgtattggggaaggtctgacaagtggcaaatggaaaggaacaaagaccccctggtttgaagcaggctgaccttgaggagtcagggtggggttggggtgtctgtgactaggactgtgttgggcggtgggttgaataggcctggtggacagtctgactgacggcattttcatctgtagactggggtggctggagccagtggaaagctggaatctgggagctcagaggaagtactgttgattaatgaaagaggaggccgaagcaagccaggtgaccattctgtggaggaggcgcctgcttctggctgcttgtgtgtcctggtgttgccggtactccacctgtgagcttgccgcccgcaagagcactgcaagcccgtgcttctgataggggctgatcctccctggacatgctgagcagcgggtcaggtcaccagcaagtgtttctggagtgcctgtggtgtggcaggctctcttaggtgctagggatatgaatatgaagaaacttaagacaaggctcccaygggcccggggttgggggctgttgaaccaatggggatggttcattgtaataaagtgtacttagcactcctgagcattactcctgggtgctttgggggcacataggagaaatgtgtaaccggctgggagatgggatagtgtcagggacagctgttttgatgaatggcctgtcatctgtagcgcagtgggagtgagggacgtgtggggatggtggagaagcctgcgtgtgccacaggctggtggtggtgtcctatagtgagggctgggtgctgggggagaatgatgctggatgaggctgcacgaggaaggagctgcgcctcggcgaggatgcttggcttctgtcctgaaactagtgagggaccactggaggatttttagcatggcagagacatggttagatgtgagtttaaaatggttgcaggccttcatctgaaggatgcatttggtgaggagagacggaaggggaaggagcctatctgggaggaaattggggtgggacaggcgtgcacagcagggaggctgcactgggcagtgggagttgccgctcaggagggacactgggcaggcctgggtgggtggtttcctgtgtgcacagtggggagtggcgtggacctgccctggctagtgggccgctaagggggaaggatgcacaggggcagtggaccgatgtggcttcatgtttgggcgttggattcctgagtgtgaggttcccatggcaaggtggcaggagatacctgtcggcatctgctgagtgtytgctgaagtctgaggactggcctgggctggagtctgcaggcgttgggggtccagcactgaccgtgagcatgctttccttgggaaagcccaaggggtgatgggggagggctgagaccagatcctttggggaccatttctggggtgatgagacccccactgagggattgaagctgaatgatcagaggtgcacaggaggaagcagaggggatgtggggagggttggttgttggtgtcacatgtgctgtgactctgatgggaactgagaagtgactgtcacgtttcacctttcgggggctggtgatgttagccagagtcgtttgagtgctgggctgggggaaagcagatcatgttggctaaaggacaggtggcatagagcaaggtggggaccacctgagaagtgggtgtactgacaggagtaagggtgagggtgggaagcagggtgagagcagactcggtgaagggaggtttcacctcagcagcaggagagaccggcctgctaccggtccagcagtcaggaagcagacccgaggtcccgtgtgctctgcctggctgcgggtttgtgtttgtatgctcaggtgaacggtactccactggcagcctccgtcctttgctttgtcacacctcctcctgggtggtcttccttgttctttagctcgtgccgttcctgaccctgagccaaaggctcatcccacagttgcctctagagtgaggttactaggaatgctcactggaacttttttttttaatttaatttttaaaatttttatttatttattttgagactaggttaggagactggctaatgtttgtatttttggtagacatgggatttcaccatgctgctcaggctggtcctgaactcctgggctccagtgatctgcgcccacctcggcctcccaaagtgccaggatgacaggcgtgagccactgtgcccagcccatttcctttaaagcaaaatagttgtctttctgtggaccctagcatggccatctgtcacttctggaaggttccacacgtgaaaagctgcagaggggatggcttctcagcatggcctctccacatgcactggcgtgcactctctgttggcttctgggaggtcgggtgtgcatgagcatgtgcaggtgcagagtgctctgaagagcggcagggttcccttgggtggcacgggccctgcgggtgccccctggattatgcattctgtgtagtgatcactttaggagaattattcctcagccttagctgctttcaatttcatkttgtcactaaatctgactcagtagatacttctgtgcagctgattatactactgaamcgggataaatgyagcttgatgattttcagctgagttatttgaaaaataaagtatttaaagctgttctttattcttcagagaagaccagactcttgtatctattattactgtgaagaaatatagtagcatgtatactatatacctgcaacatatatactgcaagtatatggaatatatttcagttcaaagatcactgaactgtgacctccatcttgcgtgacctacgtcttgcctcaggagcaaaagtgaacccttaaatgtggctaagatgtgctaaagatctgtcttttaggatgattaaggtcacagtttaaatgctgctrttttactctgtgtaagtagcttaatttctctgggcctcagacctttggtttgtaaatacagtggaggcgacaagccctgttttcagggttgtgggcaccacagctgctgtctgcacatgccccgtggcacctggagcacagtcacatgccatgtgtgtggtcagtgcttagaactgtgaccgagatagggtttgtagattggtacgtggctttgagaattgcgtgtatgtttgcccttttattcaaggaggagtgtgttttggaaacccgtgtggggactggtaggtgacagcgcccctttctcctatgtgccaggtgtggaccactacaacgaggtgaagagcgtcaccatctgcgattacctgcccccccacctggtgatttacatcgatgtgcccgttccagaggtccagaggcggattcagaagaaaggagatgtaatgcagttttcaatcaaaggccaagcatctctattttgaatgnagatcagcactaaaagccctgttttaatagyatttatactaattcctaccagtcctcacgaggagggtgacacacaccctgttcccacttgagagagggcatctkcaggggtggaggggagaccccatggctcggcctggtgccacagcctgcgggcctgccgcccaccagtgctctgcggtcccactgtggtccccgagtcccctcagctgtttaaacttgggaggctggtgagggcctcctggcagagcgtcctccatccctctgtcacgtacctttctgttctctgatgaggtttttgtgtcctatcgttttcttccacattggaagcaatttctaatatccctcatcacttcaatctatttaacgcaaatcgtgcctctccccctttttcttacttaccaattctagaacagtagagcagtgatatccacacacatccatttactctttgtagttttcattggatcttaattaggtggcctcgaagcaacgccttttgaagtgaccctgtggccgttggtagctctgttggcggcttgatggaggatcctgagatgaaacaaagaccgtctttgccctgtggcgagttctttgttttttttttttgagacagagtctcgctctgtcacccaggctggagtgcagtggcacgatctcggctcactgcaagctccgcctcccgggttcacgccattctcctgcctcagcctcccaagtagctgggactacaggyrcacgccaccatgcccggctaatttttttgtatttttagtagagacggggtttcactgcttgtttaatactatgttattttttcctggaggagaatatggtctcctttttgatactgtgatgaaaatgcagggctacctgcctgttcctcactctgatgcccatcctcagtgccggaattcttgtaggtgctcaggaaatacctctctggatggtgggttcttgtcagggcaacagtaaagctctggttattttttgctgctcctgaaagatccatgggactaactttccttctctgttgcaatagtagaaacagcgagatgtctatgtatgcctttctattgccactctggaacttttattgtttaagcatatgcttgtaagtatgttgtatagctagacttctaagaaccttccatcaagtggcaaaaggagggaactgcaagttcaaaatgtttgtttctcagtggactaactggacacctttgcttattatgctgacatttattgagaaaaacaaagtcatacatttaacattctctagataattcttttgttatctgggaaaacagtatttcaaaaataattctgaggtctaaagtagagctgtcaacttcttaatttttccaagtaaagtcttcaatactgtcatcaggtaaaattaccccattttataaaagacatcacattatcagtaagtctgtgttcttattttgatttttatttcaatgcagtctgtgtctcagtattgcaccttttgggaataactgataggaatatccgaaaaccatttctagattctaagaaaacagtcaaagtgatcaataactacatattttatcaagtaacttcaggtcagatttctgagatggttgtgttatgttgcatgttatgggcttatattacactagagtttcttttataatcagttaacatttaatcttattctacttggcacatagctaatgatagagatttagaatcatatcacctcttttatacttttgttgatttcactcactcctctaatacagagcacctcctatatgcaaggcgcctgtgccaggcacctaggaggctgcaaagatgaacaaagatggtctctgcccagacaccaagtccttattggaaaatagaactcccaattactgcctttcccccttttgacagagcaatgaagtgcagcattgcctgtatcatcctttccctgtgccccgtcgcattactggaattaatacatgttcagtaaatattctttgaatgatagggtttttcttattttgaacagctttaatgaggtataatttatgctccataaaattcacccattttaagggtacgactgaatgattttgggtaaatttaccaagttrttgccactcttgccataatccagttttagaatgttttcatcattttgtaggttgaaaccgcaggcctattcatttctttcttccttcctctctctcctgtaagtgttgattgagcatccaccctgtcctagaccctgcttggtgctagggacataccagtgagcagggtggatgaggtcctcacccgtgagctcatatgctgatgggggagacctacagcaagcaaggagataaataaatacatcaaatagaggtaaatgatgtgaagaaaacaaaacgggctgagaagatagtgtgagactgtaaggagttttaaattttaaaacttgctactcataattagatattcaagtttctgaaattcgcatagtgcatttcagatgatgagagaggtgacarccgtagaaagtgggagaagtggttgcggggagatgggtgagcgatggaggtggcgagcaagttggagagatgcagggagagtcaggtgacaagaagagagtgtgctgaggacagatggcggacagacaggccgctgcccccaatttttggtgctctttcattcctgcactcaggcacgaggcagacaggaaagacaggcagtgctgcttcgtaacaggcatctttcttgccctaagtatacatcttagaatgtgtggagaaagtcacgctatgggagcacttgggcaggctcaggtgttcactgtagtagaaggagaatgactctagctgatgttgggaccctttgctgtcaccccgcagtccccacagtgcccggtgtgagttgtaagaaaatggtggtcagtgattgtcttcgcattttatatacgcacaggtcaaagagaatgaactctaaatgtttcccagtttgrtttttctgcttctgtttagccacatgaaatgaagatcacctctgcctatctacaggacattragaatgcctataagaaaacctttctccctgagatgaggtgagccaaacacacgactgatttacagggctaaaacttcttcgccactcgtttcttaggccccaacagcccagggagttttctgtcttatttactgcagtggatattgtctgagatgtttaatctgatgtttataaataagaaaaacaggagacatttcagtttgatttttgtggggtttattggtttatttgttttggtttgcttatcttgtcagtacttttgctctgctatatttctgaagttttttgatgctagaagtaaaccaagctctattccatgacaggttttaccatagagaacttgtgtatttttacttcaggtggcaactaaacattcgtgtttacctagaaggattgattggaagtgtattcatggagaaaattcatgaaagataacactttctctagacattcttaattgatgtccttgagagatgtttggattagatgaaggaaacaccaccagactgtttttctttcttttccccctttctttctttgttgaaagcacatggaaaatgtggtttcactcatcctatggcttgtcattctgcgctccttgggtatattcgtgtgtaaggaatgtctgccacactcattcacgtccagttaaactcagattgtttgaataatgcttgaattgaagatttttatactatttctcatactttttaaaaccctaagcctctttcggtgcctaaaaatctcatgttcttgttgtttaaaatttcaaagtaactgaagttgtgaataaaaacaaaagtatagcaattttagaaaaaaagttttatttttacatttattttagttaaatactgaatatttacaatgaacagccttagaagataatattgttagaccataggtaataataaaatcaaaagtgaataagagaaatgttctattcagggagttttttctgtaccgtaagtattaacgtttatgtcatctctgcttgtttgtggtgagcgtttctttcttaggtggtaagaagactgggtggcctctggcttccttttaacctgttgtactgccctatttccaaggccacaataccaagggaagtatctagagccaacgtgaataaacagcataaacagagatagttgaccctagagtttcaggctcaaaaattactcttggagatcttctggcttcaaaaacatcactgagaaagagctttgtcataatttctcaaatggagtttctagctacaacatcagcaaaataatggctggtttcagcctgtgcacagggcaagagtttcttttactttgccgccctcatagactsgttaagcctcaagcatttatttcttaccacttggtcttgctgtgtttttaactcctgttttaggaacagatacagtctctgttcattgttaaagtagatcttatctgacagctcaagccgtatggattgatgggagccacttgatgtaggggtcatttgtcacacattgaagaakgagtaccagatgtactctatgcagtatgcattattttaagtgctgaattgtagaccaagatcaaactgcagctttgtgatggacttggatcttaaaagttttctcatagaaattcactatgaaatttggctgaaactattttttgtaaaattgcaagaaacctatgacgagttgtattttaaaatttattggccattagcattttagaattcaggagttattttccaacagaaacaatattaggtttcccgggcttgtatatttaaaccattgtttagttaaatactgaatatttttattgttagatcttaggttagaccttagaagacaatattgttagatcatagataattaataaacagtaaaatcaaaactaaataagagaaatgtttttagttttaatactagtatttgaaataaagcagattgacctgacaagatgatggctccgttgaagttctgtgtctcctgtctttgagcagttcctcctgtgttagcccttctctctgtcacgtgctgatacatggtgatgcttcactgtttttgtatttgttgcttatgaatgcataaagagcattgcagccttttccaaaatatttgtattgtgggattttaagaggtacaatgagctaactctcataggaatgtgtattttctggctttgtcaatatttatgacccagatcttaggcgtacatgtctttctcctcattaccttaattgtgaatgtgttaatgagtatcaacttagtttcaccaacatttggccattcccgygttcaacatatacttatttactcagctccaacactgctagctcccagtgtcagtgttagctgagacacagaggtacacaagacagrgtagggaaggcctttctgagaaagaatcgtcacctctgagatttcagagacaagaagaggagcactgagtgaccagcctgacatgtagcgagttttgtaactgtctttattgtttcagattgttctaaggtgggtgaggagctggggaggctctggaagtattgaaataacttgggggttcagtaatacagcttgtggctctcctcggccctgagctacctataggaataaccaccattgaggttgcacgtgaactgctggcccagccctttatgggggtttcctccagatccctgactccacacttgataccttcttattttaggcctcctttcacaaggcagtgggaatgagaggcaggtgtgactggacggaggcggttttatttgtctgttgccgaggttgttagcatgctgaatggaggcgcacagaagatagaaaatggactctccaggttgctctcatcaggtagtttggggtctggagctcattaagggcaggagccctgtcttccccaccttccataccccacacagcacctggctcctggtggggcttcagctaatgtctgttcagttatgtgtgttgaacgaaactgtcacatcgtcctgatctctcatgaccactcttgtgcaaatrtgtcaaatagtttgtgacctttcatattgctgtgtgagaacaaataatgtttctgtgccagccctgttcatcagggatgtttaagacctctgtctcctatacacttcagttgaatattcacttaggtgacttgcagagggaattattctcctttgtcactttgtgcctttctcttcgtattaacaatgggtagctgtagaggttcaggaagcaatacagcaagtcctgtaattagtgtggccttttccttgccagccctaatggcaaatgcagtaagttactttcctcactatggatttattgttcattctgcttgcagtttctgaccatttatgttgatcttaagggtgctgtgaggagtgcagtgatctcgttgcagtaagaatctgttatccagttgtatgactctgaattgtgagttatagacttgtgtggaacagatgtgttactgagtgattgtagagcttgaagacttttttctttttcctacactttggaagtgatgtgagtcagtaatgatgagacttaataaaatacaagcactttacctgtactacgtaatttaatcaaccagtggtctgttgaagatggtcagcagagttggtgaagtttgtttggtaccattgtaggggtcagatgctgatttcagtatgagaataaatagcttgtacattcttggagtatttacttaccctgtatgtttacatcctaaatgtgtggagggtgctctggtgtaaagatgccctctgtgcctgtgctcatttaggccctgctgtggagggtgctgtggtgtaaagatgccctctgcctgtgctcggttaggccctgggctgtggagggtgctctggtgtaaagatgccttctgcctgtgctcggttaggccctgggcttcgttgtccttccgtgcagcgggcactgcctttggcgatggtatgtgcagctgctgacrtggctcatgtaccttgctcctgtggacagtgatggctgtggtctgtcaygcccttggcttgggggcagtgtagtcaggagaagggaaacgaggaaatggtcctgctgttgtcactgtcaagccakccatgagaacattctggcttttaacatgtcctcctgaaccagtcaagctctaatgcaccctcacatgcccagcacaatgcccagtgcagagaatgtgaggttttaaatttgagcaggagactttagcggtatgtattcatttgtacatttaacttcagcttggaaaagtttacactgaatttcatcttgtttttycttacagtgaaaaatgtgaggttttacartattctgcaagggaagctcaagattcaaaaaaggtaagaaaatggttgaaaagttgaaagttattcctacatttgattcatgtgtaaggttcttgcaaatcagatcgtcagttagattcccactggtcttaacaaacatcactgttttatcaccygaaagcagtgccagtcaaacccatcatcacactcccctggccatgaggtttcgagtttctttcaagtaattcggtttctacgatctgaaaattacagatgtcacagaatcttgggtcatccactctaccatttttattaaagagatggaaaattgaaagttggattagttaatgggaaagatttacatgtaaagataacagttttccttaaattmgtgtgttttgtgaaagtctagtaaatcttggtgtagttttcagggaactttatgaataacagccagacaaacattaaaacatctgaagaagaataacgaaagaacatttgccctctcacatacaaaaacaaactatacgattgtagtaaggagagcattgtggtgttaatgcaagaattaataaagagcttaatggaacaaaacaagagtccagaaacatgtatgcacctgtgtgtaagtatcttcagtttggcaaagttagttccttaaaggataattayaaaaatgaagtagaggaaaattgtttcctaaatggtactgaggcaactgagcatccatttgttaaaaaacaagttttttattttgtattttatatattaagcataaattactaaaaacaaaacgaggtgtaacaattctagaagaaaatacaagtttyaggatctggtcttgaagtgtgagtggtgcccgtgtaacagagaagctttgcatagttggctgctggggtgacaagcgtgcttcagttgcctctcagcattgggagggtgagaagagggaggttgactgagcttttctgcacagagagtagcattctccttgcagagggaagccctgcattctcgcccaggctctcctactaccagttgtaaagttcttttgagaccttggtttattctactcagactgattaaattacatttcattttctcctccgccttctgtttctgtttttagagtatttatatacctttgagagactgtttaggtggcatgtatcttagaagaagaataatacgttttgtctccaatactatgttatttgagttcatttttgaatttactcaaattcccgaaactaaagagggttcatgagtttggcctgttgtgaggagagaatgcgtatggaaagattactcctctggaaagtcagactgtgtagacagccagccttgaggccgggcacctagatcattaggtctctctaggtaatgggtttgtatcttattcttttgtcattttgaggggctaggttttgccttttagaaggaacttacttgggaagaaatgagtagcctgtcctgaaggctgatttttctcccctagtcttcattgttctcacctgtccttttctcccagcctgcagggtaatgtctgtcctacttgatccctgagtgttagctaggcaaggccatactgtgatgcaacactcaaccccaccatttcattaaaggtcagccagcttcacttccattctgactgttacggtgtgattcttcctgccaaatattcatagcttataatgtattaaaatgttacctcttggccagccatggtggctcacgtctataatcccagcactttgggaggctgaggcaggaggatygcttgagcccaggagtttgagaccagcctgggcaacrtggtgagaccccatctctactaaaaatacaaacatcagccaggtgtggtggcatatgcctgtagtcccagcaactcgggaggctgaggtgctgaggtgggaggattgcttgagcccagcaggccaaggctgcagtgtgctgtgattgtgccactactttccagcctggatgatagagccggaccctgtctcaaaaaaaagttatttcatttaaatttctaaaatggggttctctgtttaaattggaatttttcctgtcttaggtggtagaggacattgaatacctgaagttcgataaagggccgtggctcaagcaggacaatcgcactttataccacctgcgattactgtaagtgcatctgtgtgggggctgctgcatgtctggggtctacttgcatgatggggaaacttagggaagtttgaaataattatgtttcaagttaggtgttagcagcaccaacccaatacttagaggtattttttcttccaaacagctcctgaatcccctggtctgatacttaatttattgagtgccattattratttaacaggcattttgcttccactatgtgcaacaccgttccagatttaagagatatagtgtcagataaaattcttgatgtctttgaaaatgtgttttagtaggtgagacagagtaaacaaatagataaaactgcgtcaggtcacaaaggccagggagagaagtaaccctgagtaacagggtggtgagtagctaggggtgacaaagggcctctctcgggatgaggcytaagtgaggccaggattgggtcctgtgggccgtggggtgagcagagggcaggggcttggcaggtgcagaggctcttcaggcaggagtgtggtgggaaggtgcgcccagcagccaagccagtgtggccagaaaaagtgtggggaggggaggccacagcggaatggagcaggactaggagaggaggccatggcggaatggggcaggactaggaggggaggccgcggtggaagagggcaggactaggaagggaggccactgcagaagggggtaggtcttggtgcgtttggtgggttttcttctgatgagatgagatgccgtttgggggtttgaagcagaggagtaatacgatatgacttatatccattcagctattgtgtggattctttggtatctattaaatgaaaaacaaaaaccataccgattaggtaaggttgaaaaaagctgtcttcatctgcaccactctattgaaactgctcctgccaaggagacggcctcgccattccagatgcggcagacccttgtctgtcttcatgctgctccctggccctggaagcagcaccgctgcccctcttctccactcccttctcctggttccatgccctcctcctcccccactctctcactcctccaccagctgctgccttctggggccgggctctctttttctggttccttctgcctgctgctgggctctggcaggcacagtgaccccgggcagtgtctcgtccgttgaattcagtttcttgaggacgtacctagtcacacagctgtggatagcgtggataccaccgtaggtcttggcccagacctttaccctgcacacccagcaaatatccctcggctgcctcttgcagtgtctctgtgcattgaccttcccaccggtgatccccagctctgcctcttctgtcctggctggtgctggccacccgggaatctcatcctgcttgggtctgtcctccaccacccaccccctgctgcttctcatcactgcaacgcccagttcctggtacaggcctcatatccagcgtgcactcaggagatgtatctggagtgagtgactttgatttcttttagggctataaattctacaaaattcagagatgattttgtaatgagaagtgctgttgtatcataattctgattatttataaatcaagattggagtaatttgagggtctttgacttgtgaaaatgcaggaaacatgagtagctatttggggatctgccttttgtgttaagtctcgagcccttggcctgagcctgccctgtgctgcttcctgcctctacccaggatgctctgtgcagactgcaccaacactttgcctctcgagggcctggaggcacaaggatggcmggggcactcaacttccctctcctcaacgtttggatgtaaattaggaagttggtgcctacagatggcagctctgttcttggccctgtgatgttggtgttcttaggccgttggtgcttaccttctttctctrcctgatgggatgtgagtgatacagtagtctcctaggatgaccagagggacagctggctcactgcacatgtcactaaaagttcactgatcaaaatgtaaacagaatgtgtaataagtttacttctggccaggcagcgttcacgtctgtaaacccagcacgttgggaagctcaagtgggaggattgctggagccccggagttcgagaccagcctgggcaatatagtgagaccccatctctacaaaaaatttaaaaattatctgggtatggtggtgcatgcctatagtttcagctacttgggaggttaaggtgggagggtcacttgaacctgggaggttgaggctgcaatgagctgtgttcacgccacggtactccagcttgggcgacagagactctgtctctcaaaagaagttcacttctgtttgatgtttttagtacagcattaataagcaaaaaataggtttacattaaaaaaaactagtcattctacttagtttgttaattcctgcccccctgttaaaatagtatttgcaaaatcagttttctagttagtggaatggatactgaagggtgagcraggtaggcacactgtggggtcctcatgtcagactgaggagacgggaagggtcaggtcagcccttagctggctgtgtgacttgggacaagtcactttatctgcctgtgcctccatatgtaagattatggcagtgaggtagagtgctaggccatgtgtattgaaggaaaaaacaaatataaatttcatatattatattccatatactgactactgtataaaatggtgttaatctaaaagtagcttactgaaatgattggctctctagaaagtcttttgaaaggaatctagcaaatcttccattagaaagtaaaacaaacaacaaaaccygctttccttgtcttttttttttttttttttttttttttgagtcagagttttgctcttgttgcccagactggagtgcagtggcgcaatctcagctcactgcaacctctgcctcctggttcaggcgattctcctgcctcagcctcctgagtagatgggattataggcatgcaccactatacccggctaattttttgtatttttagtagagacagggtttcgccatgttgggcagactggtcttgaactcctgacctcaggtgatccacctgcctcggcctccagaagtgctgggattacaggcgggagccactgcgccggccttccttgtctttctgagccattactaggagatggaagtaaagcacaaagcactgcttttggcctctgaataaatattctgcatcctggagacaatggccaarggttacagtgcctactccaggtggacaacacatttcaacctgagggccgtgagtttgctgattgacagggcgaccgaccagaaattagaggggtcctctgaggtgtctgaatgtagaagtttctctgagtcattgaagtcagctgattattccctgtgcagccatttttgttgcaaagtcagtgtgtgctttgctgtgaactgtggcaagggccatcaaacattggtttattccgagtaattttaactttaggacagggatgcgtaggtgatggagaccaagaggagaaaataaaagtatatttctgagaagaaaatgattgttgtaataccagagactcaccatttcatamccaggtcagaaggatcccttgagagggactcagccactcacctgtcactgtgcccctgggcaaggggcctaacctctctgagcctctgtctccttgttgtaaagcaggaagaaaatagaagctacctcataggactgttgtggggattaaatgtgggaataatttgaaaggctcagaaccatgtgtatatatcataagtactaaagttttagggactatgttatgatactgtttatggtatattattatactctgattgtagatgcatgatgtgtttacatttctccattaatatttttgttctttaatactaagctttttttcttttactttttaagtagtatttttctgatcttagaaataatttacattaattatcctcaattcacgcttyatggaaatctacagtgaagttgaacgaacccacctcctaaagacaaccgtgttgaagatgctattcatatttttttctgtgcatgccccagtgcagttgattgttgtaagccagattcccagtgtgccctgccccttggtgggagagctgaccttccgagtgatgtgctcaccacccttgcaggattgagcaccacagggcttagcactgctttgtgtatgtagttctgtgttgcttaacgacagggatatgttctaagaaaggtgtcgttaggcgatttcatcatcgtgaaaacatcatagtgtgtgtttacacaagcgtagatgctataacctgcacacytaggtggtgtggtggagcctgttgctcctaggccataaacctgtacagcatggtacagtactgaatactgttggcagttgtaacacgacggtaagtatttgtgtatctaaacataaaaaataatatggtataaaaggtgaaaatggtccacccgtctggggcatgtaccgtgagtggagctgacgggactggcagttgttctgggtgagtcagtgagtgagtggtgggtgaatgtgaaggtctaggacatcaccgtacactgtggtagactttgtaaacaatgtacaattaggctacactaaatttatataaaaagtttttttcttcagtaagagattaaccttagcttactataactttctttataaacttaaatttttttctttctttatatccttattctagaagtattttctgatttttaaaattatttatttttactttttaaacttttgttgttgttgttgttagttaagatacaaacacagtggcctgggcctacctggagtcgggagcatctgtatcactgtcttccacctccacacctttctcactggaaggccttcacgggcagtaacacgcgtggagctgtcacctcctgtgacaatgatgccttcttctggatgccgcctgaaggacctgcctgaggctgttgtacagttacttttttaaataagtaagatgagtactctaaaaatcacgatgaaatgtctagtatagtaaataacctaaagcagtaacatggtcattgatgagaatatcaggtattctgtactgtacataattgtatgtgctggactcttccacgactggcagtgcagtaggtttgtcaatgccacatcaccgcagacacgggagtcatgcgctgagccacggcgctgtgacagctgctgtgataggaagygttcagctccactagaatcttgtaggaccacattgtatatgtgacctgttgtggatggaaacgccatgctgtgcataactggaaaccggcaggaacctgtcacatggtacaaacaacatgggtttcacaggaaagccacgggaaggctctgttgtgcactctccatcagtataactttgtgaatttgccgtaacatttccattttcccaaaattcagctttagctgcagctgtcaggttcctcgtaggaaacagatggcacatttgaccagagaacagaagagagttacgtaaaggaaccattgataaagagcagggcagggttgagggaagcaacaggatggtgagacacccaggccatccacagtgggaaactggcagttgagggcgggggcactgggttttggagtccagagctgctgctgctgctgctatggaagaggctgtccagcatcagatggagcccgagggggatggggaacccgcatgcagggaaccagcagaacaatcatccacccagctgtgcttgaagtcagagggcagtagagcccctcggatgcaaggagccagcctctgggcacagagcaccttggaggaatggtagagaggagatctaaagggccaggtggaaaacagccccagactgtccacccagagaatgcagaggacggtcggcattcaccgttgttccctgtccagaatgaaaacgtgcatccctacgtgaaacaggggcagccaccatgtcattgtgcggtgatgaccattcatagtcttgagttggtcactgcaggtgtttttcatataaagtagagggagaaagaaacaacctgccacagarttcctggagtccccgcttctgtggtgagttcggagacccaagttcactttggtagcttccttggttcccacagcctcctcccctctgccagcagctcagctccatgtggtccttacctggtgcagcatcctgagcctgtgtgctgtgggttggagccttgggggctccctctgtggtagctgcctatctctgttcagaataagatttatcacagtgaatgaggacagatacgcagacagatcaatacaaaaaaagacatgttggactctggagaaatccatgcacaggctcttcctcctgtgagggacactgacacattgattgagcaactttctcaagcagtgaaaaatacagtaacatatgggcagtatttctgcctggaaagccctttagacactcactgcccgtaatttttactgggggctggtcacgtaggaatcctctgcttcgcaactactcaggttccagactcccagaaagaaggcaggtgttctccataactcccatcgtaccctggtagggctgagtttgctgcccagcctcattagcatggggcactttttagaagctgagtttccagaagccaacmaagggccagcctcgcaaggaggccctgccacagacagcagcataggcctgctctgtgtgtggcgaaggaaaggctttctgagagcgcaagagctgtgcttttggcagaaaaacttcaggcaggggaggcaaatccgaacctaggagatgtggttttttaccttgggcagagcctgggattttaacaggactgaggttttgtaagagaggggcaagggaactgagcacagacaaaatcgcatgtgagtagtggtgaaccatgacgcttagtctgggtaaggaggaaagtgaaggagggaggggtgaggggactgaaatgacaaagtggatgagaggccaaaggcacaccctcttggaagagaaagtcgggaacaaaggttgaatatagaatcaaatcacctgcgcttctgccaccacagtgccaggattaacagttgaatgcaggttcttccagtctttaaatatttgtgtgtgcatatatttctaaatatatcttgtgtgtatttttgtattctacttccaatattttgagcatgttcctgttttgttaaacattttaaaatttgattttttcatggctccccatatatgctgcacttaccattgattgagatgcaaatcagggcttggcaaactgtttggcctgtgggccagatccagccgtcagctgctaagaatgatccttaacgtttttaaaggattggaaggaaaaggaaggattatgtgatggaaactgtatatagctctcaaagcctggtatttgctatccggccatttacagaaaaagttttgacttctccgacactacataatctgcataatttactgtttctttaaaatagatctcttggattatttcagtttcttcatgttcataatacagtaaagagcatgtagtaccccttcttgttcaatttcaggttacttaaggtataaaagtggtcagagtrtatgaacgcattttacagctattgagtttttgcaaaatgattctccggaatatgtgtaccagtattcatacttggacctggttctctgaatttccctataaagaatataattaaacaaaatgcaaacaaaaactttcgattctgatacccatacaagtatttgttttactttgcattttataaacactaaacttcaatttatatttttattggctatttatttgctctttgtgaattttcccttcatatttattaactttttcgaagaaccwggtttttgttttgatgatttatccagttgttttctgttttattgatgtataccctagttttattattttttctctgctttctttaggcttcacttgttctttttctatagattcctaagcttattgactttagatcttttttcttttctaatatagtcagccctttgtatccctgggttccgcatccttggattcaaccaaccttggatcaaaaatatttgggaaaaaagccaataaaaataacacagcaataaaaaaataataaaaatgtaaaaatacagtataacaactatttatatagcatttacattgtattagatattataatactatattattgtattacattgcattaggtattatacatactctagagatgatttaaagcaggggtgtccaatcttttggcttccctgggccacattggaagaagaagaattgtcttggaccacacataaaataacactgacgatagctgatgagttaaaaaaaaaaaaaggcaaaaaaactcacaatgttttaagaaagtttatgaatttatgttgggctgcattcaaagctgccctgggctgaatacagccatgggttggacaagcttcatttaaagtgtgtggggagtgtgtgcatagtttatatgcaaatactgtatgattttatgtaagggacttgagcatcctcagattttggtattagtggtggtctgggaaggaagccctggacaacagaagaatggttgcatatgcatcagtgctgtcagtttccctgtaggtgctgcttttgctgtatcacacaaatgtggataagttgtatttttattttcgttcaaaatgttttaaaaaatattttgagactttttctttgacccacatgttatttagaagtgtgttgtttaatctccaggcatgtagggattttctaggtatctttctgttgttgatttctagtttaattctcttgtggtctgagaatacactgtgtatgatttctctccatttacatttattaaggttttctatggccagtgtttcctatcttgattagtgttccaattcagcttgagaagagtgtagattctgctgttgctggagtgttgtataaatgtcagatcgagccgattgacggtggtattcaagtcatcggtatccttactgattttctctctgctgggtccatcggttactcagagttggggtcatcggtatctttactgattttcyctctgctggatctgttggttactcagagttggggtcatcggtctccttacggattttctctctgctggatctgtcggttactgagagttgggtttaaatttccaacagcgctggatttgtctatttctcccttgggttctattagtttttgcatcatatattttgaggtactgttgttaggtacatagtttattatcttaggttattatcttcttgaagaattggccgctttatcgttatgtaatgcccctctttttcgctgatgtttgtccttgtttgaagtcagctctatctgaatttaatatagccactgcagctttcaattagtgtgggcatggtgtgtcttttttcctcttctatctcgagtctttagttttcttgtagatagtaagtagtaattgggtcttgtgttttaatctactctgacagtctctgtcttttaattgctgtatttggaccattcatgttagaagtgagcgtgaagataatcaagttccattttaccatgcttttccctgttttctgtttgctgcatttgttgtttctccctgcctctttttctgccttctctggatttcattgagcattttataagattctcttttatcttttcccttaacatcttgattgtactttaaaaaaatgtttgtagtggttgctgtggagtttccagtatacatttacaacccatctaggtctacttcgtgatggtgctgctgctccatggggctgcaggtaccgacggcacagtcttcttggctcctcctgctgtcactgtgacatggctgccattccttccacttttttttttctttgagacagggtcttgctctgttgcccatcgcccaggctgcagtggcatgatcttggctcactgcagcctccccttcctgggttccagcagttcttatgtatcagcctcccaagtagctgatactacaggcgtgcaccaccacacctggctaatttttgtatttttagtaggaatggggttttgccatgttgcccacctagtcacaaactcctaatctcaagtgatctgcctgccctggcctcccaaagtgctgagattacagacatgagtcgccgcacccggcctcttccactttttataagctataaaatcactcaattcattgttgctgttagtccaggaaaggccattgattttcagttttttcttattggaaggatggaaattacagcttccagccttcaccctttggagctgaagctggaagttccctstttgttttttaaaactctgttaacattttggactagatgcctatatttgtgtgtgtgtttgtaaatttacctaaatgatatactctattattcaaaactttgctttaaaaaacctccaccttctctttaaactgctctattgcagcggtcccaaacctttttggcaccagggaccggtttcatggaaggcagtttttacacagactggggcggggatgggtggatggtttcagcatgattcaagtgcgttacatttattgggtactttatttctcttattattacattcttatatataatgaaataattctacaactcaccatgatgtaaaatcagtgggagccctgagcttgttttcctgcaactagatggtcccatctgggggtgatgggagacagtgacagatcatcaggcattagattctcataaggagtgtgcaaactagatcccttgtatgcacagttcacaatagggtttgtgctcctgtgagaatctcatgctgcsctggtctgacagcaggtggagctcaggcagtaatgcgagcaggggaatcggctataaatacagatgaagcttcactggcttgcttgctcacctcctgctgtgtggccaggttcctaacaggttgcagaggtttgtggcccggaggctggggacaggaccctgctgaaccgtgttttgctgttatgtctgaaatctcatagttaacagtagatgtcaacacagcgtctggaaggtgtttcggaaataatttgtctgttccacagcacttctgtggggcgggactccctcattttacaaggaggagaccatgactcgagagctcgagcctgccaaggttgtgtgactgtgtggggcrtctcacctctcgggctgcaggagctagagctgctgctctctgcatcctctgtgtggtcctgtgccctgggccatcttgccttccctcctgccrtctgttcaggcttgaatcctggtggaacctttgactcctctgtcaaccataatcctagcttgaaccytcctttttccctgctgacccccttatcctccccaaagtcacaccctgcaggtcagtgtgccactttcagtgacttctctcccttgtctctaacactgctgctccccttggtgtgtaatcccctggttcttggtctctgctcctctgcctctttatttcttcatcccactcccaccaggtttatttttttaaaaagtcacagtgaccctgttttctctttacttgaatctttgagtggcctatcttcatttagtcataggtctgaatttcctttcccagaattaattcagaatcccagtctgccctggttctgcgtcttctaccaggataccaggcaatctgccaggcccttcttccaccaccacctgcccagtagttacctagaaatcctagcagtctttaaagcttggacgtaatcacccttttttctccctgacaccttcccttaactcttgtaggctgttacttatatgaatgtatatggtatccttgtttgttagtattagctactgctgggcatcatatgacatctaacaaacttacggagacaagggattgtgtctgacttgacctccctgtggtaacagtgtcattttctaaacacagtgtgaaatgtgtgttggttcgattctgcaccattcatgtagttatttagttatgtgcttatcggagcatagagaaggatcctgtaattcccccatagtgtatcaattatagcattccgttgttttaatctagctcactatgaatggctttgtccttttttctcctggtattttgcctttcttcctccccaaagatgtttcataagtttacaatatcaattgtgtttattttcatttgagtaccatttctcaattgagggactcaagtgataattatgaccaattttctaacataattattgtaaacatgycgcttaccagtgacattcattttatccataacctgaccaaattattggtttagaacatttctgcaccatctcagttacgtgttgccagtgtctaattatgtgtatgtgtatagctatgcttgtgctgagaggcagtaattgtatttttcagtcttgttcatatccacatccctaactgactggcgcctgcttgggctggtttcagtccagtcaggacctccgaggacacgtcaggcctccagctgtgcaagctcctctcagaccatccctgcttctccagagcccagaccttcacacccaccttctttttgcttaattgccaagatttttacatgactcctggagcacgtctttttaacatgaaatttcagtgctacagaaactgtagcatgtgagtttggtttcagaagtacagtgtttcagatagaactttgcaattcaggagaaactgaaaaatagggtttggaaatgttataggacaaagtgttgacattcagttaattgggaaacagcttgagtcataaaacactatttacaattttattcttttttctgtgttcctgccttactcttgttttaaaatacgtgtcccagcacctcatattgtaaccaagctctagtatattttatattcttctttagacagtgacttatgatattaaaaggatatattatcctcaatcagttttgaattcttcttaatgaaactaagtgctttgtgaagagaatattttctttcactgccttttgcttcctgagtcataaaatgattccttgtatctttatttcttacttaaatctaggagtttactggagatataccatggactcttcctagtagtcatcattaagctcatagtaataaattgaaagggtagtttggttaggtataaataaattgtagaatcattgcaacagattctttttttaatcttcaaaaatagtttgaagcctacttgttaaaagattttccgggactacatgtaatgttgccaaattaagcatagatggcgctgttgctctctatactacacatggtccaggccactgattgctttcgcattttctagcattttcttaggtttttcaaactgtaaagagaaccatgtcacctccctacattgatatttgttaacatttaaaatatgaacttcatttttagttggaatttcttattgtgagatcacttcaaaaattatccttatatttgtgttaacagtaagaagatacgtacttgtagattattgacacatgcatggaagtgtttagatagaatgcataaggaaagctagcagcagtttcctctggagagggaacttgtagtcttacaattaatgcagtcttacaaaatacagcaactttatgcccttcacaaactttctgttttgcttgcttgagtttttaaaaaatatttgcatatcttttggcaagtaaaaccaacttaatagtaaaactaagaaaacgatcttatctgtaagtatgtacattacagccatttgcctacccatgtggaaacgcacataaatacacttaggaaagcaaacgatcattgttatcctggcagcagtttcttggaggggcatttgcattattggatcactaaccgtgtatgagcgacgcggtttttactaggacgctcctgacgctatacctaccgtccactcatcttcagcttgccgcaggttcgcagctctgtggctgtctgtggaagcatgattcatggatcccgtgagccttgggttctggtcaggttgttctgtttgtgggagagcctacctgggtactgtggggaacaggccgtgggtttgctcagtgggcctggactgtctcacaaagtctggccgagagccagatacactcacataatttccatttgagccattacaaatgagaaacgtctcctgcttttataactcagtaatgggaatgtgactgttgaaaataattattttctttgttttgagcccttaagaaaagagactttattttaatgtttttttttccaaaagctgaaaaaatgctttttaaaaatctttaagtatagtggttatattcagactatatttaatttaaaataagcaaattgtaacaaagtataaatattttaacattcagcaaaatgaaatgataaagctaagagactatcctatgatttgtatatttattggtgccaagaaaagtggagaattagaccttttacaagccgtggtacaacagaccatcctatgttggcctcagcatacagaacagagcagtaagacgctggctgcaaccccagagggactgaagctactcaccgttcctgccccaagatccactcatctggaaaattgttaatgggggcatgctttgtgtgtagcactgtcatgtaaccatttgcttctagctttttgttcctgctattcctgtgtttaaagcacactttgcctcctttttctatgtctccaaaacagcatccattcccagaaggtcgtcctatgtaggtactgaggcttttaaaagatgctacctcaggttctgagagtaatattaaaaagcagctccagatcgaccatgtggtctttgggaggaaggctttgctgctgggatgattgcttggcaacgaatagcatttattgggatatatagattttttatatggatgtttaaaaaaaatcggacttacacttcttttattgtatttattttgatggtttggtgtgatccacatgtgtcttattttttagggttcaggataagtttgaggtgctgaattacacaagcattcctatctttctcccggaagtcaccattggagctcatcagactgaccgtgtcttacatcagttcagagaggtaagactgtggaaatggagaaagctggccrgtggatgagtctgcagcacctggggacaatgcagtcacttctccagaaaggagtttttgttgttgctgtgttttgtttgttttagtgaaggagcctctttttcattgaaataattctcccttttccccgtatttctgtgtggaaagctgatgaagtcctcagatgacagccccagagcagagatgttcttctggaaggttcttcatcaggcatattatcttgataggagaacactctgttcatcagctgttatgtcagtttctttactgtcagatgttacttctggtattttcttactctttgtctgtaaataatgagggttccatttctgcagaaggcccttaggccatatgggaggacatagggagggcaggcagagcttgggacagacagcgagggtggaagttggtaggggcaactgtgtcattgatcttcttatccaattgccataccttcttagtgagttatttgttctggcaagattccattaggttcgaggcgtgtgtaagtttcgctgggaaccagcgggtgagttgcagcctgcactgcaaatcccaatgtcagtggactgggaagagcacgatccatatccgcggcagtggtggctgtggtttgttatgggtaaaagtgaaatagttgtattaaatcagaactccaagctatgccttcaacatgtagatgagttgaaatctaaatctttttgcattactataattgtctgagttgatatgagcaaattgcctgaagcacccactgaaagtctgagtagatccccttgcttgctttcttactctacttggcattttcttttaagtaaattttttggattgttttggaagtggttttattcagtgtgaggatttggggaaaacacataaaaccataaagatatctctcagaggcacctgcggttaataatctgtgttcacctccttctgtctttgtacacgtgtgtgagtgtgtgtgctgtttctccctttgtccttgtatacttgtgtgagtgcgcgtgctgtttctcccttatctgtccttgtacacgtgtgtgagtgtgtgctgtttctccctttctgtccttgtacacttgtgtgtgtgtgctgtttctccctttctgtccttgtacacgtgtgtgagtgtgtgtgctgtgtctccctttctgtccttgtacacgtgtgtgagtgtgtgtgctgtgtctccctttctgtccttgtacacgtgtgtgagtgcatgtgctgtttctccctctttgagtggggctctgcggatttgctgcttccctggcatcaacgctgtagctggtgctttgcttgctgctcttgtgtaggccagaaaacccacacttggtgttcgttccctgtctctgcttttgtgagtggccaggtcctgttgcgtctgtttcacaagtggcttcgcttcttcctgttgacctccaggctgccatcattcccacctgagcttgttcggcggcttcctcttggtctccttgggtttagtctctgccctcagtccttctccagtaaggcagaagcagccgtgatctcaatgcagaacccaccatctcagtcctgtgcctgaagtccttcctttcctgtaggaggtgtgttaaagtctgccactctttgtggatttgtgccccctttccgttttgtgagattttgtctcatgtatgttttagggccgtatgattagatgcgtaccaatttagaattgccttgttaggagggtcacccttttcatgatgatgttttcctctttacctttagtggtgcttcttactgtaaagtttattcaatatttatgtagcatctgaaactttcttttggttagtatatgcatgatgtaactttttctatgtcctttaatttcaagctttctgtgtctttatattcaatatggataccttgtaatttgcagttatttttaaattttttattctgaatatttaggatatttatctgttcacatttaatgcaattactgatatatttgtaaatagttatcttactgttttatattttttctacctgttctatgtattttttcttcttttttttctttattccatttaccccacctatttccctactactagttatcattcttttaatagctttttgttactaaactgataattaaaatatttatctttggtttaatgatgttgaagatcaattagctttccagttccagagcagagtacccactcgcatgttttgcatgatctcggtcgtcttaattctccatacgtgttagtcccacaggcatctgcgactgttcggagctgtgctcggcagctctgcctgcgcattcgccccacggctgcccaccccttccctgggcgctgcgcctgcatgtagcatccttggccttctgcctgaagaattttttgctaatactaaattctcacacttattttttaaaatggtctttatttgatcatcatttttacctatttgtttttttttagtttgggtagtttgggatgttccaaactaaaaaaagaaaaataacttttcctgaaccatttaaggtaagttattaacatgatggtctgttatcttcaaactcttgaatgtgatggttcgccgagtgtggtctcggtgtcaggatcatttgaactgctgttgggaatgtaagttctcaggcttcagtccaggcctcctggactagacacgcaggggatggggcccagacacgcattcgagcgagtcctcctgtcgatgcacagcgcctggtttgagaatcgtggcttgaatgtgtaattctcacaaacaagggtgttctcctccacaaccccaggacagctgtcagagtcaggaaatgagcatcacgcgttactgctgtccagtccacaggccctcttcatgagcatcacacgttactgctgtccaatccataggccctcttcatgagcagtcatttatcctagccatgttcttctgagcaagaatagccaatccagggtgatggcctgcattgaattgtttcctctgctacatctctttgaatctggatcagttcctcaggcttttcttggcattcaagaccttgacatttttgaagactacagaacasttaccttgctgaatatccctcaatgtggttttgagggatatttggcatatggttcccatttgtcccatcactgcttttgttacctttattgcttgttaaggtggtgtcttcactataaagttatcttttactcttaatatttagtcagtattttgagggggacatactttgagaatatgtacatgtcctcttcctcatcaaactttcactcagtagttttagcatccattgattttcttggctaaattattactatgatgattgccaaattataattttctgtttctatcgttctttctgtatgaccaggtagtgtcctactagaagcaagtagtttcccttctccccatttatttattcattgatttccatatatcactatggactcccagattcctgtttattcagatacatctatacttgtttctgtgtttctatttgttgaaaactgtgaatacacaccagtgtcttcagttccagtgcaacacatcaaggttcattttagtgctctcgtggtccatatccttctcagatgatgagaaagccagcccctgtcatctaagtgtatttacctgccggaatcccacggggcgtagctagtctcctgtctctgctaccatggcgtccctaatccctgccacccaggcaggtgcaggcaggcattctccagtcccgcagaacagctttccatttgaacttgaaggaaggaaggctgtcttcattcctgcaggttattttcattgggtattgagttttaaattgccaatattttctttcagtgcttccaaacttcactgttttttatacttctggcttttgtgtttctaatggtagttcctcttcggaagatatttcttatttctctggcaggttttttccccttctttttaaaagagatttttctgacttggttttatgcatttatactctctggggtgtgtgttgtgtaagtaggtgtgcatgtgcgtctgtactcacttggcctgaggttcataacactctttgagcctttggctggtgttcattgtctgtagcacttttttttttttttttttttttgagacagaatctcactcttgtcacccaggctggagtgcagtggtgtgatctcagctcattgcaacctctgcctcccaggttcaagcgattctgctgcctcagcctcccgagtagttgggactacaggcatgcgccaccatgcccagctaattttttgtatttttagtagagacaagttttcaccatgttggccaggctagtctcaaactcctgatctcaggtgatctgcctgccttggcctcccaaagtgtgtctgtatcgctcttgccacattttctgtctgccttggcgtcccacagtgtgtctgtattactcttgccatattttctctctgctctctttcggttccagttggtcatatgttggaccttttcaccatgcaccatattcttcgtgtgtctgctcctttctgtatatcttgtcttttttttttttttgagtgtgcatcagcctagatgtgttcttctaaactgcctttcaagttactaatcatcctttcagctcgttctaatctgttgttagacctgtatttcttatatttgagttttgaattttcatcctggtttgtttttgattctagagttttcattgttataatttcaagtttactgctgatattattttgtcatctaatttcttaaacatattcatcacaaagttacacagaattatctgataattgcagtatctgtgtcttttgtaggcctgtgtgagtggtctggtccctaacgtttggtttggggttgtttaatcttggcgtttggtggcctcatcattggtgttttgttgttttccaatggcagtcattttttgtggagactttgcctggagtcatctcaccctggagaggatgcgctttaccgtcttctggcaggcatggaggtcagggcaggtcccctgagagcgctcaggaagcaagctggtgacgctgggcttccgttttgtgaggtctggagtgtttctagcttgcgcttactgagaggccatttttgccagggtcccttctttttgttgggtcctgaactgcatgtttggccccacagtgcactcctgctgctgaaagctctgccgggcttctcagccccccggctctgctggtgggaccagggagcgcctcagggacgggaacgtgcagcccagctgtgtttgcttcttctctggaccttggcatccagggccctccctgccctgttgcctttacagcctgatgttgcctttgtagaattcttttctacattgtcccctgtttggttgttcaggaggggacagatgtgttagccgttttaacagttacatggtgagctcacctagcagtttttcaatcactgtgttttatgtggttttgtctgcttttcagtttgtgagcattaaagagaatctaagagaatatatgatattgggcttgtggtttgaattaaatgtttagaaatgttaaaattttgaatcgtatttaaatgactgggaaaatccgatttttaaatttctaagcatttcaaaaagtaaacttgaatgtttagaacagttttagatttacagaaaaaccgtgacggtagtagtgagctctcatatctcacatccagtttccattttattaacttcttctgtgagtatggtacacttgttataattaatgaattaataatacttactgkgtttttgttttttgttttttttttttggaaaccgattgtcactctatcgcccaggctggagtgcaatggcatgatcttgactcactgtaacctccacctcccgggtttaagcgattcttgtgcctcagcctcctaagtagctggtattataggtgcctgctaccatgcccagctaatttttgtatttttagtagagatggggttgcaccatcatggccaggctggtctcaaactcctgacctcaagtgatctggccacctcagcctcccaaagtgctgggattacaggtgtgagccaccaaattcggcccttattgttaactaaagcccacactttgaattattcagattaccttagtttttccctaatgtcctttttctgttccaataccccgtctagaatatcacatgacattgggtmctcatgtctccttaggtacctcttggttgtaacattttctcagactttgtttttaataaggagtgctggtgaggtattttgtagactctccctcagttgagggttgcccrrtgtttctctagcgattagattggactgtgtgttttggggaggaatccacagaggtgaagcatcaggggcacttgctgtcagtgcagcctggcaccrtggccctgaccgtgggctcctggctgaggtcgtgcttgctgggtctccactggaagctgctcttcctctttccagaaagccccatgcacaccacagcctttatgttcctttgttgagtaagaattgtctgactgtttagaggattttgtttaaggaaattcggttgcttgatattaaaaaatgatcagttgaaattaaatagtaataaataataatgaccatttctgkaaattcatagaattccttttgtccatcagagacatcagcagcagttctcattgcatttccttctggaaacagcattgtggggatacctggaggtgaatgaacaaagcccctctgggtttcatgtgcagctgtttcagatctgggaaggtttgtggcttctcacaaaaggctctctgcatgggttgcagagctgctttctagattggcttctctgggtactggggaaagctccctcccctccggtagtcccctccctcctgagcctgtgctcagggggcccctcagggagcttcattctgacctgagtgacttcggtagagcccttagcagacaaggaagcgaatactgaaatgtcttgtgtgaagccttctgtaactccttgcacacacccctgagagagtgcaggccttccccaggagtaggaggagatggagggtttttattwmtaacaaaaggccccaccctggtgagagtggcttccttttatctggccacccgacagacagcttgtgctagcagcaatttccatcagatgctgagcggaaaaaacaactgttgctctaaaaacacgttaaaaatcaaaccctaactataaaacccattttctccaactcttttccttcttttgaaaacaaatactaatggtgtaataggaaggcaaatgttcatgaaaatgtagtttctcttggatcatttgtgtttcaggttgccttcatctcatttctgtctagttcagctggagacaacaggcatagctagaaaaatggaaagtgtataggaagagatagggcctggagacaggaatgtgtgcaggtggaggtatgtctgatctcatcagaacagatggagaacatgccagagcccaaggagccatcagtctctgacacctcaactcgcagaggccaccaggcaaagacagttgaagttgtttttagttgggtcacagttagaggttctgaggtttagcaagaattattgtgatgtttgaattgctaacaaaattaaatgctgttttctataattacacgttagaagaaacagtaaatacaatcaagacaagaatctttttagaaaagagttcaggttttgctttatgaaaattgcaaaagacaagtaactaaagaaaagtaaagtcggcctttgtcagaggcgaggtgaacagaattgtttcgtctaaccttgtagctggggatcccctacccgcagcgggctgtgcagagtacaagagagggtcctgaagtgcttctcactggtctttggaggtgggaagaccttctcatcggtcttcaggtacacgtgtcaggtcactggtttgctgcaggggagcaaacagcatttgaggacattccacagaacgtrtgactattagagcagaaggtagttggcagccggttatttcctggagcaagtggaggccatggatgccttttcatggcagtggttcttagaagcccattaccctgctaggcaatttctcgctttctgggagacttttttttttttaatgttgaaaatatgtgttttagccaaattctgccattaacatgagaatttctataatcccaattaattttctaaaaataataaaattactaaaactatgccttataatttcatgagaaacttaaaatatacttgcactgtgcttctgtaaataggtggtctgtgtattgtaacatgcccaggacgttgcatgcatgttttatgatgggtattgtccttgttgatacctggaggttaggagttattaggtagcacttctgattcttggaaaacgagtaatgctttgacctttattctttagattaaggattatagtcttcgtttttcttccaggattttcctgatttttctgactttagtgtttttgtagttttgtgagatgggtctagatttgaatttttctttatgccagtgctatttgcatcttgttggtaggatcttattccttgttggtaattcccccattgcttctctctgtagacattttaaacctagttattttatgctctgtctctggagcgctgctctggacgctgtctgatcttgttcgttgtttcttctttttctcacccatggtggcttcttttcttgactgtgttggagactttgggtacagagcttctgccctgtggggctccatccatgggcatttgrtgagagtgggtccctcctgagtcaggttgccagatgaagtacaggatgccaaggtaagcttgaactgagagcagctagtattttagtataagtatgtcccaaggtttttaaccgggtatcctatatgatttctcagtcctggcagccctactcctgaaaggaccctttgctgctgccaggcctcagattcctgaggagcagggagggattgatggcacctttgttgcttgtggtattccaggccctggaggtaatgcaaatttcaaccctcgaacctgtgtggagagaagctctggttacgaattcccagtggagaatggtttcaccactgggtgccagctggggtctccttgctggcaggaggccttctcccygcactgaggtgtggcccttcaggagtcacctcacagggacaccaggccgtgtcttgtggctctctgcagctcttgggcgtcccgagggcascgcggcttcagctcaccactctggcttttccactcactcttccttcttagccctttgtgatttcttgcggagctcagctgtacatgtagaagcatttccagaggtttttatatcaagaagcttttctgcatattagggctgctgttttgctagaaatggaaggctcccctatttttctttataactggaaaccctgttttggtgctggttctttctgtagccattctgtggaggacctgtctgaattagaaagtctacattttatatactcaataggtatttacccartgaacagtcccccagaatgcagaattgattaaatccccaaccccgaaggcacagaagggaaacctggctgatcaaagaattcttgccttttaatttaatctgagttctatcccagagatagagtcaggcatcttgggagtgctaaggtagtaggaatgacagtttatcccaatacctgctgccaagcctgacatttcagaccccctgcccgacagtgtcatcccagtgtcctaccacttctgcacttagccctgattagatctttatcgtgccaggcactgttgtaagcattggggccacacccgagagtgaagccaagccctgccctcatgcagctcacctcctagtgggcagggagaacagatgatagacaggtaacagggtgccagggtcttggagaaagcacagcgaggaggctgccatgtggagagaggtctcaggcacctgacgcaggggactgagggatgtgggggtgtaggggagcaggcgccacaggggagtgagggatgtgggggtgtaggggagcaggcaccccccggaaggcaggaacaggtggacatggtctggagctagagaagagcccgtcatggtgaggtgtgatgcgggtggggtgagcttgagcagggagtgagctgaaaaggcagcaggccaaggtcagccggggtccgcagctgccacggggacctcagttcagcggtactcctggtgaggtggtggcgttggtgcgccagagagtggcatcatctgggtctcaggtttaaagggttgctctgcttgccacgtcgagtatcaactgtgggggcaaaggcagagggccaaggcggtcagggagggtcctggtggtgcaggtgagagtgctggtgctatgggcgggggcgctgagagtaggcactgtctcttttcccgagagcccccacttaacaggggcattgttgcccctccttgcccagccaagttgcttcttgctttttaggttttcaaaattaagcagactattgctgaaggattccagcagagggagtcagggaagaggtgcagggtggggagcgggctgctgagggcctggtggtggcctttcctcaccggacggtggagccctgggcctctgctgtgttgcctctcctgcagagttgtgtgtgtgactggaggagaggggtggagcsagttcagccagcactggggtctaactataaagcacaatagagacaggtagtggcagctgggtggggtgggctgtggggtggggttctaagataggaatttgccgtttgtaacaaaggaactttggtgtaaaggctttaatttaggaatcccaggcatacttcctcatggatcttttcctgacccttatgtttaatttaatttactgatggatggatgagcccagaaagggttacacaggagcrcacytctcagggagtggtgtgacgctggggaggctcgcccaccctgtgtctgagctaatttctgaaatctgtttggagcttatatattgaaacaaagccgttattctaactttcacatgaaaagagctccatgtcttttaagatacttttttattagagctcaagttcttttataagcagaaactccttttttaggtttctaaaaagcatacaaacggtgggaagacagaattcttccccaaatcacctacaggtggttcgcccacacctatttcaatagaccttattttagcgactcaccttcatcaaatggttccaaagtgtttcagcctagttttaacagaacagcagctcttccttttcagacgcgtagttttcataacatttaattaaattttgcaattgcaatgacaagtacaactggcgtcgctgctgggaaacagaccactgactcataccacttggtgggagggacagaagtgcctgtgggccagtgggagcaggtcctgccacttggtgtcctgtgtaggctggcttgtgagtgatccaatcggggttggtcagaagagctttctgctgaaaggaagaagagctggtgaagaggaccaagctcgccagagtattaggaggcaggccagactgtgtgggccctgggcgccagcagaggagcctgtagaggagcttcagtgtctgtcagaggccgcaggaaggtcaggggtggtgaaggttgaccatgcccaggatactgcgttgatgaccaggtcataggtgaaccttgagagaagtgtcaggagactggtgggaattagagattccatcttctatagcttgttattttgtcttgtttttaagggctaaggcattctcagtgtgtttataggcaaaagggtaagtgcttgtggaaagagggaaaagatgcaagagaggaatgggaccgttgatggagcagggatcccagaggcaggggggcctcttggctcctcagagatcccrgttcaccaagcagggatcccagaggcagggaggcctctcagctcatcagagatcccagttcaccaagcaggcgtggccaggccagatcactgtttgtttcataggaccccaacctagtctgctgaggggaggctggaggggtgggtgagggctctttcctcccatggggagacactctgttggattggccatgtgtggagtggaggcacagaacctacatccagggtgctgcgagcgtagctgagaaagccagctgacccatgctgggtggttgaccaggcccagtgaccacgttggccattgtcattgaagcatctcattccttgattaaaatccactggtgctcttcacatcacagggccagttccagacagtagattacagccatttgatgtgtcatatttacgttctcctagcgtgaaagcagcagtttgtgtgcttaacattataaatatacatggttgaacatcctggatgtgatggctaatgagtctctctggaacagattggttttggagatgtcttgactggcctttaaggggcacggtcgtccagctgtggagcactcgtggagtcagatctccacacagtggttcaggtccctgtgaatcctctcacctgcrtgaagggcctggctgcctcttctaggtgtctgggaagcmtgctctttcccatcaactgcacccttaaatggggactccagaaacaggagcagtgtcaggggcgagttagagggcctagcacgccatactcagggacagtggcgggacgctggcaggagcagtggcagctcatggggctccggatcccaggtgcctgtgctcgcccacctgcacctgccaatggatgggtgactttgaacaacacgagaagacggcagttggggtccagtggccttcgttactgttaggaagaaggtccagttgcccattctagacttgctgtctctcttgtctgtgtttccttatccctgaacctggcttccagtctgagtttagggagatctgcttggcgggggaaggtttcccagctcttcctgtggctggatggagtcaaaggcaccaagacctgagtctgggaggggtccagccaactcgtttttcttcttggggttctgtaatttttgctttgcttgcccttgtgtaattctaagaggtgcacagctgctgtttgggttgcagttgtctaaatcagtggtgccccagaagttgccagtgttctgggagctgctcttactgagagaatcatgtctttttactggaactccttcctagggccactctgagcgctctcagcctctgccacagctcatagtttctggctccgcatggtggagtcgcctcgccttctgctgtggctcctccttgtcactcttcagtacactcaaggctgttcagcctgtcggcgggagctccaccttccctgtgcattcgtctggcccccatttcaccgcactcagtgccagacactgcaccagggctggagacacaacccagtttccacaccctggagactcggcagagacacgtgcgcagatgatgcgatggaatcccagaggctgtggggacccgtgagagggtagggatgtgcggtaggttgctgtgtctggggtctcaagactcgcacctcacaggatgggtatgagtttgccaagtagagtcttggggggggcagttgagggagaaggaggatggctgtgaaggccggaggctgcagggcatggccggcaagggccatgatgtgaagggaaaggagacagaacaggtggggagggtggcgagtggggcgagatcgcacagggtctcagggtggaccgtggagcttactttccatcctaagccacgtgggggttacagcaggcatgagattaacccgaggagttcaaatatagcagagtcagagggcattgcacattgttatgtaaccaagtcttgaattgcagtgtgaagaacttctcatcagcgttgatgggatgattaagaaaggtggtcagagatgttggaatttgaaccagaatttaagattcatagatactgaggatttatgggctttatttagagtaacttcttgactattagaaaccctatcagataaattttaaaacagagacccagagctcaaggtaggactactaaatggatgatgtggagtgatggttaagatgacattttcctggctggtgctgtggctttggttgggaacagcragagatacagaaccgacggtctgggatccaggagggtggctggcaatagggaggaagtgtggacgcttgatccaggaggcacttaggattaatctggcagccatggcctgcgaggtggggagaggctggtggaaggaaggattatgggctgggggctggagtgtcatgggctgaataggacctgacaagaaggggaaagagcagagagactgaggctgaagagggcaccacttctgctgctgatcgcagtggtaacaataccaggtcaccccgagcaccttctgtgtgctgggcactatgctgttgccacaagaagacactattattcttattcccatttgcaaatgagcagttkgacacagtggctttctgaggtcctgcagcttctgggagggcaggactcacatttgggcaagtgtggccgggcggccatgctgcttcccatttccctgcttcttgcagggcccctggggtgagcaccatgcacagactaaggtgtgggggttgtattaggctgttctcgcattgctataaataaatgtctgagactggataatttatttaagagggttttattggctcacggttctgcaggctgtacaggaagcatagcaacttctgcttctggggaggcctcaggaaacttacaatcatggtagacggtaaaggggaagcaggtacatcctaataaggcaggagcaagagaatggggcagcagagtgtcacatatttttaaatgaccagatctttggtggcagagtgtcacatatttttaaatgaccagatctttggtggcrgagtgtcacatatttttaaatgaccagatctttggtggcggagtgtctgtcacatatttttaaatgaccagmtctttggtggcggaggagtgtcacatgtttttaaatgaccagctctttggtggcggaggagtgtcacatgtttttaaatgaccagctctttggtggcggagtgtcacatatttttaaatgaccagctctttggtggtagagtgtcacatagttttaaatgaccagctctttggtggcagagtgtcacatatttttaaatgaccagatctttggtggcagagtgtcacatatttttaaatgaccagatctttggtggcrgagtgtcacatatttttaaatgaccagctctttggtggcggagtgtcacgtatttttaaatgaccagatctttggtggtagagtgtcacrtatttttaaatgaccaggtcttgtgtgaactcagagtaagagcctactcatcaccaaggagatggcccaagccattcatgagggatcmgcccgcatgatccaaacacttcccaccaggccccacctctgacactgtgagttacatctcagcatgagatttggaggggacatccacactctcatttgatgaacatgctggtgacatgggtacacagacgagtaaagaaagaccttttcacagcagagtggatcttagattttcatatgaatagaagggtttatgatttttggttttgttgatcctgtgaccttggagtgtttgtcttgtcacttgtctggctagtgtcctgatggctctcaggcacctgtccacactctaggcgacacccagcgctagggcactgatgcctcaggaatccaagttttcatctaaaacagcgttttcattgggtgcagtggctcacgcctgtaatcccagcactttgggaggttgaggcgggcggatgacttgaggtcaggagttggagatcagcctggccaacatggagaaaccctgtctcttcctaaaaaacacaagaattagccaggcgtggtggcgagcacctgtaatcccacctactcgggaggctgaggcatgagaatcacttgaatccaggaggcgggggttgcagtgggccagaattgccactgtgttctagcctgggcaacagagtgagactccatctcaaaaaaactaaaattaaataaaaataaataagtaaagcagcattttcagtggggcatgtgtacctggggtctgagcaatatatatgaacatgtttttccttagcgaccctcctcattttgtgcccggaattgaccctgtgtaagttcatgaaaatactgaatgtgtgcaggacaggctgctgattttttaaagtcacgttttaaacattgtatcaggtcactttttatttctgtacagcccttctttggattagacaaactgtgatttggtttctattttaccagttcagtctcttcaatggaaggaagccagatgctgttaagatactgtgctccctccttgaagctgatcgttccctccttgaagctgatcgttccctccttgaagctgatcgtgtccaagatagttgctaggacaacagaatcttctgttttctcgcctgctatttttgtttcttttactatctcaagttgttttcattttcagtattgagttctcccttaccattttttaaaacagagatgtttttattaactttaatatgttaatactgtatgttcttgcctttatgaaattcaccttacagaaaggcactaggatcagtttacctaaacatgcgggagacggaaggccagacgtgactgctttagrttcctcatgacattcagaccttacttggaactcagtttggtatctagttgtgttaaaatacaaattttcagtttataagttacttaattaagtttgaaagtaaatgcgtaatgccttcagtgttctctccactttgtgccctgccacctgcactgtggaaattaatcatagaaactcggcgttaatctgtatgcccgagttatttacatctctgtgtatggaaaattatcagcatgtgtccctcgaagaagatgatgagcataaaaggtgatctttaccaggtccattggtttgtatgtgattgctgtggtatgtggtatctgcctgtctactgatggaaagtggtaagatactgtcttacatgcaatctggaaaatcaagtgccctgactttacagtgtgttacatatgattgtatttactttagaatttttagaaagcataccattttcaggtttaaaacaagcacttaggttaggagcttttctattattcacagctaataagagttaaggaggattaagacatttgaactattgttaatactcattgcaacaaatatgacagctaaataatgatatatttgtaggaagctatagttttatgtgttaaaaaatagaacacacattttcaaaataaaaatatggtttttgaaagttgactgttaaaagattttttgaaaatttatgccaattttgttacattcgatttgtgttctacagtaatggaaattaagggaaattgtgtatcagagaagtgtctttaatatctatagtgctcttctttaaaattaatgaaaaactccaagcagaattgattagcatttatatgttataatggaaaataggagttggaaactggaatttccaaatcaccccagaactgtgcagtattttgaagctccttagtgcatctagagagaggggagccagtcatgcttggcataacccattgcttgccccagcagagtgaagcccacccggtacacaggccctcactcaatcgtttttttgtttaatttatatatttacagtaatacaataaagggtttgttgctggaatatacacatatttatttatatgtataatatttatcaatatatttacaaatatatgtatacatgtacacacacacacacacacacacacatccttcatgaaaactctttcagctgggaaactgagcatccttgaatgtccctgaggtgactactaggatataaacatcccccaagagaagtgctttgagttacatacgaaaggacctgcagaaagattggagtcacctttatctgggtagagtggattgtggaccataacctaacagacacccaagaaatctcatagctgagaccttgagcaacatacctttactatatatatgctgattgacagataaatggaaaattggagggaatgaggggaattcagtaaaacctcgtataagtagtatgtgattgaggaaagagcttattgtgttatttttaagagttagcacactaaaagttacaatttaattcaacgaatatttacatgctgtagtgggaaaaagatcctggacttgatcattaaaagatcggggctccactttcagcctgccaccagctagccacgtgaccgtaggcaagtcaagtctctgaacaccctgtctcttttaaaacagagactgtgccttcctttacctcatgctgtcagggtcacaggaaataacactagtaaaaaggtttctacttagaggctgcccactaatatcagtaagtgtatcaatgattgcattggacataactttgtgatgagtaccaaagaaaagtcaaaggatgaagggagctctgagaaggaaggggcattatttcatggcaggattcgaggaggcagaggtggctcaggacagcacttcaaaaagagtgagtggcataggtgttcagtagagaaaagccatggccttggccaggaatagcaagtcagctgccacactcaaggaagacctacttggagacccttgcgatgtacctgggcggggaggtgcttgttcaggaggtttctttggctttctcctgaatgacatttcctgagatatatctactatcaagttaatcacattcactcaccaaataagttcttttctgctttcttcttacaaagtagcatttgagaatgtttttrtgtggcacttctttcattactgtagttctctgataagtaactgcctagagcagtagtagggctgttaagtgttagaggctgtctttgcaaaaactgaaataatgacacagagaagcttgtccataaaaatgaatgattcagtgacatctgttgttattagccaaaccctggataggaactttcttagagggaggtgaggtgccctctctggctgaactacctgctcattcttaccttacatttcaaccatatataatagcaggtgagattcacatttacatcttttcctaagttctttttagaatggttatgtactgtaattccatcttatttcctttgtggccttacgagctacccctctttatttcatttctgatgattgcygtagggtttcaccacgggcaactctaacttgtcacagtcaatccacaccttgtcagcatttaaccgcctcacacagaatgcaggtatctggcccgaggccacagctgttcctgccctctgtgttctttgtgctgttattctcatatactttcacagaaaccacacaatggactgttgtgattttggctttaaacagtaagttatcttttaaagagattgaaacaattttttagtcttttagtcttttatccttccctctaccatttctgatgtgcttcattcctttgtgtggacctgagtttccacccggcatcatctttctcctgtgtgaataacttcctttagcagttgttatagaacagatctgggagcagtgaattctattagctgttgcttttctgaaaatatatagttcaacttcattttgttgagtattttcttttgatatagaattctaggttgacagtttttttttcccctccaacacataaaagatattccattgcctcttggcttgcatagtttctaatgagaagactgcagttcttcctagctttggttcttgtccctgatgaaccttttttccctttggttgtttgtaagattttctcgtgatctttttcttactagtttttcataatttaattatggcatgcatctgcgtggttttcttggtatttatcctgcctggggtttattgagtttcttgggtggcaggattatcattttcagaacacatggaaagtgtttggttatcatttcttcagatttttttctatcctcccccttttggggactcttatgtatccatgcattaggtgacttgctattttccacaggtccctgtgactctgtccatttgtttttggcctttttctttctgtgcctaattttggatagtttctgctgctctgccttcaagctcacttatcttctgtgggtgtatgatatgctgttaattgcattgtgttggtttaggtcttccaagaatcagaagccaagagattagatgtcgaagaggtctgttggaagaaaacacctttgaaggatcggggagaggaagtctgagatggcaggagagcctttgctcttccttgcgggactgtgacaagagacaggaagaaagaatccaggaaagatttggccaggctgatgagtgtcctagagccaaagatgcctgtcagggagtcccatgtccacaggaacagctggcaccagaagctcttctgtgctccatcactgaccaggcacattctgtaacgtgcgtggccgtggcatgaacaggcagcagatcctgagggtcaggagcakcaggagcgttgcagaggagcacactttcctccctgcagtaggagctyggcagagcacattttcatggccaccacacttatccaatagaattgtgttttaggaatcctgttttttagctctagaaattctgtttggtgctttttatgttttccagttctctccttatgtttttcatttaattcttagagcatactgaacatttttataacagctgttgtaatgtctttgtttcctaattcatcgtctttgtcagttctgagttggcttgatattttccccttgttatgggttacattttcctgtttcatacgccgagagatgtctcattgctttgccatacgttgcaaattttacgtttttgagtgctagatcttgttctattcctttgaactgtgttagaactttttttctgacagcagttaaggtacttgcaagtcagtgtaaaccttttgaggcttgatgtttcagctttctggtgagcctgcaatgggctttcttcaggaagggcttagcccagtatcaaggcatggccatggggtccctgttgaatgctgcatgcgtgcagcgagaggcccctctgctctggccagtgggagctcgccgactctcagcyctaagtgaactctgggagtcatctgcttgcaactccctggaaactgttctttcccagaagtcgactttgtccagcttcatggagttttaccccctgcacacactgatggctactcagccagagaccgagtgggtcccctgtgcagatttctggagctctttttctgcctaggccccacccctttagtgctctactccgtaaaatctagtcactgtgtcctgcccagagtcagatgcaaccaccagactcrgtttctccagtttctaaatgtatctggctgggaggcaagtacagaccctgttactgcctcatgaaaggaaactgttgactactacttggcctggtgcctctcacttaggccctaacagtataactgattgcccaggagctgcatagttcacgttaactgaagtctgaagtgtatttcgggagggggcatttttccatgtcagggcttctttaagaccacaaagctgaagtctgtgctcgctgctcagcggaggccgtgctctgcgcattgygtgcatttgctgcctcctccctcctcctgaatggccacctcttccctgctgatccgcatgctgtctgcacctgaagcctctctccgtgttggtcaggtaggatttctccacccttttcgccctccatcaccttccatcttctactttgggcttctcccacattccaactcatttctaggtttttctagccagagaagagaggactggcttcgttcatctctctcaaagtagttaggacacagcgtttcaccagtagaaggagtttcctccattagaatgagtgactgtgtgtgtgtgtgtgtgtgtgtgtgtgtgkatatttttttccttgactgatttctgtgcgaacagctggcatttgaagcactatatagggcatgtctaaattgtgcacccaagagaagagcctgggagaarcctcattgtgcggccttggccctcatggcacagatcccaggttggctgtagcatttagaagtggacacttttctaacatcagaactcatccagtccttacgttgaatcacacaaactcagtggcgtcactttggatcaaagaacagcacgtttcagctgcctctgcgacctcacctggagctggagaatcaccctgttccccgctgttgccaggcgcaggacctggcacctgtaggcacttagccggcacaggacctcgtacctgtgggcacttaggaagtaattgtgggctaagtgaacttaaaccacrtcgtggactcagctttactgtcttgttgttaccttcctgtactttcttaggccagtgatcagcaaaggtttcctttaaagagccagagagtaaaggttcccagctctgcgggccacacagcctctcacagccgctcagctctgtgctgtgtgaaagcaccaccagccagtgtgtaaatgcatgggccaggttgtgccagtgaggcctcatttacagaagcagtcagyggcgagatttgatctgtgggctacagtttgccgacccatgcatgaggcagtaaaaggccaagagcctggtataaattcataacgagaaaccaaggctctgaatcagccccgaagtgtaagcagcagcataatgatctggagcagcatcttggcgttattaaattcaacccattccgatggctgcrtcagcatctattgctctgtttattgtttttccttaagcaagcagttccatttctagaaatttatctcaagcacataaatctagagggggcacatcggtgttatttatgacgggaaaactgggaacagacacagccctaggctggaagaggcacagagtgatgtacagcatgggccagtggttaggagcagactcaggagccaggggacacggctccaattctagctctgtgaacacactggccgtgtgccaccctcagcaagttacttaatctctctctcttaggaaaaaaaaaaaaaaaaaaaagaaatccttgcacatgctgtaaaattcaaaagatgagagatgttccttctttgttccccagccgcccagggcccctccctcaggcagcctggttcaggtttctttgtagccttccggttggtgggggagagggtagcacctgtgtgtgtgtgccattcacyctcttaactgtgagggtcaggaaaatcatcatgttagtttacattaagcatggacttctgacacacagatttgcacrcagatatttgggggaaatcacgagtgggtttgatgagcgtgtccaatactgtctcttctccagtctttcctgtatatgaatcaggatgcacgggtgggaacaagtccggtcctgtggggttttccgggagaagaaagtacagatccacattcccaaacaggctgggccacatccccaagcaggctgggctgcagtgtgcacaccctcatgtgtcattttgtatctgctagtacaaatgtgcacaccctctgcagcctggaatggaagcccaccctgctcatcctccatgtctgggctccatcgggggccagggggagttgtcatttccagcccagccccctgtgaccagcagcccttagggaaaggaacttggtttgtacactgagtcagcccaggttgtcggtgactgggcagggtgcctcccagtgcactgtctaaaatcccttcccagctccaggcctcgccctggaacactccsggtgggccaccagggactgacacacgccagggtcatgggtggagggcagcttagctgcttggctctggaagaggacttggaatgtttggctttgtaatttattgaggttttttttcccttcagtaaacttcctttttgatttctaatggaaaatggaatacagggaaagagcctcctgaaagtgttaaacttatcagagccctgtgaatgtaatgagtccaaaatgccttgaatttagagatccagcgagggaaactccgttcgcattgtacagtagaggggattgcagaggatgagcattggaggggtttgttcctttttctgttaggcgctctttcttcttttgctccttaaggattcttggtttgctcacccggtgtatactcggcagaagccctgacttctgacaggaggaaaatgattttcttttcattttaaagtgggtgtacggccttgatagttcacctgagatagttcaccgcatgccctttgcatctcaacctttggacgcacagccacacacatgggtgtcacgcacccgggcaccgtgaacgagcagatccgggaaagcgtggctcgggaggaaggtctgacgaggcccgttgcggctcccggagtgaggctgccctgcgagggaacgggctttgctgctttcctccctgaggcgttatcatgcgcgttttctcatgtgatgaatgagcactgggttttgggggtggaaggcttattttaaattagcagatacagacgtgaagtagacatgtaaacaaagtggatgattttgcattttcctggtgtgagatgctgcaaatgaacccctccccccccgcatggttctctgttggcctaaaacactgaaaagagaccccaggatctgagaaccctcctgggtatcaaaggccagttaactgctgcctgagaagtccagacacaaactttccgagacaattaatggccactggctggacttagcaggtttggtattctgctagtttctattatctgctctgatttaaaattctatttgcaaagatgaaaatggagccagactgtcccaaacccagcccttcctctgtcagtactgctgtgaacagacctgcgtggctggtcctgtgtttgggtaaaacattaaatgacaactttaattgaaaaaccctggggaagctgacccagggcgtcttaagagaggcgcctgctggccgtcgtgtgggtttgcagcaggttggttaaacgggaaaacctttcggtgatcttttgttcaggtgtcaactttctgttctttgggcttaattctgcagttggtcctttagggaaaaagaaatgaatttctggcaggaccacctctcagatgtggaaccaactacagcgttaccgtttcctggctgcggcagtcgtgtttgagtgtggttctgctggaggtgtcctcgccggcagtgttcctggagggccttgctgctttcacagctctctggcctgcccctccctccgggtttgtgttcttggggttgacccacactctcctgcatcctcgacctgttcccctgcacagtttttttcttcctggtgtacagatgtgacccggtatctcccatcataaaaagcagacacccggcaggagtnnnnnnnnnnnnnnnnnnnnnnnnnnnnnnnnnnnnnnnnnnnnnnnnnnnnnnnnnnnnnnnnnnnnnnnnnnnnnnnnnnnnnnnnnnnnnnnnnnnnnnnnnnnnnnnnnnnnnnnnnnnnnnnnnnnnnnnnnnnnnnnnnnnnnnnnnnnnnnnnnnnnnnnnnnnnnnnnnnnnnnnnnnnnnnnnnnnnnnnnnnnnnnnnnnnnnnnnnnnnnnnnnnnnnnnnnnnnnnnnnnnnnnnnnnnnnnnnnnnnnnnnnnnnnnnnnnnnnnnnnnnnnnnnnnnnnnnnnnnnnnnnnnnnnnnnnnnnnnnnnnnnnnnnnnnnnnnnnnnnnnnnnnnnnnnnnnnnnnnnnnnnnnnnnnnnnnnnnnnnnnnnnnnnnnnnnnnnnnnnnnnnnnnnnnnnnnnnnnnnnnnnnnnnnnnnnnnnnnnnnnnnnnnnnnnnnnnnnnnnnnnnnnnnnnnnnnnnnnnnnnnnnnnnnnnnnnnnnnnnnnnnnnnnnnnnnnnnnnnnnnnnnnnnnnnnnnnnnnnnnnnnnnnnnnnnnnnnnnnnnnnnnnnnnnnnnnnnnnnnnnnnnnnnnnnnnnnnnnnnnnnnnnnnnnnnnnnnnnnnnnnnnnnnnnnnnnnnnnnnnnnnnnnnnnnnnnnnnnnnnnnnnnnnnnnnnnnnnnnnnnnnnnnnnnnnnnnnnnnnnnnnnnnnnnnnnnnnnnnnnnnnnnnnnnnnnnnnnnnnnnnnnnnnnnnnnnnnnnnnnnnnnnnnnnnnnnnnnnnnnnnnnnnnnnnnnnnnnnnnnnnnnnnnnnnnnnnnnnnnnnnnnnnnnnnnnncttccccgctagtgtggtcttttcccaccccgctcctcctgtcttcgtgcagagctagtggccatctggtgaccgtgacgcgaggccccgtatgtcacgcgtggtcacacccagctcctccggtggcctgtgcgcctcactcctcagtccctctgcagcctcaggcctcagccatgcagtgctgctctttggcctcttctcttgtccagcaccctggatggtcggctcacatggcgctgcctccctcagttactgggaggtggctgcacagccctgtcttctaagccacagacgcaggtttccaactgcccacgggtcatctctatggggcaacccgccatgtagcccccacaccctgcacatattctataagcagaccggacacttaccttccctggggctgaccagctctttctctctstcacccaggccttcctgaccccgtcaggccctttgaggccagccccaggtgcccgtcactgctccccggtctagaaatagcacctacagcccgtctgacacaggtcacaacttaggccaaaggtcttgtcagactgtgaagccagaaagtcacgtccctctcttgcggtcttcctgccacttgtagacacctgtagttcgagcagcagtgttgggggatccccctggccctggagggtccctcactctcctgacgcctccctggactctgccagactagctgcctgcgccccctcctgggatcccacaataccaaaccccctgggctgtcttggcatcactggctgaatgacctgggctttcatctcagtctctcttcagatttcaaactcctgaaggagctgggtttttcttttttyktgtgtgtcccagaattctcctggcacccaaacaaaaccgtctgtatccacactgtatcctgggccagaaagctggaggctggctgtgccaccctcccccccgcctttagatgggcattgatgtagttaggatgtctgtccctccagatctcatgtagaaatctgatcccctgttggaggtggggtctggtgggtggtgtttaggtcatgggagtagatccttcatgaatggcttggtgccctcctggaggtaattagtatgttctcacagagtgcrcgtcgacctctcattttaaagtatatggcagctcccacccsctacccgcctcatgctcttgctcttgctcctactcccactatgtggcgtacctgcccctgctttgctttccactatgattggaagcttcctgaggccttcccagaagcagatgctggcaccatgcttcccacacagcctgcagaaccatgagccaattagacctcttttctctctgcatttctcagccccgggtatgtctttatagcagtgcaagaatgaactaacagagcaccggcccctccacttccaggtcccacttcacagctgtgcacctaggagaggagaggctttctggggaggaggaagggtggctcctgggccttgaagatcctagagctttgcctgtcctgtgtgtgagatggctggtcttggggcgacctgtctgctgcttcataggatgcrttgtgtgttcgtctgtcactgcgtggccactgtggcagaggccaggcaaggcacatttcagtgatttgtgatccaggcagccatggctgtgtggatggctgtgaatgcctgctgctgattaggataaaggaaaagctgattcttttaaaaatggttttagtacctgttcttaagggcagaatttggaaggggtgtgtgtgtgtgtgtgtgtgtgtgtgtgtacacaaattgactgtgtgcccatgctgatttgaaaatatgaaaaaactcatcattttcccacctgccatcgctgggcgacacacaccgtgctgagcgctttctcctggctccgcaacgaggtggtcctgcggagcaacactcctctttccgtctcagccagccctgtgctggccgcctaccctcatgaacaggcgtctttgtgctggcaggggctcttgttgccccccagatctccctgtgccctgtgaggttggcctctgtggaccgccacctgagcccctgatctctcccagatggtgggagaagtgggggctgtaacatcctttctgcagctccgtcactgccaagctcagccccccgctggcctctctggcagcatccgctcctcctgggctctgtcgtcctgtcgctcctggatgttcagtggctcccgctagggtcagtcctgcagtgcttccccctcctttgctggttttcctgaaccctgcccatgtctacttaaaaggcctggatgaaactcactttcctactccgccaagggccccttacagccagcggcccggcctctgcaggccctcttcagagggaatttcacgcggggctttttcagagagaactcggtgtttcagttggtgaactgtggttcctgggtcccagccccacccctgtgtctgcgtggctgtccctgctcagggcctcccctaagtgccacccattgctctctgtccccctcctgtggctcttgtcaccctcctgacattaatgagaacactcagtagttcgtttccatttgtggctcccagccctaggacagaagcttctggcaggcagrgctgggttgtggtttgtgtacctgtggcatccttgcactcacaggagacacctgccacagatcatgtgctcaccagcattgctgaaggaactcatgaagtacasgcatctgccgggtagacattgaactatgagctggggaaacattcattcacgttaaacagaatgcaccaatgcctttttcccccacagctgccgggccgcaagtacagccctgggtacaacaccgaggtgggagacaagtggatctggctgaagtgaacgggccgccttctgctccagctgcatcacagtgatggccaagctgcatcagccgcactctcctggacgccrtatagctttaagatcgggggagggtaaataatgcaaaaattgcacagtggaagaaggggtctcacaaaaagcaatccatcctgtagtataggtaatggagttgggggaagcagcttccattctggatgtttggaaccctttagctttgttttggaatggcccaccattctcactggaaaacagtggtctgctgtgaaaggccagctctcggcagcccctgtggtttcagcgctgcygctctgtgtcattcaggttgtgcacattgtttttcttctgacttccagaaataaaagtgtttccatgggaatttccccatcgtacgtctatgtgcgtgcgggcacrtcgaaactgcacacgtgcacacacgctgctctgggccctgtttggtgtggtgtggtttaattgaggcttacattatgctgaagagtttttctaaaggcctactgtatttattttagtaatgtgctacattagagtagaaaaaataagaacgtgaagaagaaatagcaaaaggagaaaattaccacagatttacagaacaatatgttttaagagagaygttgagaaagattcacgtggccgtcctcagcgtctcaaactcctttgaagggagatttgagcttaggctgttgatgacataagatgcaaaagcaaaataatatactctctttattacccagaaaatcaagttgccagtcaaaactgagaaatgagaaagaaaatcagatttctttattcatctctgttgaagcctagaaaaccaaaacaagctggttgtggttcagcatcatggtttaggaatcaagctgtcagttgtgagtcctactgaactgtgggttttccactgtaaagctccactgtgtccattaggaatcaggctgccagttgtgagtcctactgaactgtgggttttccactgtaaagctccactgtgtccaatatggtagctcctagccacatgtgggtattgaaatttaaatgagctaaaatgtaatagagtttaaaattgggttccttggttgcactggccatagttcaggcactccacagccgcctgtgggcagtagttccagtgctggtgcagaggacgatgctctgctccccgcggaagctctaccaggcctcgctgctgcggagcatgcgaagaagatgcacactccttccctccttgcgtccgcctgcctttttccctctccccttccttccctccttctttcctcctccttccctcccttcctttcttccttccatctgtccttgttttcctcccttcccttcctccctgcctctttccttccctccttctcttccttccttccgtctgtccttgttttcctccctgcctctttccttccctccttctcttccttccttccttccgtctgtccttgttttcctcccttcccttcctccctgcctccttccttgttttaagaatttgaaaataaagtttcccaggagttttgaattggagtcgagatttaagtggctgaagttttgcatttcactaggaaaccaacagctttaatcatgaaatgaaagcacagctgggcattgggccagtcacagagtgtcttttgctctgagcacttcacaaacccattgtggaggggaggaaagaaaaagaaagccatctttaattatcttagctgttcctaatgtctttggctgcaaagagctagctgtttccttcaaccttggtggttgcacgggtagtgtcctcagcagtgagagggcaggtctgccctgtggtcaggattgcccttgtgaggggcagagctctccaaccatgcagggctccgtgtcggcatggtgtggactcgggtgctctgatcatcccctgtgtttgcgtctgaccctgtgtggttgcattcccttgatggartgggaagtatgtaatttgtagtgctgaggacattcgtctgtttgattttctggtgttttcaatgacatgcatgttcagcagagaaagatgaataaacactgtccaattcttctctccacatagaagcctcaagaagaggtgaggagatgccccgatttccttatttcagagcagtacatgcgttcgtctcacgaaagctcttacaactaaaacaacagcaccaacaaaccaggatcaaaataatcgtgcattttccaggattccatgttggacttctcagtgctttggagatcaggaaataatcatgctgttgcagcagtatggttttgtgtctggattttattcatacaggcatgtgtttacaggcatgagaattctgtattgaaaagaaagtccttgtttttttctaacgtatctttctgttccatcaactgttaaaaccaaattgttaagaacattgagcttcttaggagagattacatgcagctacttaggaccacctcagcaaaatggagttgcctgggtagatagcagcagcagctcaccagccccacgctgccaggctgctggctgctgtccaccaggcagctgtggaacctccatgttctgcctaggtgttgtggcaagaacagcagggaaacaggcggccgcctccaggccacaggtggacccagggaccttcagttacgccgcttcaattgaattcgtggtggtttctctgctacagcagaagtggaagaagctcttgtcttgtttggcatttgtcccattttttggctaataattggctttgaatttctctgtgccctgcttaccaattatagctttctggattggctgttcttagcagtgcaaatgtcaatgcaaagaagcaagcaggcggctactttctgggaagaagcatagtccgtgctcacactggatataaatctgcaagatttgggggtttggcaaaataggggtggagggaaagctgccatggctgtcagaaattggggctttttgaagaaaagcttgtgtaggcatcagccactggctggccagaattccatgaatggaagcaggtgcccgagtgatctggggctttacatgtggatataaatagaagccgggagcctgaggctttgctttaggaaaatcatgagccagaaaacagaggaggtgattgtcagtagtcacctcacgccgctagtgttttctaatactctctcgaattgtcaaagcaaaggaccttataacagcaacacgtgtgtgactcgaagcagcgagcttcccttgggaaaaggagcctcttctcagcagagggtcccagcctttctgtccttccccatcggaatgccaggctctgtgagtttggatgttggacattgccacctgaattccaggaggccggggagctccagtgatggacttgtccccaaaagagtggtgctgttctcagagccataaatgttccactgaaagtgtctgtcccctggctcacgctggctgcgcttgcttgaaggaggctgatttaagggttctaataggaagacaaatgaaactgtcaaattttatctttaagcatgtgagtaagtttgctcattcgcttttactattgatgtatagttttaaaattcttaatttaaaaattattttaatagtaaatttttcacaagtgaacactttttatctttaaattaaaattctgaagctccctagttagttagatccaattgctggttacattttgggaagctctcattttagtgctatgtagtttcattgaataaacatgtttttaatgagactatacctggtgattatattaaaaatcccagcttttaatttgtaaaaagctgtttcctctggcatgttacgcgtggtcatgtgggttttcttacagtgaacgttgatggggcctcctgcatcccgggcagcatctcagcgctggacacgtggcagtgagagcagaaatgctagcagtggctgaggggcgaggcccaggtggaagcccctgatgcagggttgtgcatgtgcagaatctgaaagctgtgagacttggcgagcccgcagtggaggggggtgtctgagccgcaaggagggtctggcctgagctgcagggcaccccccagagcccactgtaggtgttggagggctgaggagagtgcagagggcctgggaggcgagggaaggagtgaggcggccaggctgggtcaggtgctccacacgcgtcagggagaggaggacctgcagtgactgtcgacatgactttggcaagctctgtgtccgcagagctggagctgagctggctggggcaggagtcacagtgtgggaattaaggaaaaaacaagcaggtagggtagagagccggactaccatcaaagcatgagttttctgctgcccggctccgccgtgacgccactcctcccaccagaacgagcgcgtttgtctccacactctcccctgcttgtcattgagctttgttcggtttaggaagcacgaacagaaaggtggctgtgacaggcagtgggctggaaagtgcatttccactggtctgccctctcctgggacaaggtgagcttggtgcttagcactgggccgtcccgactccaggagcaacgccagtcctccaagcacgggaggcttttcctcctctcagtattgcagcaggcagcgcacagcccttctgtccaaatctgggaacctgaaagaccttcggaatcttgctgttttagacgttgtaagaggagcgggtaggaccccacgtgctcaggccccacgctttggatctaccccctctgcagccagagggacaagcagctgctgtgctggtcatggcctcatcccgtgtgtgacgatggccactcacgtcttctcattcaacagaagttatcaccgtgcgtcagacttttatttggattttgtgcgtcttgcatgtatggtggggatgaccggccccacctccaagtgtaggcgctggagcccctggggacgcagcgctgcttgttcctgacagatgggttgcacccgtgggaggggtccagatgtgctagctcttgggagtcagtgatgggtgtaccgggaatggcctggcgtgcatttccattcagaaactcccagtccctgcctggaacctggctccttttgctgtttttttccccctttcctgtccctttcctgggtggctggtccctgctgtcgcccctgcctccctggctgcagagctttcctctggaggactcgacacagagcctgcgccgtctctgactccgggctctgctgccctgccccactttggtctctcaggttggagttgaggttgcatctgctgagagccgtgcccacaggtgaggtagtatcagggtcctgagccagagtccactgtcccctggccgtgggtttggagctgccagccatccttccctgagaacccagcctatgactcggctccccttgggcctgccctatctttccttcctgccctggtctgtcctgcggccccctcagtcctcatggccaagtcagccaacagcaacccacacacagaggccacttctggatgggtgtctggcaaggtgtgggtctgaattcagccttttgcctcgcgtgccaacccccgtgtcctgggctctccaagagccaccttaggaagatggggagtgggtctggaccactgagcaactggtcattctgcatcagctcctgaaagtcccttgtggaccaggtccctgatgaggacaagctcttagctcagaacaacacagaatccagcgctgaccataggacggctgtctaatggtccttctctagaaacctctctgtgccattctgaaagtggaaaatgccggcattggtcatgcgaccttgcatagctgactattttcatggtctctccacccactctggccccttcatgttttgtggagagaatagcagacctcgccccccgccccagtgttaagaggtgacttagacaccctcaccttgaagttttcacatattttctatccatagtatttgtatacttcacacgaagacttattagtggataaatataataaactccttcctattgaaataaaatttgagaagaacatggtatgtgccagccaaagcccaaattcaaatgaacccttctgtgaaggggaagaatcagtcttgttgagagaaagtaatttagatgcagaaggaatcccagctgcctagaaatccccgttgccaacagcaggcgaaaggaaccacccatgggagggaatgtcgcagggcagcggcaggtcgggcggcagtgcagcagccgtgagaacgcaggactcacacttcygggctgtgtcgccaacattggcaaccagtcgtcacctgccaacagcgccacccacttgggggagcatggatggtattggtcgggctctatccagctgtttgttagcagtgagtacaaaaaaataaaaaaatgctattttttagctggtcagaaatgacttgaaagacctcagactgttgagttaacttaaaacagcccctcctttgcatctaacaaagtaataaaattgtgtgtgttcatccaatgggtaaatatgcagcctctgctgtttcaaggaaagtgaaaggctcagcagtatgtgttatcttgccctccttaaggcatgcttttcctctgaatgtccttggctcagaaagctggttgtcagggagcttcactggggtctctgaggggacttctccagaggagctggtgaaggagcgcgtgaggacacaggagagcagcatctctggctggcactctgcccagccgggcaggttgagcccactttcacaaccctgaggcggtcacagcccgaccgtcagggggaacccactctcacggtcctggggtggtcactcagctggcctggcaggtggcacccagtctcacagccctgaggcagtcacagcctgaccgtcagggggaacccactctcacagtcctggggtggtcactcagcggtcccggcagggggaacccactttcacagccccgaggcggtcggtcactcagcctagcccagcccagcaggtggaacccactccccactgtcacagccctgaggcggcgggggcgtcctccacctcgctcttcctggagagacgccagtgtgtgggtttggaagcggagtctattttaagtttgcagttcctgaaggagcctgtgttggctgtgctgtctccacatggtcacagccttgaagcctccagccttttaaggacaagcctctgcctggctgcctgtggttggggcaagccgctacttacgttcgcggtgcctgttgcgttttcccacctaagagggcacaggaggtggtggaaggggagtggaactaaggtgggggacttgagagcaaactgtgagtgtccagagctgtaggaggttcggagaagacaccgagtgctcctcctgcagggtgagaaaccctcctgtttctgattgcctcatgcaccaccatgctcaggtcacccggcaggcacccctccctggggctgagcccagatcaacgcggagcagtttcctagggctgcggtaagcagctgccttgcactttgcggctaaagcagcacagatctattatcctaagttctggaggccaggaggcctccaatcaaggtgtcagcagggctggtccctcctgcaggctcctggccttcccagctttcctggtttcctggccttcccagcttctagaggctgcctgcgtatatggtcttgtgacccctcctctagtcacctctcctctctgctggcccctgctgcctcccttgtgcaagaacccctgtgatgacattgggccactcagtccaggaaaccccccatcaagatcttcaaccccatttgctcagcccctttgccacccgaggtcccatgtcccaggagctggggatcaggatgcggctgtccttggggccctgttctgtgcaccacagtccccaccttgggccgacaagaaggccctgtggagactggcagccacaggccctgctctgggtggcccttcagcttcttcttacctcccacgtggctggagaggagggtctcacccaccacagagatg

SEQ ID NO: 94875 - DNA, 198398 bp, Homo sapiens
  misc_feature (1)...(198398): n = A,T,C or G
ttaaagtataatttaaaaaaaatctgtcctcaacctatgatttccagataaatatttggatttgaatcaatatttctagtgtttgaatagcaatttcttaaaatcttttacagttttaatttttaggtagagcaacagtttgtagagaatcatctgtgtgcccggctatatgcatgttttaaaatcttttaatcaaaattactttgcttgcaatgctcaccctggctacctaagaaaaggaggtgctgttataaggacactcagagtttgcacgaattaaagcacagaaaataaaacacaagcagatttcatgaactgagaccacaactctttttttcacaagtataaacttgcttttgcacccatgacaattatacatgtccctgcaggtctactgtattatcctttctctctaccaattgactttctctggtagtcatcttgactgtggcccatacaccagatggatgctgcatataatggctgctctaccctactttacatcaagacaaatctcaattcatttctttcagcttctgttatactgcatcttttatctacatcatttttaaagaatttcctggaaaggaaatctgattggcccaggttatctttttaaaacaggccacaagtctaggcataaatttggacaagccatggactcccttggatcagctttcttttttgctctccttttggcatggctgtaagaaggtattgtggcaatggtagacattgatattacagaaatacagagacaatccctgtttttagtaggcatgtcatctatttctttacaaactcctatttaatacctatgtagaataaaaaatacagttgaagtgacctcattatattcaaaattatcacaaagttagtccaaatatgaagtggttcttcttattcttaatgctttgagtcatatatagaattaataaaacattatttctgaggattagagagaatagaaagccctgaatcttgggttattcagccatttcttgataaaaataaatgtaaaaatgcttttgcattgaaataaaacattacagtaaaaacaaactgaaataataagacataaataataggagaaactacttgtacaaaaatagtaaactattttaaaatttgactatgaatagccatgtaataaattctggggtgaagttttgtcagcaaatttagtggaaatagctcacccttggagattaaaatatgtctttaaataatattcttatatcaaaaatgaaaaattaaatacaattaaatgcaaaacaacacaatattgccaatttcaatgtgtttgaacttttcatttgtgcgatcatactgaagatttactatattcaaactttggggataaaaaatagaagaaaacaagttaatctattgaattataaatttaaatgagtagtatctatacttaatcttttctatgtgtgtgcttgaatatgtataggcaattttaattaactggaagatcgtttgataaaatattgggaaactttgcaatcaggccactgaatattcagtttaattatgttggtatgcacttctatttgcttctaatgccaaggatccattggtaaaatgaatgcccattttgtggtctgttatgcagaaaatgtttaatccagtgtttgatttactctgttaaatcttccttattgaatgtgtttattcatccatgcaaaattgggtatgctgctttctgttactatgacattacaattaaacagctaaaagaagaatagcaagactttctataaaggttgatgaaattcccacaaaattattcagcctctttgttttgtttcgttttgttttgttttgcagggactatgaaaaatgtaaatgtgttctgaatatttctgtattgaagaagctgacaaatacaatagttagtacaaataatcattttgttactaaaactaacacttaaaaaatatttctaatatatggaaataattgctgtcatgacattgattatcttttaaagatggaattgaacatgaactcaaagacctcaattttataaacaaaaatggtatgatagaatagtatttatacacatttgaaatggaaaactttaagttaacttcatctggatatattgtgaaactcctcaagggggttgtatactcacaacagcactagttcatgtaatttgaggatattctccagtagactggactttctttacttttagctctgttttattgtccagagtattggtactggtaaatttttaccaccactacaactacaggcttggagacacattttttaattcaaaattagctttaatactagttctgaattgaaaaaaattctttataagtctggaacttataataagatgtaataatctacttcctgaattattattgcttatttttcatagtgttaagagatacacattcatacaaacacaactattttctaagaatctcttttcaattgaaatgtctgaaatgagacaaagaattcagaaactggatgtcaaggatgctcagtaagcatccttgaaattcaatccaaggaagccagaaaaacgatccaagacttgacagatgaagcagtcatattaataaataaccaaactgaacttctgaaattggaaaattcactataggaatttcaaaatacagttgaatgccttaacaacagactagacaaagcagaggaaagaattttggtgcttgaagactggttattctaatcaacctacacagacaaagaaaaagaaaaaagagtttcaaaaaatgaatgaagcctcggagagatatgggattatgtaaaatgatcaaacctacaactcattggcattcctgagagaaaagaagtgacagtaagcaagttgaaaaacatatttcaggatataatacatgaaaaattccccaaccttgcaagagaggtcgacatgcaaattcaagaaattcagagaatctctgagacatattatgcaagatgactatctccaatgtacatagtctttggcccagtggggtggctcacgcctgtaatcccagcactttgggaggtcaaggcgggcggatcacgaggtcaggagatggagaccatcttggctaacatggtgaaaccccgtctctactaaaaatacaaaaaattagccgtgtgtggtggcgggcgcctgtagtccccgcaactcgggaggctgaggcaggagaatggcgtgaacccgggaggcggagcttgcagtgagcggagatggcgccactgcactccagcctgggcgacagagagagactccgtctcaaaaaaaaaaaaaaaaaaaaaaaaagatgtccttagaataacagaatagatgcaattcagctgttttgctttacgctttttttactgcaattattaactcctatattcatctttactttgcataaagtctacaaaaatacatttgaaataaaaggtatttggagcattttctccatgcacaagattgaaattttcctaatgtagtaatcttttccatgcccagaaaagggcatgaataagtcccataataactttagagaaagaacagcaaaatataagttggtaatattatccttctgaggattgtgctttctatccttaggggaaaaaaagaaggtttcaaactaagggcagcacagattggaaaatctatgctacagagtaattacttgtttattttgttttaccctactaaatgtaaacttcatgaagacaggggttgttgtctgttttgttcattgctctaatctcagcatccaaaatagtgtcttgcacatagtaggtgctgaatgaatatttgaggaataaacaaattaatgaattgcatcttcatggtgtgattgtcagaaaatttctgaatccctagaaggtcagtgatactcatattgaaaagtatatgtatgtagtttatatatctcgtatacatgaacaaatgtatataaatatatatccaaagtatggtagaaatacttttatttatcaggtttttaaccatccatctgtggcttctcattattagagaagattttggaaagttttctgtgtttactctgagaaatccatttgtttccattttctactgtcttatcaagagtctcacaaataatatctgtttcacttctgataatactaaaaacttgctttacataccaaggcaaatgacaaagtggtttactgaacagtacattatacttctcaggggaatctgttttacagaaaatactaatcaaagaccatatcttaagagagttgtgtaatacaactggatgatctataaaagaaagtaatgaaacatgtacaatgttgctaatgattatggtaaaatgcaagagaaatgcagtaaaaagcgtatcaaaatacattttaaagcattttcatgtaaatatttacaattaatggacactgaacatcttctaaatataagacacatgatagtggtgggcagatataaaggcaaagatggtaagcactatgaggacagggactcgtctcatccatctattaggggagtcaaaatcaagtttggtttagcaaacatttattaaattcctactatgcaccgggcttaggttaggtgcaggagtgaaaaagataaatgagacttggtgtctgtcatgctgtacaggggtttataattatggtattgcatgtctgggtgtgtatttttgtgtggatatatggggatatgtgtactctataggaatcgtcataaatgcagtatggcgggttaagacaaagtctagcaccatgtagggaaacagcccacacacggagacgaaaggaggaggaggtggaagcccagcgacatcctgggaataactgttagctagagaatgggaagatcattccatgctgaaagaacagcatgagcgtggtcagagactggaaagaaaacaatgtctggggaaccacaagcatcttagcggataggtggtgtcagggaaggcccactactgcacattatctttgatttattttgaaactcttgtaaaataactacacaagaaatttctgtcgtcaaaaaagtatcctccttcattcccagcatccttccccttttgctttggtgttgtcagacagcggagtattaaataatcgggggcagggtggggggcggttggagggaagcggtgggaggcgacagaccttgaagatacttatgagagctatgttagctgttagacatagacgacctaaagcccctcatcagatacaatcactttaatataaagaccattttaccttaattatttctacggtagcttatggaaactaatagattggaaactaaatgtaaactaaggagaatcttacatgaacttatctagttggtgcggaaaatcgaattcagactcaacagacgcttatccagcgcaaccatgctttcatatattttttccctcctgtaaagcaaggctaatttattgcccgagtggctgtctggactaactggaacaaatacggacgcggtgggagttccattctggcgaaactagggtgagaggttttttgtgggttttcatcgaggagacatggaaacgaaaaagatatggaatatattctgaaagtattggtgtgaaaaaccatgcctcgagggccaacacgaaagtacagaaacgatggcgggaaacagttttttaggctggaatgaaagtctcctttgttcacagagcaaaccgccttcaatttcactccgctctccgtgtctcctaacaattttgcttcagtattgtcaaggggtatccaagtctcccacattcatcctagctaacggaataaaaatctacatttctttcctacttcaaccctccaggctaaatgagctacagcattcagcctggaaaatgagtcgagcttttaacttacgtgtaaacattttaaatataatactgtagtcgcctgcctggaccttccacccaagaactacaacacccagaatgcactgttttcttttccgccttccacggagggaatgcctaacttgatctcatttccacaagtaatagtcacatgacacgtttcccgtcaagatggcggatactctcccttcggagtttgatgtgatcgtaatagggacgggtatgtgtagcctggtgcttcctggacaaagtttaggaagactgtcttgtttctgttttttctgtcagtggcgagttttgggacaaacatcgtgggtcgagagtgggagggagaactgaaaggaagtgaggtagtccggagtcagcgcgggagttggcagttacagggaggggctgggacccgcagtgcttatcgccatttgagtaggggttgatctggtcgatgctgattgctgaggttggttgctgcggtgattcctgttaatttccttagagggaagtggatgtgcagtgtcatgaaatggagggtcgggattttatcaacggagacgactttggcaagacattatgattccttccttattgatttcaaggtgatattccccatcattttgtctcgccatttcataggactttttcatagatttgtatgatcttagcatacatcgcagctcagacacagcttaatcctcagttttacaagaaagatgctcaattattgcccatgtgcgtatgaatttactagggaaagtaaacggattctattttgttgagaaacctagggaattttattttgttgaggtagccattattcctgctttatggtgcttaaagcatcttgctttctaccatcaataactaaatgtgctgagaataaggtcctgagttccagttcaggtgtgtgaccttatctaactcttgttttcccgtcgtttgttcttcatgttttgggtggaaccagaaactcctctgcagtttctagttgacatattcagtgtacaacacgtagcagaacacatatggcagcaatttcaattttttttaatagtgtaagggatgatcattttagatggaatgaaataggttgtttgatggggttttttactgtttgtagaatgtggtaggccagagaagctctggtggatgggaccctgtccattgtgttaatgaattcagttcgttgtcttctcatacagccatgattaggagcagccatgttttcaggttgggagtaaaaataatagctacctgttttcgaatgcttaaaatttcctaatcactgtgctaagcactttacaagccgaacataatcctcacaaccttgttagagtagtaggtactctctgcattttgtagaagaggaaaaggggacttggaaaagttgtaatttgctcaggatcacacagctggtaaatttccaaaggcccattccatcccaggaaaacagtcagtggttctgatcctcagagttgacccatattcgtagaaacaattgagaaaacttggttttaggtcttgcttagtgctagtatgaattgcttgaattgggagggccaggcactaaatctctctgagcctcagtttccttgtttttgaatataaggaaggtaaaatagatggtctttatgttgtctaacaaaaaatgcctgggtaacagttctcagaacagcatggacaggtttattcttagcctgaaaataactgcatggctgcaaataacctggttgtagytgctatgaacagatgttggatgagagctggaaagagccaatggactattcattttttcttttaagtctatactaaaactgagaacagcatccattttggaatagttgttataccatacttgagttttataatcttgctttttttgtgtaggaacttgaggtgtttttaacaatttttttaatcaacaattttttttttcaggtctgggttcaaatttyaattgatgaatgttaattcttatgaatgatgctaatgtttttcataaatattttgccttctgtacagttcagaattggaagacatccatcctgatggagtctgttatggtagaggtaggaagttacagtgagtgagccagagaattgcatcaggtgacatcgcttatatttggaaaaatactcattttatacttatcccagtgagtgcaatgttatttttcagtgtttgggaagaacttatttgaagttaatcttaaaacttaaatttttcatattgtttattggtgacacattctaggttttatcaagcacattgcttaaatttatgatatgtaattttgcttttaggtacatcaaaagtgtaaaaattgaataaaagagtcattccccaaataaatgattccaacaattccaatcatgatttaatttgatttattttttagtgtgcttgggatatttctcttgtgaaatagtttgctgaaagtagcctttaaaatgtttgctttattaaatgtattacattgagcaaatcatagaaaaagcagtgtttcatagattcagttgtattaataaaagtagaagcaataatgcatgcatcagaaacatgaagaaataggctattagatatactttttagcagatttagtcctagttaaaatgtcataaaggaacaattgcttcatcaagtataatcatggaagataatattttataatccctttcaccttgattaacttgcattatcattttctgtaatgcaagatggaaattgttccttaagatcatattttcgagagattatggaaaaaaataaactttgtattttcttagttaagcccatttccttctgattagaaaatacagtaaatatctcttgaacatccaaagacagaagagtaagctaaagtggaattgcggaaaaaatagaagaaaatggaataaagaaggagggccaactggagtctcaagggagaggataaaaatagatatatgtggtaagggtctagaaggtgctcttcagcttgggtacagaattgtcattttcagggtattttgccatttaaaaagtcatttaaatgacagttttgtggattatagacaagtaccattggttgaacgttaaaagtcgtcccagtaacattacatctcactggaggtgacttatctggaagcctgtgtaatctgcagcacagcagagccaagaactcaacagaagagcagtcaagatggaagttataagatctatatgataatattgacatgcttcatacataggggaatccctgagatcatcacttagaacatattcatcctcattttaaaaataattctagcaagctcagcatattagaaccacccccttagaagatacaaggaatgttatcaacttctgcaaagactatgtttggtggggttgctattagacatacaaatgacagtttgtataggaaagggaagagaaaaacacctaaaatgcaaacttacatcaaacatcacaaaggcctgataacatttagtgtagtgacaaatactcatttttcaggtcattcaacccacatttactgagaacctagtcccttcccttgtgaagtttactgtattgcctattctcaggaacgttctggccttcctaacagtcatatccccaaagctgttcttaagacaatgtaggcttttcattgcatccttctttctttttgaagaccatgtagacattcagcctgcattttttctttttaaaagcacactgctcacatcttttggagttcttcccctaagatgggctgcagagtaggttagcttaatttttctactgcataggataaacacatatattcttttgatttaagagttttattgttagccaagcatggtggcacgggcctgtaatccccattactctataggctaaggcacaggcatcccttgatcctggaaggcggaggttgcagtgagcttagatggcaccactgcactctagtcagagaaacagagtgagactgtctcaaaaaaaaaaaaaagtttcattggccaggtgcagtggctcaggcctgtaatcccagcacttggggaagccgaggcaggtggattgcttgagctcaggagtttgaaacctcagcctcccaagtagctgaaatgggtgacacagcaaaactgtatttctacaaaaaaaatacaaaaattaattgggtatggtgacacgtgcctgtagtcccagctacttggaaggctgaggtgggaggattgcctgaaactgggagtttgaggctgcagtgagctatagttgtgtcactgcacttcagcctgggcaacagagcaagaccctatctcaaaaaaaaaaaaaagttttattgctaaagattatggggaaagagaagggatagcaaagataaacatggaaattataaggagtactgcccctaaatcctgattatcttgctagatagtgtttagcaccatacagtagtagatgtggcagcatggtgtatgataatcacatgaccatcctattgtgtgattttgggaaaattacagaatttcttgtgacatcatttagttcatctgtaaagtgagaaatttcaatagatgatctccaaggtagggatctaccagccctaaaattaccattgtatatatctatttatgacaccatgtccttgagaaaaggctaaattctgttctgtgtagtctttttaagaaggaaagtcagtgtttcatatacttcagaaattttcctataaaaatggctgatagggtttagatatttgtcctgcccaaatctcatgttgaaatgttatcctcgttgtcggaggtggggcctgatgggatgtgtttgggtcatgggagtggatccctcatggcttggtactcttcttgtaatagtgaattcgttcttgcaggatctggtggtttattttttaattttttttttgagacagggtcttgctctgtcaccctagttggagtgcagtggcacaatcatggcccactgcagccttaacctcctgggcccaagcaatcctcccacctcagactcctgagtagctgagattacagacatgcatcaccatgcctggctaatttttttttttttatttttgtagagatggggtctgcctatgttgcccagcctggttttgcacttctgaactcaagcaatctacctgccttggtggcccaaattgctgggattacagatgggagccactgtgcctggtcgactggttgtttaaaagtgtgtggcatctccccacacttgcttgccttgcctctcaccaagggagatgcctgcttcccctttgccttctgctatgactaaaagctccctcaggcctccctagaagccgagcagatgcctgtaccatgcttgtacagcctgcagaaccctgagccaattaaacctcttttctttataaattacccagtttcaggcattcctttatggcaacacaggaacagcctaatacagtgactgattagaaaaggcattttcttaaaaatgataggctgcttttttcagaaaaggtcacttaagtagcctttccttgatgttgggatgttccagtcccattccttgatgttggtgaatttaaacattaaggtagttaaccttgactggcagctcattgacttatgatgatgttggaatagcatcacttctgtaagccttgggggatagtaatattgcaggaggagttgtgaaaactgatatttaccaaatatctgtttgtgccagccttaacacaagtgatttcctatatttctaacttaatcttctcccaggatgcctgaatgtggttctcacatcacaggatgtccatagtcctccctgtgtacttccaaaatcttcacatctattgtctacagtggatttttaaaaattgtaagatgccacctattagtggatcatggagtgaattccagcattataaaaatgaggtagaatatatcagaatgcatgtagtaaggatgaatgttgttttttatatatatatgtatatatatatatatatatatatacacacacaccatatatataacatatatatatatacataaacacacatacacacatatgtttttggggagggcaggttcaaaaaatttaaagcatagagtatattgatcagctgaatgacatagtgagtaggagtgaaatggtatttcaaaagtcctttctttgttgtcttctcttttgttcaccagcttgcattatttatcatttgttttcctcatagtttttggaacagatttagtatcggtcttatttgaggtatagtatgaaacactccgttgtcagcgtaagagatgctataggagtgaaagatagcctgcagattttgctgttctgaaaaatgctttgcacttcttcaggcatttattgatggaaaagtatgtttttgtttgcttccaatacctagaaaagtaaagagttatctaactctggagaagactctctgggagatgcttacccttctctgtaaatcatgaatttgagccaatacctcagagagagccacatctgttgccataatttcctctgcagcatcattttcatctcccatgcctcatgtcatttttctcattttctccagtgttttcatgatgttttggataacaggctacagtaattaaattcaaatatggcagcccaccattacattctcatgtttaacataaaatcccaatgcacagaaacaattataattccatataattgacctgttaactcatgctaaatcatctgctattcagtctcagtgcattctttaactaaaaagttagtctgtgcctgttctgtatataaatatatttaaaagtaaaataggctaaaaatcactgttggtgctcattggaaacattttgggggcgtttagttgtggccagcaaaatagggatacattgaaaggttgatgttttgtttttgcttttctaataatttcatttaaggtttggtgtaaaaagagttgataatttatcacagatactgcttttttagagcatgattatgagagctagcatgttatcatattgagggtgtttttgaaaagaacagtttgcaaacagacaggagaagagaccagaggcagcttggccagtatggtgcttaaataagtgtttcatctcatactggattttatcaggagctgaagttggtaatgtattccttgactgatttggtttttatcacattttaaaaagtactggtgaagcaggatattttcctgaccccttcatgggacttgtgaagggagcaccctgtttactcagcccaccgctttcaactcctcataggagggagcacgtgagtgaacaaggcaggaactggaatacatgagtgctggagtcagcctgccgctcttgtgccaggaggaatgaactccactcactcggacctgctgtgtttcacccctcacaagaggggatgtgcagttgagtgggtgcaggagccggggcgagtgcttttgggcactggcaggagtcaactctgtgctggccctgtggtagcatctccgggggtggtgcctgcaacccctgaagctccagagggaatgttacagtgctcttttagctctgctgtccgcagacggcttaagggttaacagctcagtgggccctctgcctttttgtgttaatcggctgccttctaccagtgagggcaaagggcaagtgtgacagcctttttgtgtccacactcatcgttcccgagctcttgtccggcatccaggagaaatgaggtcacatgaatgaattgaaggatggtaaatgtaggggatcttattgctgatggagatggctcttagtgggaaggggagctgcaaagggcaggaaggtagtcttcccctgaatgccagctgtctctggccagattcttcttcgaagttacgctgtcaaggtgtccctctgaagtcgagccacttctctctgatgtccagctgtagtctctaatgtccaactgcttctcttctctctgctggctgagcctggggtttttatgtacacaggatggggtgtggggtgggccgtaagtggtttcggaaaaggcaacattcgcacgggaaaatggggatataagttctcactttgcgtcatggtttcaggcttgagggtggggttttctcagggacctgcccttttctgcctagaatttccctgcctcctgtccctgtcactcactaacttctactctttcttttgagtattctcacctgtcttttttttttttttttttttggtctaggccagtgttctcattgagttattatggctactagttaatggtggttttaatcattttatattgctttgaaatgttttgaatcatgtttctgtgatctgactttgcacatttgttaaactagtcttatttatgtggatttaaaatcatcatgagaaaatttacacaagctaaagtatagagaaaataaagttctacacatggatatgaggcatattaagaagatgctgagctgtgagttcaaatccttattttctacacctgtgttactttggtttaagctatgtaagcaaaatcaatgataattagaaaattgtttttagtacctacaacacactgtcaaacacatgaaaaatattgtctaacatttgttatatgccaagcacggtgataagcccctacaatgcattgtctcattttcacagtaaccctgcagtagatactatatcatctccatttttcaaatgtgaagcctgaggctcagctaagtttgatgtaggtgaaacagttaagacgaaagtttttctgactaaggttgaggtattagattaagtttgctagaatctttcaattgaaaaaatagctcatagtatcaagatgagattattttaacctgggtttgtggttggcagttgttttattttggagagttatcattgttgacattaaaatcctgattccagcagtaacctcatgatgtcagcttcttattattgacagcatcatgacatctgtgtcagcttgcaaaccttcttttgatgaaggtgaacggaatgacctggttgtgtttatcccttaaaactgaagagagaatcaaccactaaagcaatggccagaaatgggatcagagattacagttacattttaagaaatgatttgcttcagtaggaattcttcattgatcctgtaaaccaaaataatttagattaccaaattaatttagaaagtttattttaccaaggttaaggatgcacctgtggcacagcctcaggtcctgatgacgtgccccaggcggtaggggcacagcttgattttacacgttttagggagacatgaaacattaatcaacgtttgtaagatgtataattcattggttccatcaggaaaggccagacaactcgaagtggggaggaggcttctgggtcatagttagttaagagacaaatgaggaatagtcacttatgccttagtctgtagtgaaacagtagggcggaggaagccatcagatacgcatttgtctcatgggaacagaggaatgactttgagttctgcctgtcctttggttgtccacaaggaatttccttatgggcaaattgtgagggaggtatgtagctttttaaaaatctttgtagygatcttatttaggaatagaaagggagagaggtttgcccaacacaattcccaacttgacttttccttttggtttagtgattttggggagatttgttttcctttcacaatcccaaggtacataatttcccactgaaatacttgtgcatgtgctggggtttgccattttgtgtcttttttagtgttcttccaaattaaattttcaagatcaaatatgggactcattgtcctgtttatggagctttttttcttttggttgactattcttttgtttcctacagtcttcaacaactgttagtgcttacaatggatacatcatgcatcttaattgataggatggatatgataataccttttttggtccaaggtcccgctcattaaaaaaaatagtttataaagctgaaaagtttttatttctattttttgtaaaatgattttcatgataggattttatataaaggggaagggttttttgtatcatttttataacatttttgaaatgagtacttattctctttcatcatctattttagactcacagttttatgagtaatgcagtaaaggtcatgtggcacattagtaaaatatgttctgaacacagaaactattctccttatcacaaattaaattttatgttaagtttgaagagcactggcctggggtatactttgctgtgaaaagatcattttggtcacttaaattacaatagaaatatttgtgttaagaaaattaagtaaaaattaggctgggcacagtggctcacacctgtaattccaggactttgggaggcctaggcaagtggatcacctgaggtcaggagttcaagaccagcccaaccaacacagtgaaaccctgtctgtactaaaaatacaaaaattatccaggcgtagtggcaggagcctgtaatcccagctccttgggaagctgaggcaggagaatcgcttgaacccgggaggyggaggttgcagtgagccgagactgtgccactgtaccccagcctgggtgacaagagtgaaactctgtctcaaaaaaaaaaaaaaaaaaaaaaaggaaaaattagttgtagtggagattatttcctggcaaggataaggtcttcagcaaacatttatatttatttaacaaaacttcaagagattttgagttgatgtagttttctccatttagataaaaaacaggatgctacgtccatttttaagctttttacaatggaaaatttcaaacataaaaaagtagaataaagtaaccctccacataccagactcccagtttcaacagttatcaactcatggccagtcttgttttctctgtaatgaggactaagctctgattttttatcttgcccaaattcctacctaaggggtctagggartcatgccctacaaaccataaattctcatcagatgggttttatttgaccctatatattgtgacttatttttcagtctgactctggcattaacattatgagacaaggaaaagatatttagccccaaaatatatttccttgccataccttgaaattgccctgcaaagtctcttgtgggaaaaatccacattctatagagaataccctcccccctttattttgcttcctttctttccagatccaggaggtaatcaactaagagccaggcacccttttaggtccaataggaaacattttacaacctgctctgtctctgaggtctgctacctgaaagattcctctgcacaataaaatttggtccccacaatcctttattttaacctgaactttcctttccattaatctcaggtcttgagataaactcaacaaattgtcagccagaaaatgtttaaatttacctatagcctggaagcacttccccccccaccagctttgagttgtctcgcctttctgaaccaaaccaatgtatttcttaaatgtatttgattgatgtctcatgcctccctaaaatatataaaaccaagctgtaccccaaccaccttgggcacatgttctcaggacctcctgagggctgtgtcacgggctgtggtcactcatatttggctcagaataaatctcttcaaatattttacagagttggctgggcatggtgtctcacgcctgtaatctcagcactttgggaggccgaggcgggcggatcatgaggttaggagatccaggccatcctggttaacacggtgaaaccccgtctttactaaaaatacaaaaaattagccgggcatggtggcggatacctgtagtcccagcttcttgggaggctgaggcagaagaatggcgtgaacccgggaggcggaggttgcagtgagccgagatcgcgctactgcactccagcctgggcaacagagcgaggctccatctcaaaaaaaaaaaaaaaaaaaaaaaatgaactcttttcgtcgacagtatcttccactgtttctctcatttcaccatccaaccctgttattttgaagcaaatcctaaatatcgtatcattctatctgtatatattccaacatatatcaaaaagtgtagggctctcctttttaaacataactactgttttgtttaacatgtgcttaacacttacatcacgtgccctcctttgtatcttcagttttttctaaggcatctatccattttgtttctttggtcttgtgctcttcctagtttagttttcttatctgaaatgattttttctttaattttttaactccattttttcaaaatgttcctgttctctaatcaccttacttttgagtttttctaattttgattcatgttgttctctcagagctgccaccattttgttaatttcttttagcacataataccataattagctacgtttttcatctaatttgtgaggttgacattcttttattgtctattgggatattattttgttccttattcccttttttccaatgtacattgaatgtgattcaactgaaatccttttgcgttgctcatttttaagtgaaaaatgttttccttttgttttcaataggaaggaggggccagtaaaactattcgaactgttttgctgtagacctctcttctttgttttcaggaggtaatcaaacatgtagcctgaaatctgctggctctgttaccctcccctagttttgtctagaccttctctttcctttgcctctattttccctgctgaatttggattaggttcccagcagttactcctcagtgtgggactatcccctcattcacaaggtgaagtctgcaaaaccccttcccagtttctgctgctgttctcagaatggtctgccaagcttccagtgagtgcctgatagcacttttggggttttctggctctcagggctgtaacagtttttttgatcttctcttcatttccttttgcacactttctttttttttgttttgttttgttttgagacaaagtcttgcttttgtcgcccaggctggagtgcaatggcgtgatctcggctcactacaacctctgcctgccaggttcaagcgatcctcctgcctcagcctcccgagtacctgggattacaggcgcctgccaccatgcctggctatttttgtatttttagtagagacagggtttcactatgttggccaggctagtctcgaacttctgacctcaggtgatctgcccacctcagcctcccaaagtgctgggattacaggtgtgagccaccacacccagcctgcacactttctaataccatgtgggtgttacagctattggtggcttgtaactacccatttctattttggggttcatgatgatattgtatcaccttgctttgttatggatgttgtccctgggagtttggtttgggtatcctgattgtactgtctgtttttatgggagttatgggggagattcaacaactgctgccatctttacagaagcctctttttatctttcactttatcatttgctcaagaatagaggtcaagttgttgacctagcataaacattcacttttcagaacttgaaacaaacctttgggtcacttattccaagccctttattttatctaataaggatatctataaggaatctgaattccagaggttaagtgactttcgtgaggtcacagctatttagtatccacctaaaaacaggaagccagtccttctgattcttaattcagtactcttgaatactgaaactctttttattagccatccctaaaggctcacaccatagtgaatttttaaaaattaaaataaattttccaagttaatgttttaatgggtagtatatttttcaaaaaattctaaaaattacatggctataaatacacattttgttccacgaggaagaagttcagagattttaaattacatttactaatatttagtattttgtggggaggttagagtgaataaaaataattgtcaatttaaaaatgatatttttatctttatgttgtggtagttccctaggctacttcatttgcaatttttccctttttatggtagccactaaaaagtagacttaagatgtaaatatttattatagaatttaagataggaatcaacaaaactacttaaacctgggttgaaattcagtttctgcttaattttgtgatgtcattattttgagtggctgcatgaattaagtatgtagtttcacctttgcattcattgctcaatcaagttttccttgccagcaattctgtttttcctaaaaaagaacttactctttattaaagcagtcacagtaaattttctagttctatgtaattttctttccattctggtcttcactggttataaataacacatggaatgactttcaaggtagaaagcagaaatccattttgaaatgttctataaaataaagagtgatttatggtttcatatgatttgagctgaaagtacttgggctttgccaggtcatcaaagtcctgtcaggggaatctattatttattgttcgatatgctgggagtggtgtaagtactttattttatgtttatctcgtgtaagcatagtgttaggaaaaatcaatcccagatactaatacattttaagaatatatcatggggaactaacctaaatgttatagttgtaaatgatgagatttgacattaagaatttggattaaagggggattttgaaaaatgaatagataatggttttatcyctgtaaaatatcttaggtgaggttcttgggtcctgattttagcctagctccttcatttgataatraaacatctctatttcatctagacaggtttttagaaaattgcagaaagctggtaccatacatattagtgtatgatgatataacattccataagcttctaattttttttctagctgccacctttgtaacagaacctcaactgtgaaagtcatgatggaggaaacctcagtttcccccactacaactgttatgaaatggtaacttaatacctaatatttacctgtgtttaataaaaatgacttgccaaagttgttgtcttgcatcagaattacacatgcttgcttataatactgtggcagagcaagttgtttggtacaacctctctaatgaatgtaataattatattcaataatgtgaaatgtttaaatgatattaaatgtttgatgaacctctatagtttacataaagaaaaggttattggactttttaaaaaatgattttaagttgctagatctttgagggtaacttaagtaaatagtaagcaagtgatgccttttttttttccttcaaataactaatcttattgaaggggaaaggaagaggagggaagagaagcaacatttactgaatgccagtgacatgccaacagccactgtgtatagtgtttgataccgttttgtacctgttctccctgcacccatatgagatgtattattaacctcatcttacagttgaaaacgttgtacttgtatatttgtgctcacacattttacagagtgtttccagtggaatgctgtaggatttgaccctcatctaggttatctgtttctaactcatgtcgggcttttctttgtgggagagactgtatagttcaaaataagcacgtacatgtttcatctaaatgcctcacaaatatattgtgtgaacttgagtagtagttcacttttttaagcattgaatttgaacaggtgttattttgaaattaatcaagagtttaagtgccattaaaattgagcttagaaatattaatttaaacaaaacagtcattattttactaaattagcaataagaccaaaaacttttaagtatgcacttagaaatattaatttaaacaaaacaagcagtcattttattattttaccaaattagcaataagaccaaaaagttttaagtatgttaacttttcctaaataaattttttttttttgagacggagtttttctcttgttgcccaggctrgagtgcaatggtgcgatcttggctcaccgcaacctttgccttccgggttcaagcgattctcctgcctcagcctcccgagtagctgggatgattatgggcatgcgccaccgcgcctggctaattttgcatttttagtagagatggggtttctacatgttggtcaggctggtctcgaactcccgacctcaggtgatctgcccacctcggcctcccaaagtgctgggattacaggtgtgagccaccgtgcccagcgctaaataatttttaaaaaccatgaagcataaagctccagttttatacaagtttatcctccttgctttgactacagtttttatttttattttttgaaaccctgatttgaccatgatctggctaaagtcctttcaagactccctattcctcagaggctcaagttcagatactataatttggcttcaacctcttggaaatttttttaaattttgttttatgttggtaagaagacttgacatgagatccctgctcttaacaaatttttaagtgtgcaatacagtgttgtttactataggtacaatgatgtagagcagctctttagaaattattcttctttcataactgatacttcatgctagttgattagcaactccccatttccctctcccccaaacccatggcaaccaccattccactttttgattctgtgaatttgcctatttttaaatacctcatataggtggaatcatgtggcatttgtccttctgtcactggctttatgtttgttgcagcagtgttcacaatgggtaacatgtgaaaacaacctaaatgtccatcaacagaagaatggatagagaaatgtgatatatccatataagggaatattacgtggttattaaaaaaaaaagtaatgaagtactgatccatgctgcaacatggataacccttgaaaactttatgctaagtgaagtaggccagtccaaacactttttttaaaggatcactttttggttctcccttcctttaactttgccaggaatgctcctttccactttcctttttccatcttctgcactcctcagttagggttgttagagaccctgaaagacccagctaatttctcctgttctttggagctttccatgactccctctacagagggagtgtttctttccattgtgtttctatcacagttttaaatacacttattattttaatctctttaaattcttgttacatagactctgagctctaacaggctagggattatcttgcaaaaaacgtatggcaacctctcactacctagcacagtttgttctctctctcccttcctctcccctttccccattttctttttcttttcttcagcaaatatctatggagaacctactacatgcctcctgtatcctggaaattctgtttattgaatgggtgggaagaaatatgaaatcttggccaagaagacattgttaactgtattattagtttgctattttagtcattctaagcatgaagataataggcccttgccatttaacattagaacagcttatgaatttcacaaacttatgggaatgtttggatggaagtattaaggaaaaacacaaatgatagtcattttggctttatgtaatttggactcaaatcatgttcagtattgaaatccattcttggctttgctttaatagcagagatttgacttctgacattgttgatcacagccatggaaataaccacgtgtataactgcctaccctaagtaagagttatttttgggccaaatggaggcgagtaattttattattgttcaccattggagctggcatctggtgaaaataggtttatgtttggggtagtgttagatggaaataatgcttctaaaatatcattctgaaggataataagagtagatagtgttcatagggcaagtacccttgctaacaacagaactgaattctgtgaggtagatcatgatattctcattgatagatgaggaaacaaaggctcagagaagtcaagtgacttatctgaggttgtgcagctaggtgagtagcaaaaccaagattcaagtctaagtctgtctgattgagaccatgcctgtttcattttgttgctgtattgtccttgaatcttcattttcaaacttgcatccaagttggagatagtgaattatcatggtaatttgaattggggatatggaattaccaaattacttggtatttggcaagttatttaacctttcttaacctatttcctcacatagataatactgcctgcctcctaggattataatgaggaataaataagatgatgtatgtgaaaatacagtttggaggataaaaccctatactaatatttggtggcattgttattaatgctgtgattattacacataagagcattaatctttaactactaattctgcttcctgagtatttctttgccattatccttttaactaagctgcttatcagcttttaaagtaccataatgactgcatttcactaaaaaggaacattatttctttaagtgtagcaaaaagttcagatggtcttttgatttcaataagggttttaacttaaaaactgcatttagctatttaaaactttctcctatttccctctactccagaaattcttattttgtttacttgaattatatctaaagttaagcttggaactttatgatggcttgttttcgatgattgatatttaatggttattttcagtacatttgttagaacttcttttgttttgaaccaagcattatattcccacaaaatgttcaacactggaaaactagttcctctgtgaaggcaggctggagcttgtgtttaatatggattttagctagagattgactgtatcaattgtttccatatgcatattgctttttatatacagaagatgactttcccctttcctgaaatccttgatgcttagtgtgtagtttaaacccttgccaaaagactggtgctgtttttttttccactaagtaaaaacacgagaggatcaggatgtttcatcatggtgaaggagttcgtagtagcactatagaattgcactaaacttttaaagcatgctttatttttataactaatataaaaaatactagcttctatcaacatggtagatcatatgacaaaaatttttgaagagtctggaacttacagggtattaactatcaaatagaaaacttgaatttttaaaatcataaaacatcattatctttggcaatttttaatttttggttggtgctggtagaaataatatatatatgtctttttatgataatcagctttatggtatgattaagtttgattctaaagcataaatgttttgtttttatactgctatattggtcaaaagcaaaataatgtatcttgtaagcagcccctttctaaactagctgacatatttcttaagctaaaaagtgtgtgccattccccctcagaggcattgtggcttcggagttatatctgggtttaaatttcaactctagaacttttttttgtttgttctaagcattgggcagaaagttaagatattcatgtcctggttctttttcttcttctctaaaatgcatatgcatatggttatctctcagtgcaattgggagactcagatgagctagtgtgtgaacatggtttttaactgaacaatatatagtagttacagttgctcattgatggtaatttacatacaaaaagattgtaagtacttttaaaaattattttttcttgccaaattaagcagaactgctttttaaaaaatatmtctggccgggcacagtggctcacgcctataatctcagcactttgggaggccgaggtgggcggatcacaaggtcaggacattgagaccatcctggccaacatggtgaaaccctgtctctactaaaaatacaaaaattagctgggtgtgcggcgcatgcctgtaatcccagctactcgggaggctgaggcaggagaatcatttgaaccagggagtcggaggttgcagtgagccgagatcgcgccactgtactccagctggtgacagagtgagactccgtctcaaaaaaaaaaaatgtcttccacataataaaattttcagtatgagtggtatatgtttaagaaacatcttacagtataattaatataaactttataattctgaatacaagcaaggatgggtctctttggtggttaaactgttctatacagcaatggcatgtattgaacattttatgtaaaatatatatatttctacattctaaatgataygggtgtgtgtttttgtaggtttgcctgaatccatcattgcagctgcatgttcaagaagtggccggagagttctgcatgttgattcgtaagtttatcaacgatagcatttaatatttcctaaatatctctatacaggattaaaatttacataaacacatatatgtntgtacgtatgtacatgtatgtgtatatcatacataaacttaagttagaagaaagatcggagttgtttaattttaaccactaatatgtgaaatatatagcatacaagtkttactattttgtgaaatagtgatctttgagaataaaccaaatgcatcattttatttttctcatgagtgattttgtttaaaataacaagtaattctccaagaggcttggaaacctcatgcctgccccttttcctacatatgtgtgtgggtatatacaacctatatatgctattgtattttaggcttcatatttgatggttgtaaaagtcagccaatagattttgagcattattttcttaaacttcatcaaaatttaaacttaggaagtcttaactaggaaaaatatctacaattatgtttttccctttttttcttaaatgtgatgataagcaggaggttgatggaaaactcaagtttaagataaagcataggttaaatctctccatttctatatccgcccaaaacaaacccctaatctcccacctattaagtgcttttgactgttagatcttggcactttaattcttcattgaataggaatagaaagaagaaacacactttttattttctgttagatattaactacagtgtttttcagaatgctacaatataaaaaaaattagatttgtcatagcttatagtgtcttcccatatgttatctcattgtaaatatgtaggaatccaaaaagtaacatgagttaatcttcttttaacctgttctaaattcattttgaaagcatattctgttataatagctaagatttgggagcaactggatgaaatttctaaattggattcagttttcatacacgtcctgcctttgtaatttgcttttactatttcactattgtatgcacgactgcttgtgttaatctctcaattcagtctttttgacatatcatgggtttacatgttagaaaatctgctgccttgggccaggtgtggtggctcatgcctgtaacccagcactttgggaggctgaggtgggcggatcacttgaggtcaggaagtcagaagtttgagaccagcctggccaacatgatgaaactccatctctactaaaaatacaaaacttagctgggcgtggtggtgcatgcttgtaatcccagcttcttgggaggctgaggcaggagaattgcttgaacttggtccggtggtggaggttgcagtaagccgagattgcactactgcactacaacctgggtgacagagaaagacagtctcaaaaaaaaaaaaaaaaaaaaaaaaaaaaaaaaaaaaagaaaatctgctaccttgaaagcccaggtactgagacagtatactttaaaatattaattcagatatgtttttcatgaccttatttaacctaaaattaaaagtaaaattcttgcttctcatttctcaaaggtagaatgatagtaaaagttattgtttgttgagcttgcactacgtgctagtcaacatattagtttctttacacatgttatgtaacttaattctcatcacagccaagtaaggtaggtggtgttatcccaatttgacaaatggggaatgtgggacatagagacattaagtaatttttcgaaatttaccttcctaacatgtataattttagtttcagatttactttgtgtgtaggtatgtgttttttttttctttttcttttcctttttctttttctttctttctttctttttttttttttgacacaggatctcactctgttgcctagactatagtacagtggcatggtaatagctcactgtaacctcaaactcctgggctcaagttatcctcctgcctcagcctcctgggtaactaggactacaggtgcatgccgttgcacccagctaactttgaacattttctttagagatggaatctcgctatgctacccaggctggtcttgaactcttggcctcaaacgatcctcccaaaatgctgggattacaggcatgaactaccgtacctggcctattttgtgttttcttattccagaacatgaggtcttcccagaatgaagactattttacaaatcaaattgggtttactcatattccaaaaataaagtttgattaaaaatataagaacctaggtcttactttgacaagcagtgaatcaattagaaaagcttgataatatggttgtcttaagacattatagtataataaaaatggcatttcaaagtgacgaaacttttcttcttctcttgtacatcctcagacttggtggcttttgaaagtttagatacatctaggtattgattctcccacatcttaagcttagatttggggcttctttggcaccattatctgagggtagtggttgtctgcatactgatgatatctcctgatctgaatctgttctgagccccagtttcatatagcctatcatctgatatcttcatctagatgttccacaggcaccttaacatggctaatattaagccatgaattcatcctccccattctcacctcaaaatgtacagaacccaaaaaacagcatcctgctcccagtcttttggaatgataacaccgtctacccagtttctcaacttaacgaaacttgtatacttctgttgattttcttgctttatcctccagatttattcagatgattttgataataatagaacacatttattgatctcttctaggtactatgatacatactttgaaaacataatttcacttatatcccctaactttaatagctctccatatctctttttctttatgccactgtcatttccctagttcaaacctttgtcatttctcaactgaatgagctcataacctcctgactttatctccagctctctagtttatttatcacactgccaccagtcacatcactctgctgcatgaaatccttcagtgtttctctgctgcctatgttagtgattttccaagtttaaaagaaagacttagtgagggaaccgaaacaacttgaaaagatgaaagcagagctgctgtggttgaaatgagtgggtctgggtcagtgtagatataactggattttaggagaaagtccaaattttctgtatgtcatacagtgccatctatgatgtggccttgcttaaaacaccttcagcctcatctcttgccacttcaatctttaggtgtagacaccagcaatgctgaaatttgcagtagctgaacatattgtagtctttacttcatcttcccactttttgtctgggatttacataaggtatcccctcagcctggattgcctgtctctacccctcagcctggctaacttctatttgtctttcaatgtttagcttacataccacctcctcagggaagtcccacttccttaaaccccactggctatgtgtcacaactatgcccaggtttttgtaatactgtataagagtgccatggcatttatcatactcttaatcattcacttccctgtcttccccactaccctttaagcccttacatcataggtcttattcatctttgtatctccagcacctagcacagttgctggtatacattagatatttgatgggtggataagtactaatacatatttgtgtgtatgatttttttttttgttaatggttagtttggtgttgtataatctttatgtcacacacattttggataaatagccgttgttagagatgtaatctgtggctaaaaattaaagtatgcagtcagtaaccttgacttttagtgtcatcaagtttttaaactatcaccattcatttttattgagaatctttgtgcaaggaattgtgctagatgttaagaatgcaaagataaataaaaatacactgactcacaatctagtaagggaagtaaagaaatagacacacatgctatgctatttgatggaggtatatataaggtgctatagggggacaactaactcagtgagagggcttcccataggagtaggtaccttatctaaggttctaaggacaggtaggatttcatcggatgagatgtactagtaggggttggagctgggagtaacattttggacagatggagcaacatgtacaaagatttgagagatgaaagagagtgacaagtttgggaaactacacgtagttgagtatgacaggtgcagagaatatacaattaagtacaggttggggtggaaagttgagggtacaaaggtagggctcaggtcaaagaattactttatcttatagatattaaagagctattaaatgctcttaagcagaggaattaaatgatcagatgtgtgttttagtactacacagtagatggttggttggagaaaggtaggcagacttgctaggtggctgtttgcaatggtctagtttatggatgatgaactgaagaagctattggcaatcagaatgaataaaaggtagaaggatttgaggttatagcaagaatttttggtggtggatcagataaagtaggtgagggaatggaaggaattacagatgacaccaaagattctggtttgagccgtttggtggatggtggtgacaatttcatttacttatgcaaggaattcaagagaatgttcagacttagggatagaactggggaagggaagataatgtgttcagaattgaagatgttgagtttgaggtaccagtgacataccttggtgaagagatccattcacctagggatgtgtatgtgtatgtgggtatgtgtataaggagcctgagtggaagatctagagctggagataagagatttgggcattatttgtgaataaatggctgttaaaaccaaagaagtgaatagaatcatcctgaaaatgcatatagtgaaacacaaaacaggcaagtatagaaacctgggcaagagcaacttttaaggcatgggtaaaaggagaaaagccatcaaaggagattgaaaggaaacaatcagaggttgagaagaaaagcaggagggtgtagattttcatatatggcgacttcactccttgaaaaccttagtgtctctctacccatagaggagaaagtctgaaggaaaggaacatttatgtaatgttttcctgctctgggccaggattaaatattttatcatttaaaattcattttagcatttaagactcttcatcaggttcagtctacttccccagctctatctgtcatgtctgctttacatgtaaaattataccatatatctgtgttctgtggacatgcctttatttgcttttctaaaaataattttttaaaaattgtcatttaaacatgcaaagtttaccatcataaccatttttaagcatagaattcagcagtgttcagtatgttcacattgttgtgcaacagatctccagagctcttttgatcttgcagaactgaaactgtgtacccattcaacaataattccctattttctactgctcttccagccactagcaaccactactccactttctgtctatgattttgactactctggatgcctcattcatataagtgtacttatgcagcactatatttgtcttttttgtgactggcttatttcacttagtacagtgtcctcaaggcttatccattttgttgcatactgcaggatttccttcctttctaggcctggataatatcccactgtgtgtgtatgccacattttgtttatctcttcatctgttgatagatatttgagctgcttccacttcttggctattgtgaataatgctgctatgaacatggctgtgcaaatgttttttcaagatcctgatttctgtttttttggataaattaaagtgggattgctggaccatatagtagttccactcttaattttttaggaagtgccatactgttttgcatagtggctatactgtttcacattcccaccaacttcctattctttggctttattgggaagttgtatgtgagcttttaagccagagtgcctgtgttcagatcttggtttctccacttactaggtgtgtaacctttggcaagttatttaatctttctgtaccttagtttctttataaaaatgacataatattggtaccaatgtttgcaaaagaaaaaagggcataataatatttaatatctaagattgttgatgggattaaatcaactaatctatgtaatggatttataacagtgcttcatagtaagccctcagtaatgttagcatctactactcttaacaatgctgtttctgccactacaggtgaatagcccttatctgaaatgcttgggacccgaagtgcttcggatttcatatatatatatatatacacatatatatacgtgtatatatatatatatatatatatatatatatacgtatatacacatatatatacgtatatatatgtgtatatatatgtgtgtatatatatgtgtatatatatgtgtgtatatatgtgtatatatatgtgtgtgtatatatgtgtaaatatatatatatacacacatctgggattcagatgtatatatacacacatatatctctgatagataatgatatatatctctgatatataagatatatatatcagatgtatgtatctatcatatatatcagatatatatgataaatatatataaatatgatatatatgatgtatcacatatcagagatatatataagagcatctactgctcttatatatttaaatgctgcttctgccgctacaggtgaatgaatagcccttatctgaaatgcttgggaccagaagtgtttcggatatcggagatatatatcagatgtatatatcagatgtatatatcggagatatatatcatatgtatttcatatatatcggagatatatatcagatgtatatcatatataaatttttgtaatatttgcaatatatagtaatatttgtaatatatatttgtaatatgtatattttgtaatgtttgcaatatatatagtaatatttgctatgtatatatatatatatgtaatatttgcagtatacttactagctgcatgtctctaatctgaaaatctgaaatgctccaaggagcatttcttttgagcatcatattggcactcaaaaggttttagattttgaagcatttcagatttcggattttctaatttgagatgctcaacaggtactaatactactgctactattagataagaatagtaggaagccagattaaaggcgtgactaattatgcctgtgagatttgtggaaagcttcacagaggtgacatttcagctgagtcttgaaagatgattgggatttaatgaggaattggagcatttcagaaagagggaacatactgaaagagcgtgggatgctaggtgaatggtgagaattttagtaggactggaaggtaagctaagtgaattgggttcatgagagttgaaattagaagaattaaactggaatcattctgaggaccttgtatgctgaggtaggaagtactgatttttgtctttaataattatctttaatctcatctgtctttccttcaaactcatatttcatgcttcagcatatcctgtcacctctacttccaaaaacagtttaaatctgttttctctgtctccactcttcctcaccgtcattgccattggactactctgataacctccttattgatctttctgtttctactactaccccaatttttggccttttccccatttctaactgcatcatttatattctctttcttgcttactatactgtgctattgctgtaactatgcactcattttttattttatttttttaggctagtcaagtgaagcagtgggagttgaaaaggagaaggaacaaataaatctgtaactgattatgatcaattagttgtaaataccactgcacttggaccagcctctggacattttttcattgttaatattatttatgcctcttctctgtttctttctccttgatctctcttgccagatatttgtttgttttattagacttttcaaataaccagctttagctttgttgactccttcagtgttatctttaatatgtacttttatctttatttcctttctttggcttggaatccctcttgtgctttttctaactttttgaattaaattcttagctctttatttttaagccttcttttttgcttaatataatcatttatgactatatggtttcccttaaggaccacattagttctctcccatgagttctatgtattttctaatagctgttatgatttcttctttgctctattggttatttagaggttattgttttaaatttcgaaatatatttttaaatttcaacatctttattgacttttaaattccaacactcatgacagaacatgcaaatgacacaaagtaaaaaagttcaagtgtgcctcctcttcctgcctgcaccccacccactctgtcccctgtcccacctcccagaagcagctactgttaccttttatacattctccagagacgtaagttacagaaaaatatgtatttataatgtgtatgttagatttggtatagaaaaattataagatactgagcagttaacatcaaggatctctcatgttgcctttttataactgtatctacctccctcctctgccactcccctgccttcagttcctaaccccagtgaccactagtctgtttttcatctctattattttgtcatttcatgtatagaactgtacagtttgtaaacttttggcattggcctttttcactcagcctgtttccccagagatccatccaggttgttgcatgtatcagtagttcatttatttttattgctgaatgatatttcctattatgtatgtatcacagtttgtataagtattcctctgttgaagggtacctggagtgattctattttttggttattacagataaaattgctatgggaacatttatatagttgttttggtgtgtgtgaatgtaagtttttatttctctgggataaatttctaggagtacaattgctgggtcatatggtaattatatatatttagctttttaagaaattgccaagctattttgcagagttcctatactatttcccattaacagtgtatgagtgatccaattcctctgcatctttgccagaatttgatgttgtcacctttttttgtatttttggtaattctgataggtgtgtagtgatatctccttattttaattcacattttcttactggctaatgatcttgaacatttttcacgtggttatttgccatctgtatatcttttatgataaaatgtcttaatgtattttgactgttttctaattggattgtttgttttactgttgggttttgagttctttatgccttctaaccaaatacatttttaactttagtttttcttttcataaatggtttccaatttaattacactattgtcagagaatgagctctgcatgacatcaattatttggcattttttagaattgcttcatggtttggaagtatatggcttcatgtggcttgttgtgttttctctaattgttagagctttatatgttagatcaaatttgttaatgttattgtttgaaatttatgttatctattaattgaagagtatattaaaatctcctatcctgattgtggaattcttatttttccttgcaattccaatttttgctttatatgttctgagtatagataggggcatacaggtttagaattgtgatatccttgtgtaattactccatttgcctagattttttcttttttctagctttttcgtagcttttttctttaaagactattttgtgtgatgttaatgtaatgacattaggtttccttgttgtattagtctgttttcacactgctgataaagacatacctgagactgggaagaaaaagaggtttaattggacttacagttccgcatggcaggggaagcctcagaatcatggcgggaggcaaaatgcacttcttatatggtggcagcaggagaaaatgaggaagatgcaaaagtggaaacgcctgctaaaaccatcagatctcgtgagacttattcactaccatgagaacagtatgggggaaaccatccccataattcaaattatttcccactgggtccctcccacaacatataggaattatgggaatacaattcaagatgagatttgggtggggacacagagccaaaccatatcattccgcccttggcccctccaaatctcatgtcttcccatttcaaaagcagtcatgccttcccaacagtctcccaaagtcttaactcatttcagcattaatccaaaagtccacagtgcaaagtctcatctgagacaaggcaagtcccttctacctatgagcctgtaaaatcaaaagcaagctagttacttcctagatacaataggggtacaggtattgtgtaaataaagccattccaaatgggagaaatgtgccatagcaaaatggctatagggcccatgcaagtccgaaatctagtggagcagtcaaattttaaagctccagaatgatctcctttgactycaggtcctttgacatccaggtcaccctgatgcaagagttgggtttccatggtcttgggcagctccgcccctgtaactctgcagggtacagcctccctcctggctgcttttatgagctggtgttgagtgtctgcagcttttccaggtgaacgtgcaagctgtccgtggatctaccattctagggtctggaggacagtggccctcttctcacagctccactaggcagtaccccagtagggactctgtgtgggggctctgaccccacatttcccctctgcactgccctagcagaggttctccatgagcaccccgcccctgcagaaaacttctgtctgggtatcccggcatttccatacatcctctgaaatataggtggaggttcctaaaccccaatttttgacttctgtacacttgcaggctcagcaacatgtggaagctgccaaggctttgggcttgcaccctctgaagccacggcctgagctttacattggcccctttcagccaaggctggagctgctggggctcagggcaccaagcccctaggctgcatacagctgggggatccccggcttggcccaagaaaccattttctcctaggcctgcaggcctgtgatgggtggggctgctgtgaagacttcctacatgccctggagacattttccccattgtcttggggattaacattggrctcctagttacttatgcaaattcctgcagctggcttgagtttttcttcagaatttttttttttctatcacattgtcaggctgcaaattttctgaacttttatgccctgcttcccttataaaactgaatgcctttaacggcacgtgagtcaccttttttttaatttttattttttgagacaaaggctcactgtgtctcctaggccagagtgcagtggtgcgatctcggctcactgcaaactctgcctctcgggttcaagtggttcttgtgccttagcctcctgagtagataggattagaggtgcccgccaccatgcctggccaatttttgtattttcagtagagacggggtttcaccatgttggccaggctggcctcaaactcctgacctgaggtgatccacctgccttggcctcccaaagtgctgggattacaggcgtgagccaccccgcccggccccaagtcacctcttgaatgctttgccgcttagacatttcttcttccagataccctaaatcatgtttctcaagttcaaagttccacagatctctagggcatgggcaaaatgccaccagtctctttgctaaaacataacaagagtcacttttgttccagttcccaacaagttcctcatctccatctgaggccacctccgcccagaccttattgtccatatcactatcaggcttttgatcaaagtcattcaacaaatctctaagaagttccaaactttcccacattttcctgtctttttctgagccctccaaactgttccaacctctgcctgttaccctgttccaaagtcacttccacattttcgagtatctttcagcaacaccccaytctactggtaccaatttactgtatcggtctgttttcacgctactgataaagtcatacccgagattgagatgaaaaagatgtttaattggacttacagttccacatggctggggaggcctcaaaatcatggtgggaggtgaaaggcacttcttacatggcagcagcaagagaaaatgaggaagatacaaaagcggaaacccctgataaaaccatcagatcttgtgagattattcactatcacaaggacagcacgggtaaaacccgcccccatgattcagttacctcccaccgggtccctcccacaacacacgggaattcaagatgagatttgagtggggacactgtcaaaccacatcagagtgacacatgaagaagtttctattcctttagaataaaaaaaaaataactttttcatgtatatattgaaactaaacttctaagctaatcaaagtgttttctcaagcaatgcaaggcccacccctctcatgttttttgttatgtagcattttggtgacactttgactttataatccttatttttttaatccttattgttattatgtttgattttgtaagtcaatgcttatctagatttgcctttttgtaccagtttctttgcttgctcttcattctggcactaatgtcctgcttcctgaagttctttcaccctgagtctgttgtttcacactctgtctttgtgatccgcccgccttggccacacaaagtgctgcaattacaggtgtgagccaccgtgcctggcctatttcattgttttaaaacatgtaaagcatacttgttatatagtgatgcaggatttttcttggccactttgccaaccagagacctccacagccggggacacccccactgcctgggcctcgcctggtcctggcagtgtcttgatttcaccttcagtttcaaattacagtttagttagttctgtaattcatagtgttttccatcagcactttgtcctctggcttcttttattgcttttgagaagtctgctgttagtctgtcattcttttgtagatgaattctcttttccttctggtaactttaacattctcttgtttgtgtttatagtcaggcagtcttgctcttagctgtctagatttgggctttgtttttatttatcctgctcaggacttgttttgccacttgaaatcagatattttatgccttttattgggaggaaagtgccgatatagtttttttaatgttgcctgtctcttattcttccttttggaaattcttagaaatatattggatcttctcattcttttattcctcataacatctctttcccatttcttgtctttttcttttcgatgctgtattctgagtaatttcctcagctttatcttctggttttgagtttgcaaactatggcccactggccacttggttttgtaagtaaaatcttattggaacgcatatttacacattaactatggcaggtttcacactacaaaggcagaattcagtaactgcaacagaggctgtgtggcctgcaaagcctaaaatatttactctctggccctttataaacattgcttgcagacctctttgccggttctccccttcttccttaagatgtgtctgattttaacttagctatcatttttatctcaatggcttctagaagttctgtttggttatgttttttaaagctgtcatgttctttgtgtttcaatttattacattgtttttcttttcttttttttttttgagacgaagtcttgttccattgccaggctggagtgcagtggcacaatctyggctcactgcaacctctgcctcccgggttcaggcagttctcctgcctcagcctcccgagtagctgggactacaggcacatgccaccatgcctagctaatttttgtatttttagtagagacggggtttcaaaacatcttggccaggrtggtctcaaaactcctgacctcatgatccgcctgtctcggccacccaaattgctgggattacaggcatgagccaccgtccctggcctatttcattgttttaaaacatgtaaagcatacttgttttatagtgacgcaggatttttcttggccactttgccaaccagggacctccacagccagcaacatccccacgcctggacctcacctggtcctgggccttccactggaggtgacccgcccactcagcctgtgttgcagattgtactcgagtttggtggttccccgagctcttttcctgtgttcaggaagaatgaggatacaytgacaattagaagggtctggatgggcagagaagaattttattgagcgatggaagaggaaaggggactccaggtggtttctctctctctgtcagtatggctgtgtccggggttttttatgggctcagaataggggagtgtgtgctgattgctgagtatgcaaagaaaggctaaagcaaaggcaccactcaaagttgggcatagcagtgtagaaaagcaattaggaaagggtagatataagtaaaataggtgaagggtggggatcagtcagagaaagcatgccagacaggaacacaggttttcaatccgatctgtggatttgacttctagcttggctttcaggctttaaactgtcttcagcttggaggtggggtttcactgtagacctgccactgtctgcctaggcctttgtctgcctcctgccactatcagtagcctctttcacatatttctattatattgccaggtgaggtatcagagccctggcactgggaagtggtcaacttctgggttggtaaaaagaatttgccaacaacagtataggtttgaaaaaggagtttattaggaagaactctgcaaaaggttccagcggggtgcctcaatgagaggactgagcattcagccttggctttttccttagggctatttatggaccttaaagtgggagcttagggttgtaaaatgagtttcaacatggcattccagagatgtatagaaattttagttacttataaaagttgaaagakgcctggaatcagatgtcaactttatataccagggaagtttaattatttctaaattccctagataaggagtttatcctccaaatggcctgtttgatggccaccaggtggtctttgctcccttttaaattcctcagataatgagtttttgtctccagggcctgttcaattgccaccaggcgattttcactttcctcatatataatgtttttggagggtttaatatgatttgttattttctctccagctttagggtcagtatttttccttccttttccccctgaaatgttgaattttgaatttctcttaagtggcactttgcctggaggatccctatgtttctgccgagtggttttgcatttccttttgcctcatcacttactgctattactagtggtcttagtttcctattactgctgttataaattaccacaattgtagtggctaaaaccaatacagacttattcttttacagttctgtaggtcagaagttcaaaatgagtcttacggggacgaagtcaaggtgtaggcrgtgctgcattagttttggaggttccaggggaaaatcggtttccttatcttttccagtttctagaggtcacctgaatcctttggctcatggcccttcctccaacttcagagtgcatcacttcagactctgcttctcattccatctccttcttctgcctttgaattttttgcctccccattttaaggaactttgtgattacattagggcctacctggataatccaggataatcttcccrtgtgaagatccttaattgcattaacaaaatcctttttgccatataagataatatattcatagcttctgggtattaggacttgagcatctttggggagccattgtctaccaccttgggccaaagcaatgtttgtgtttatttctagaattgagggttcctgttgtatgtgagtagtataaattagagcactatatttacttgtgctccaagtttacagttatatatgcttctcaggaaaatttcccctccttctacagtcatgcttcagcagcatgacaccatgcaccttgctgtctgaatatatattctctcatacctttatgccttttttatgctggtccccattgtacgtgaacaattctttctcctccttcaggacccatctaaaatactgctttctagtgatggcttatttgataatcccggtagtatcaatttttctctttgtgctttcaagtaccatgcatgtttttgtaatataacatttttcatactgtattattgtttatagatctgttggccctattagactcttaaagatgggggatcatgtcttatatgtctatatatcctcagtgcctaagagtgcctggaatataacaatccctcaataaacctttgataaatgaataaagtttaagaatatgtatatgtgccaagccactgtgctgttggtagtaatttacaattgcctagtacagttgcctagtataaaggaagcattgatcccttgctgatcatctgtagatttataaatttatggtagttcagatggaagtcatctgttgatgagaaagttgaggtgagcccagtgtcaaatggacagatcacagcaggactggtgccaaaactaagatcttcttgttcctattccagcattctttgaaatataccacactaactttgctgttgatgatttgtattactctaattacaatttatagacaaaatacatcatcaccttatatttttggatattcctcaattaagttctgcttttgaataggctagaagcatgcttctaagaaactgtagtcgtattctggcacttggtggggtggtggtggaatataaagccacaggataaacactggagcatctgcctggtatatacgttttattaaattgaaaacattaaagtttttatcggtctaagtttagacttacagaaaagttgtgaaattggtatagatagtttttgaatatatttaattttactttccctaatgctaatatcttatatatccatagtataattataaaaactcaggaattaatattggtagaatactattaactacagaccttatttgaatttcaccaatttttttctttcttttttttttttttaattatcctttaagttctagggtacatgtgcgcaacatgcaggtttgttacataggtatacatgtgccatgttggtttgctgcacccatcaactcatcatttacattaggtatttctcctaacactatccctcctccagccccccccacccccctacccccccacccctctacaggccccggtgtgtgatgttcccctccctgtgtccatgtgttctcattgttcaactcccacttatgagtgagaacatgcagtgtttggttttctgtccttataatagtttgctgagaatgatggtttccagcttcatccatgtccctgcaaaggaaatgaactcatcctttttatggctgcatagtattccatgttgtatatgtgccacattttctttatccagtctatcattgatggactttaaaattattattattgatggatttttaaaaaaatgttattctgttccaggatctggtccaggatactaccttgcatttagttgttaatagtctcagatcatcttccccatgatacactgtggtgttttcctatgctgatatttttcttgctcttgctatagaatcaaccacttacctctatgaaagaggtttacattaggtatttctacaagagccttgcctctatgtatttgagagtgatatttagaaaccaagatctgaaacactaaaaaccataaatctgtgttgatactttcaattaaatagaatacatttaagaatattatttaaaacatggatatacagtggaataagatgcaaaatataccagatttttttgttaggatgacccatgaaaattaaacattttgtgtttatataggaygactgtaagctctctcctggcttcccctagcataagctttcccttaagccatgagagctgctttgaaggaaatgttggaagccttgtgttagtgtacactttgtctgctctgagatggttggcacatagtaggtactcagtaaatactttctggatgtatgactcaatataatagtatatgactggtgggaccagaaacttacattgttccatgatcatggtcagaatttgtaaccctggccatcttgccagatgtatatcrttgaccatatgggagattcaataaataaattaaccctttcarttcaccatcacatctagaacaacagcagttagcacatatcctggcatcatcttgtcatatgaaggaccttccttacctttgttacttggcagagcaccatatgagggtagacacttcacaaatgctatttggtaatagggtagtgttgaagaaagcttactgttcatttctatgaggattagtatatgaaagttttcacagaactcgtttgatttgcttttcaccttttcaatttttaaagatttttccattcatggagaatgaatgctacttgatattttctttaatattttaaaacaatctaaactataaaaatagtacaataaggactatgttctgaaagggttggcaaactgtggcccacagtacagttgcttttgtgaataaagtttttcggaaaacagacatgtccattcatttttgtattgcctctgtctgcttttgttagacaatggcagtgttgactagttccaacagagaccatatggcttaaaatatttactatctcatcctttatggaaaatgtttgctgaccctccactagaaattttttttagcccatataaacgcatatattgtatatttaactgtacaatagctgtttattaagggaagacagcgaagtaaggatcagagaataattaaataatgattcatattttaaaatttattaaaatactacttttaaagtttattgcaaaataatacatgtatacaagatcatgaagacaacaataaaaagcatactgctatcactttttaaaatataggtgccatgaacatgtgtcatggcagttttttttattataccttaagttctagggtacatgtacacaacgtgcaggtttgatacatagggtatacatgtgccatgttggtgtgctgcccccatcaactcatcatttacattaggtatttctcctaatgctattcttcccccagccccccacctgccgacaggccccggtgtgtgatattcctcgccctgtgtccaagtgatctcattgttcagttcccacctatgagtgagaacatgtcatgtttggttttctgtccttgtgatagtttgctgagaatgatggtttccagcttcatctatgtccctacaaaggacatgaactcatccttttttatggctgcatagtattccatggtgtatatgtgccacattttcttaatccagtctgtcattgttggacatttgggtgggttccaagtctttgctattgtgaatagtgccacaataaacatacgtgtgcatgtgtctttatagtagcatgatttataatcctttgggtatatacccagtaatgggatggctgggtcaaatggtatttctagttctagatccctgaggaattgccacaccaacttccacaatggttgaactagtttatactcccatcaactgtgtaaaagcgttcctgtttctccacatcctctccagcttctgttgtttcctgactttttaatgattgccattctaactggtatgagttggtacctcattgtggttttgatttgtatttctcagatgaccagtgatgatgagcattttttcatgtatttattggctgcatagatgtcttcttttgagaagtgtctactaatatcctttgcccactttttgatggggttgtttttttcttgtaaatctgtttgagttctttgtagattctggatattagccctttgtcagatgggtagattgcaaaaattttctcccattctgtaggttgcctgttcactctgatggtagtttcttttgctgtgcagaagctctttagtttaattagatcccatttgtcaattttggcttttgttgccattgcttttggtgttttagacatgaagtccttgcccatgcctatgtcttgaatggtattgcctaggttttcttttagggtttttatggttttaggtctaacatgtaagtctttaatccatcttgaattaatttttgtataaggcgtaaggaagggatccagtttcagctttctccatatggctatccagttttcccagcaccatttattaaatagggaatgctttccccatttcttgtttttgtcaggtttatcaaagatcagatagttgtagatatgtggcattatttctgagggctctgttctgttccattggtttatatctctgttttggtaccagtgccatgctgttttggttactgtagccttgtagtatagtttgaagtcaggtagcgtgatgcctccaggtttgttcttttggcttaggattgacttggcaaagtgggctcttttttggttccatatgaactttaaagtacttttttccaattctgtgaagaaagtcattggtagcttgatggggatggcattgaatctataaattaccttgggcagtatggccatttttatgatattgattattcctatccatgcgaatggaatgttcttccatttgtttgtgtcctcttttatttccttgagcagtggtttgttgttctctttgaagaggtctttcacatcccttgtaagttgtattcctaggtattttattctctttgtagcaattatgaatgggagttcactcatgatttggctctctgtctgttattggtgtataggaatgcttgtgatttttgcacattgattttgtatcctgagactttgctgaagttgcttatcagcttaaggagattttgggctgagaagatggggttttctaaatatacaatcacatcatctgcaaacagggacaatttgacttcttcttttcctaattaaataccctttatttctttcacttacctgattgccctgaccagaacatccagcactgtgttgaataggcatggtgagagagggcatctttgtcttgtgcctgttttcaaagggaatgcttccagtttgtgcccgttcagtatgacactggctgtgggtttgtcataaatagctcttattattttgagatcgttccatcaatacctagtttattgagagtttttagcatgaagggctgttaaattttgtcaaaggccttttctgcacctcttgagataatcatgtggtttttgtcgttggtcctgtttatatgctggattacatttattgatttgcgtatgttgaaccagccttgcatcccaggaatgaagccgacctgatcgtggtggataagctttttgatgtgctggtgtattcggtttcccagtattttattgaggattttttcatcgatgttcatcagggatattggtttaatattctcttttcttgttgtgtctctgccaggctttggtatcaggatgatgttggcctcacaaaatgagttagggaggattccatctttttctattgattggaatagtttcagaaggattgctaccagctcctctttgtacctctggtagaattcggctgtgaatccatctggtcctggacattttttggttggtagactattaattattgcctcaatttcagagcctgttattggtctattcagagattcaacttcttcctggtttagtcttgagagagtgtatgtgtcgaggaatttatccatttcttctagattttctaatttatttgcgtagaggtgtttatagtattctctgaaggtagtttgtatttctctgggattggtggtgatatcccctttatcagtttttattgcgtctatttgattcttctttcttcttctttattagtctttctagctctctatcaattttgttgatcttttcaaaaaaccagcccctggattcattgatttttttgaagggttttttgtggatctgtctctttcagttctgctctgatctcagttatttcttgccttctgctagctttcgaacatgtttgctcttgcttctctagttatttaaattgtgatgttagggtgtcaattttagatctttcctgctttctcttgtgggcatttagtgctataaatttccttctgcacactgctttgaatgtgtcccagagattctggtatgttgtgtctttgttctcattggtttcaaagaacatgtttgtttctgccttcattttgttatgtacccagtagtcattcaggagcaagttgttcagtttccatgtggttatgcagttttgagtgagtttttaaatcctgagtcctagtttgattgcactgtggtctgagagacagtttgttgtgatttctgttcttttacatttgctgaggagtgctttacttccaattatgtggtcaattttggaataagtgcgatgtgatgctgagaagaatgtatattctgttgactttgggtggagagttctttagatgtctattaggtctccttgatgcggagctgagttcaattcctggatatccttgttaaccttctgtctcgttgatctgtctaatgttgacagtggggtgttaaagtctcccattattattgtgtgggagtctaagtctctttgtaggtctctaaggacttgctttatacatctgggtcctcctgtgtytggtgcatatatatttaggatagttagctcttcttgttgaattgatccctttaccgttatgtaatggccttctttgtctcttttgatctttgttggttcaaagtctgttttatcagagactagaattgcaaaccctgcttttttttatgctttccatttrcttggtagatcttcctccatccttttattttgagtctatgtgcgtctttgcctgtgagattggtcttctgaatacagcacactgatgggtcttgactctatccaatttgccagtctgtgtcttttaattggggcatttagcccatttacatttgaggttaatattgttatgtgtgaatttgatcctgtcattatgatgttcgctggttattttgcccgttaattgttgcagtttctttatagtatcgatggtctttacaatttggcatgtttttgcagtggctggtaccggttgtttctttccatgtttagtgcttctttcaggagctcttgtaaggcaggcctggtggtgacaaaatctctcagcatttgcttgtctgtaaaggattttatttctcctgcatttatgaaggttactttggctggatatgaaattctggtttgaaaattctttcgtttaagaatgttgaatattggcccccactctcttctggcttgtaaggtttgtgccgagagatccgctgttagtctgatgggcttccctttgtgggtaacttgacctttctctctggctgcccttaacattttttctttcatttcaaccttggtgaatctgacaattgtatgtcttggggtttttcttcttgaggattatctttgtggcattctctgtatttcctgaatttgaatgttggcctgtctttctaggttggggaagttctcctggataatatcctcaagagcgttttccaacttgtttccattctccccatcactttcagatacagcagtcaaacgtagatttggtcttttcacatagccccatatttcttggaggctttgttcgtttctttttactcttttttctctaaccttgtcttcttgctttattttattaatttgatcttcagtcactgataccctttcttccatttgatcaaatcggttattgaagcttgtgcatgcgtcatgaagttctcgtgtcatggtttgcagctccgtcaggtcatttaaggtcttctctacactgtttattctagttagccattcatctaacctgttttcaaggtttttagcttctttgcgatgggttcgaacatgctcctttagctgggagaagtttgttattaccgaccttctgaagcctacttctgtcaactcgtcaaaatcattctccgtccagctttgttccattgctggcgaggagctgcagtcctttggaggagaagaggcactgttatttttagaattttcagcttttctccctgctttctccccatctttgtggttttatctacctttggtcttagatgttggtgacctacagatggggttttggtgtaaatgtcctttttgttgatgttggtgctattcctttctgtttgtcagttttccttctaacagtcaggtcccttagctggaggtctgttggagtttgctggaggtccactccagaccctgtatgcctgggtatcaccagcggaggctgcacaacagcaattattgtagaacaacaaatattgctgcctggtctttcctctgtaaggtttgtcccagaggagcacctgcctatatgaggtgtctgtcggcccctactgggagatgtctcccagttaggctacacgggggtcagggacccacttaaggaggcagtctgttcgttctcagagctcaaaccccatgttgggagaacgactgctctcttcagagctgtcagacagggatgtttaagtctgcagaagttgtctgctgccttttgttcagctaagcccttcccacagagttggagtctagaggcagtaggccttgctgagttgtggtcagctccgcccagttcaagcttcctggccactttgtttacctactcatgcttcagcaatggcgacgcccctcccccagccaggctgcctcctcgcagttctcccttggttaggaaagggaaataccccgaccccttgtgcttcccaggtgatgcgacaccccgccctggttcagctctccctctgtgggctgcacccgctgtccaacccatcccagtgagatgaatcaggtacctcagttggaaatgcagaaatcacctgtcttctgcgttgatcacactgggagctgcagaccagaggtgttcctattcggccatcttggaacagttatggcatttttctatgttgtactacattagttagaatgaaagaataagaagctgtaaaaaaaaaagacccagacacaatggcttgaaaacaataactgaaaatattttgtggttaaaacaaatgtgaagagtccatgagcactctggttccttttatctcattttctttaccaccccctagggttttctttgttagcacagtctaaaacgggtcacaggtttgcccaggttccagctttcagagaggagatagagagtggatagacttttgttcttttaagtcctggacctggagtggcatatatcatctttgctcatagttcctggacaaaaactagtcataatccacatacagttttatggagttataaaactcatcgctagcttgattgccatatgtctatatccacctgtgggagatgggagattcggtagagaggtagtggtctttgcttgtaattgcatgcaattttcagagtccagggtgttgaccattacaccatggggctggcttaattgcatgcarttttcttacagaagatgtacttgttgttgttgtttttttaaacaacactttaacaacaacttttttttttgaaaaaattgtttttcaattgattgtaatgggctgtgatgtggctcggatatttgtcccctccaaatttcatgttgaaatgtaatccctagtttagtaggtggggcctggtgggagatgtttggatcatgggagtgcatccctcgtgaatgatttagcaccatccccttgatgataagttagttctcactcagttcacgtgagttctggttgtttaaaagtgtgtggcacctcccccttgttcttttgcttccactctcatcatgcatggtgcctgctttcccttcaccttctgccgtgattgttagcttcctaagaccctttccagaagcggatgttggcacctcactttttgtcctgtctgcagaaccttgagccaactaaacctcttttctttataaattacccagcctcagatatttctgtatagcaatgcaagaactccctaatactggcagtatagtatttttttttttttgcagatgaacatgtcatgatttatttagccatttctctactgttgcatattaagctgttcctgatttcttgttatgaacaaaatgtaaacattcatatatgcatgtcgtttctatttataactgtccaatatttaaaaaaggggcattgtcccacatctttatcacatttttgtgtttgtaaaatggacttatgatatttttcttatttatttgtatttttaaacaattgatacaccatagttgtatatatttttggggtatacgtgatattttcatacatgtatacaatgtgtaatgatcaagtcaagctaattgggaaatatatcatctaaacatttgtctttttgttggaaacattaaaattcttctcttttagctattttgaaatacataattattttaaactgtaatttccctactatgctatcaaataccagaacttattatatctacctgtatttttatacccatttaccaactttacttcatgccctctgctcccctttccttcccagcctctgttaactatcattctactctctaccaccatgacatccactgttttagctccgacatatgagtgagaacatgagatatttgtctttttgtgcttggcttatttcactaaacataatgacctccagttccacccatgttgctgaaaatgacaggacttaattctttttcaggctgaataatattccattgtgtatatatacaatatttctttatccatttaaccattaatgtacattaaagttgattccatatcttcgctgttgtgagtagtgctgcagttctttgatatactgatttcctctttttttttttttttttttttgaatatattcccagtagtgggattgctggatcatatgctagttgtacttgtagttttttgaggaccctccatactgttttccataatggctatactactttactgatctttttctttttctctaatttaaacaactgtcacaaagtcagtttgacttattgaacttgtataacttctgtgcctcaataaaactgaatgttacagtaaggaattaggtgaaatttactttttttttttttttttcaggaagacttacttagttaggtagctagtagaatagtaacctgaactcaagaaatgtaatttcatcctgataaaactgctgagtagggctatcttcctaattttcattaaatatttcttacttggaaacattgaatattaaatgagacaaaaactgtaagactaacagcaaacaaaaatacactttgacttttttatgtgcgtgtattacattcatgactttgtgaagatcatcttagtacttgtaatcttttgctattgtttgcatgtatattctattcaagtgatattggttgatgattctgaagtgccccgctataaatatcaagtacaacctctgttgatttataaacagtgtctgtcattatcaagagcagctaatcttattcaaaatagtcacttcattgttgtgttgccataaatttctgcagacatattttaaactaaagttaacttctgctatattgtaattgagggagctctatttttgtgtgccagctatctgtctcagtaaatgtaaaatctctagtttttttcagaggcctacaattgctgtaaatattaatgagctgcggacacgtgaaatttaaagaatagatgtgatttaaaagagcaatttgcaattcttaaatgtagagattggcatttactttaaactcgaagttgttaaatggcggtgtagtaagcacagaagtttatacttgaacaaaatctacttctaccaataattgttcatttacatgacctcaactgatccttttttctgatcatttatgtcatttggctttatatttttttcatatcagtcttcatgttctgttatatactaccttcatatatatgctaacaattcatttagattcagtttttcttagtcattattaaaaagagaatacttaatatttggggtctttaaatctcattatactaagtgtttggtgaatttatgtcatgggtccaaataattgtcataaatacagttgttgatttttaaatcttatataataaccatattatgcctaaaaggtgaaaacattggtatgttttaataatttcaccaagtaagcatattcatctaaatagtattatcttagattaagaattgatgatgtcattgttatatgtctgtcagtccctggactagatttctctttggcctgacaaatgaattttttttttctaggtaggagttgtgactatttaggaattgtgataaagaaaaatgaccaattatctttgtctctgtagttgttttttgtttattggtttgaaaaaaacctttttttctgtaattataaaaatatacatatgcttgtcataagaattcaagcaacgtatatatctatatattacaagcatatatgcatacatacatgtaagatatacatgtcatccttcccatataccactcccaatagaccatcaatatagattgtccccaacttctgatggtttaacttacagtttttcaactttatgatggtacagaagccatactcattcagtagaactcatatctcaaattttaaaatttgatcttgggcaaacagtatgcgataggatactctcctgtgatgctgggtagtgacagccagtcacagcttccaggcagccatgtgatcttgagggtaagtagctgatactctacagtgttgcctgatgattttgtccaactgtagtccaacgtaaggtatgcttacatgtttaaggtaggctaggctaagctatggtgttaggtaggctaagtatattaaatgcatttttgatttatgatatttttaacttattgtgggtacatcaggatgttatatcataagtcaaggcacatctgtatacatgaaaaatgaaaaatatgcgttatccttcccacataccactcccaagagactcattatcgttttttatgttctgtctgggggacttaagagagaaagtttcatgacagatgaaggagagtatgagtgaaaggatgaaatgaagtgaattgatgtagtgaaaatatgccataatagtatctcaccatcacctctgtgtatttactcattcttttcacatttgagaatattatttagtaatagtatgctgtagtactaatagtgaaagaacaataaaaaattaattttttttttacaaataaatatttgacaaaagctacaaaacgaaatgagaccatataggaatgtataaagaaaattcatcccaatagatttcttgggagctgtagagctatggccaacagtcatttcaaagtgtagcttgaaatctctattgtgctactgaagattatcaggattttttgtagcttcttcacttttttttttagacggagtctcgctctatggcccaagctggagtgcagtgacgccatctcagctcactgcaacctctgtctcttgggttcaagcaattctcctgcctcagcctccccagtagctaggattacaagcatgtgccaccacgcctggctaaaatttgtatttttagtacagacgggatttcaccatgttggccagcctggtctcaaactcctgatctcaagtgatttacccattggccaaagtgctgggattacaggtgtgagccaccgccaccgcccccagccagcttcttcacttttaagggagagttagaatttcctccttcagggctttgtaaggtagggtaggtagtagtggtggggaaagtggagtaggggctttttgtgctcactttttcttcagcattgacttgacattgtattggcatccgttttcctacatgtcattgttggctatgttgtggcactcaagtgggataccctaaaacttgtcaataattgtcacttctcaagaaatatagaaattataatataattagaaagcagttgtaaaactgattgaggttatgttcttttctagttcctgggtatcgaggtgaacaataaaacagactatgacccctgcccttggaccctagggggtatagacattaaacatgctcaaattttatattataaactgtactatgaaaggcaaaaggggagtactactaaagaataataggggcatcatttagatttggtggtaggaggttggagtgaattggagtggccgcaatgcaataatcccttattgacttctcactgtggatatgacactctgaaaatgtttgaaatacaaatgaaagaaaatgacagaggcaagtcttaatcatattaggtttatttgccaacattaaggacatgtgcctgggaggcaggtctgtgcctttctccaaagatgcttttgagggcttcagtatttgaaagggaaagggcagatgttgagggaagaaaaatctttaaaaactgtgttgatagataaaaagacaaaagggttgcatccttttgaatctttgatcagccttcactgaatacacaattttcatatgagtctgggtagatagaggaaatagccactcataccttcatctggctcagtgaatctgcatttttacataagatagtgtagacaatagggtggaggaagcaatcagatactcatttgtcttaggtgagcagaagggtgactttgagttctctttcctttgtccagcacctgtgaagataagctatatatataaggaatttccttgtgggcaaattgtgagggaggtatgttgctttttatcttcatagccatcttatttagcaaccaaatgagaagcagatctgcatgacccagttcccagcttgacttttcccttgggcttagtgagtttggggtcccaagatttattttcctttcacagggagccagcattattttcctccgtaatccttttatagaaatagttgattttttagtagagccggatttttgtggcttgaaaaagctctacctcatggacttatttcagaaattgcatctatattcgtcaagtcaattttatgctattttttctgccttggaaattaactgtacatatgtagaattgggtgagaaatttagttgtgatgctctgcttcagtaatgaaaggacaaaaatactttgtatagatgctcaattattatttgctcttaagaaaacaatattgattcaacagctattcatgtgaggtttctttttagtggcttgtttggaaattaaggttggttagtttatattttctttacagcaaaagtaaaataaaatggctctttctcttctaccaaaataatcatatatatgtgaataaggtaactcagagataagtattttaaaggttttagattcaagactaccataaagggataggagaataaagtaaacgtaacttcacttagaagaaattgtctctttagataaataaaacagtgcaaccctgtaagagtgagaaaaatgaacaagtatcaaagaatcagtgttaccctagttttctcctttcctttttcccccatgttgaagacagattttatgatgtctgtggaactaatttatgaatgaaagtgattgtcatttgttcaaactaatctagtattcaagatgtaagctgttgaagccaacatgtaataatagctaccatttactgaacagttacttggtgctctactaggtattttacaagtgttttaacatttaattattacatttctctaaaataagtatgatttccctccttttgcagatgaggaaacaaactcagagaattgaaataacttgtccaatgtcacatgcgtattaagggaaagaaccaggttttaaatctaggtccatttgacaacaaagcttgtgctcttttctctaagataagctgtagggttggaaaagacacaaatactgggtttgatggtcaggagatctggttcaagttatgactctcactgattagttatgtgacttgtcttgttttcctcaactgtgaaatgggtctagtgcaaaacctcatttgaagagtcactgtgagggtccagcgagttacctgtaaaaagttgaagtgtggctgccaaggcctgataataaaatgtagcaggttccacaaaaactttttttttttttttttttttttttttaagtaataaggaatgttttcaccctttactttggagggcagaatgggaaaaatatttaaaagtaatttatgtatttgtatggtcttaaaccaaatgtcattatatttttaggtcactgaaatccgtattgacatttgcaaatttcaggagcttcatttgcaaatgatattatagtttttacatgaggagagaatttttttcccatagagctcaaacagaggctagattgagacagctcttaatgtagaaattgtgaaacatcagcttctctctacatactactttgacttgtttattcagtggatttgaattaggacagcttttatatgactagaaaaatacaagcaaagataattgaaatgtactgcttctacatacaactctcttctccccttgagcaatttctttactatccttcctctttcaaaaataaagagaaagctttttctcttatatttttcctccttatttttttgtttggttttagttttattgttttgttggcttgctttgactttgaaatggcaactatccctacaaccattgggtgggggtggtagttgaagaatgtcagtcagtttcacagctgaaagtgtgctctgcagcaataaagctttaagcttttttctgacattctaattttgctatttttcctattaatgaaaatagagtttaattttcccttccaagacaaaggaagggttaaatttaaggaaccatgaatattctgaagtagaggatagggagaaaggaagagggaatcagcagtccttaaccctttgatctgtcatttctgtcctctcatctgtgtccccattcttgtttctgtttgtcttcttccttcccagggttgtcagtgaatgtagcaatgcctgactggcactggactgtgttaattgcttgcagaagtgtgctggctgtgggtacgttcttctgtgttcacattttgcaaggagcggaggatggtgatgatgctgttgataacttactatgtgctaggcattgcttcaaatactttcatttctatgttacaggtaaagaaaatgagttttagagtaacttctgtaaaattactgactgaggtcatgctgctagtaaaaggcacaactacaatttgaatccagatttgtctggtgccaaaggcttgattaatatcattgcattaatcgtaataattcccttagttaactataattattatgcattaaggattcagagatgactaagctactgtccttgcccttaagttgctctcagtctagtcacaggaagcattcatgtaatctgattataagacagcatgacaaaactctaatggaagtatgtgcaaagctgtggaagcacagggatcggttctttttgaagagttgaaggcttcacagaagagatgatactgaatttgagtagttctgtctttttttactagttccatcattagttttatggtggaatagcatttggggcataggcaatagcactaataaaagcagagagatatgcaggcccttggctcactcaaacaatgttgagtgtgcagttgtggctgatgcatggcagagaaaggcaatgtccagagataagactggggagttaggttggcactaagttttgaagggtcttatagcaatgctaagaattttggactctactatagaaacattagtgagccattaaacatctttaagccaggaatggcataatactgtttgccaacacctgatcacaatggcagtagtgtgaagattgaattggaaggggaagaaactacaggcagggaaacctttgataagactaatgcaatagatagataagagggagtgagggcctgaaataatgcagcagtggtagggatagcaaggatagaaggggcttaagaaattaactagaatggatatgtgaggaaggaatgatgaatgagtttaagattttttttttctcaggataggaggctgtaaggatggtgttgccatttattgagatagggaaactgaatggatgaccaaattgggggtgtgggacagataataaatttgtcttttggacatgtagagattaaagtacatctgggacttttagtgaaaggaggtgtccaataagctcatgagtcatgatctgtgttttcaaccaactagaagtagatttgagtctggagctcaccagaggggcccagattggagataccaattagtgagtcatcaacagagaagtgataattgaatcagtgaaaacagatgagatcacagagggaaacaaaaattgagggcaacctttgtgtattatttgttcatctacctgccttggttgtctataaacggatttgaatgggtggactaatgtggaatgagtaataactcaaacacaggaaaatctctctccagccctaatgactgcgaacacgatctggtatttctttctggcaggctgatctgattgccaaagcaacttcttgtagattcatagggctctcttaaaaccaagtaacatttcaaaacaacatgttgtacgtgagaaatatatatacaytttttgcttgtcaattaataaaagcaaataagatcctggtcttcctctctgacattagaattgcttctgcataccttgtcatagaggcccactttccttggtcttggaatgaggagatggtgaaaggagctcagctttcttgtgtagcaagtatgtggaacttacagtaaatgagaatttgtgtagggagtaagtccagtatattttctagcctattctattatttgtcaccagggagatgtcatgactctttgtagtacttcaaccaaatttaaatgaaatagagcctcttttaatgtccatagtatattgtactcaataatatctggcaaatcaatactagtagacatgccagactattattttcctattcttatcatatgtgtgaagatatttgtgcacattaaatgtgagataagcaataaaattggttgtattttaggtcctagaaatgaatagtttccccagctctgacattagagtaatcatagccatggaattattatccagatgaattggggtaacaaaataaaaactagatttcattccatctgctgtttgtgaatagatgccactgtctttacttatagtatgtcagattccaggatttgtattatatgcttatgtttataatttaaatattctaatcttgtaaattataggagacagtgtatttagtggaaagagcagaggctttggtgcctgattgtccctggtcttaaatctgggttttgccatttcctagctgagagagttagacaatattcagcttcacagttgttgttgttttctccctaattgtaaaacggggataattgtagcaccagtctctggattcttgtgagaatagtgaatataaaatgccaaactcaacgtatttagtaacctatttttgttgttctacttaacatggattaagccagcgtttctcaacagatgctctattaagccctaatcctttaatatactttaaaaaaaaaaaacatgtttgttggttaactgaatttgagaaattctgcctactgctataattccctcttggagagctataacagacattaacatatttaatcgtgctgagaagccatcatataaacaaatctttttttgttggtgttgtttaaatttttcaacctagcattttccaagtttattttgtcactgtgcattgttttttcttgggagacctattaataatagctcattttgatggggtacattttagaaaaggttaatttagtaatcaggaccaggcactactcaattaagtgtttgacttcattgaaccacagctaccawtatatcttgtggactaaatggtgctagccagcttaaaagtttgggaatttgtaggttgtaatggacaggattagagttcaggagaactgagtttcaattgcagttctgcaaattgtaactgtgtggccctgactagtgactaaactctacacagacaagtcatagtgtcctcatctatgaaataacaccctttctatctgcctcacaagattgccagaagaatctatgagagaatagttgtaaaaacaagttgggaaattaaaactgctgtcaatggaagatggtattactactactctaggaaaaggaattgtaagagcagtgaatgaatactaggacagtctgaggttgagctatgctgctcttgttcccatcgagcaaccttggatcccattagctacctgcctgaaaacattttcaactcctaatttcttaataattagaatggttcccagatgaatatgcttgaatgtcagtagcttcatcttttgttactgttcttggacttgcttacagaagccatttcacaatacaatatgtagtttagtagcatttagctatgcctgctgctgaatattcaacactgaattgtaattatgatgcacaatggaaaagaagattgttaggatttaattaataagctccagttaatgggtttaatgctcagccttctcatatagttcaactttctttgagtctacctgtagtattgcttttctgttaagagatgttaagcaaactgatattgctttaacattaaacaccatatgaaggatgagaaagatcttgatttagtttcagtactatttttttctattatcttcttgattagtgttaagagagggttgtataacttatttccttattgtttctggaaaaccttaggtggcactctgaataagctatgcgaagctttcaaaagattacaaccatgttttctacaatttttttaaaacttttatgtctgcaggtacatgtgaaggtttgttacataggtaaactcgtgtgatgggggttcgttgtactcattatctcagcaaccaggtattaagcgcagtatccaaaagttatattttctgcttctcttcctcctctcaccctcaagtagactccagtgtttgctcttgccttctttgtgttcataagttctcatgatttagctcccacttataagtgaaaacacttggtatttggttttctgttcctgcgttagtttgctaaggataataacctccagctccatctgtgttcccacaaaagacacaatcttgttcttttttatggctgcatagtattccatggtgtatatgcaccacattttctttatccagtccgtcattgatgcacatttaagttgattctatgtcttagctattgggaatagtgctacagtgaacatttgcatgcatgtgtctttatggtagaattatttatattcctttgggtatatacccactactgggattgctggattggatggtagctctgcttttagctctttgaagaattgccataatgctttccacagtggttaaatttacacttccaccaacagtgtacaagtgttcccttttctctgcaaccttgccagcatctgttattttttcactttttagtaatggccattttgactagtgtgagatggtatctcattgtggttttgattttcatttctctaatgattagtaatattgagttttttttccatatgctattgactacatgtatgttttcttttgaaaagtgttcatgtactttgtccactttttaatgggattgtttttctcttgtaaatttgttgaagttctttttagatgttggatattagacccttgtcagatgcatggtttgcaaaaattttctcccattctgtaggttgtgtgtttactctgttgacagtttcttttgctgtgcagaaactctgaagtttaattagattccacttgtcaatttttgcttttgttgtgattgcttttggtatctttgttatgaaatctttgcccattcctatgtccaggatggtattgcctaggtagtcttccaacaatttaatagttttgggttttgcatttaagtctttaatccatcttgagttgatttttgtatatggtgtaaggaagggctccagatacagtcttctacatatggctagcctgttatcccagcaccatttattgaatagggagtcttttccccattgcttctttttgtcagctttgtcgaagatcaggtggtcataggtgggcaaccttatttctgggctctctattcagttccattggtctatgtacctggttttgtaccagtaccatactgttttggtcactgtagccttgtagtatagtttgaaatctggtaacgtgatgcctccagctttgttctttttgcttaggattgccttggctatttgggtattttttggttacatataaattttaaagtagtcttttctagttctgtaaacagtgttgttggtagtttgatagggattgcatttaatctgtaaatcgctttgggcagtatggccattttaataattttgattcttcctattcatgagcatgggatgtttttacattttatttgtgtcttttgatttctctgagcagtggtttctaattcttattgtagagaacttttacttccctggttagctgtattcctaggtgttttattctttttgtggtaattgtgaatgagattggctttctgatttggctcttagcttgcctattatcaatgcatgggaatggtagggatttttgaacattggttttgtatcctgaaactttgctgaagttgtttatcagctgaaggagcttttgggcccagactggggttttctagatatagaatcatgtagtctgcaaaccaagacggtttgacttcctctttttcttttggatgcccattatctctttctcttgcctaattgatctggctaggacttccaatactacgttgaataggagtggtgagagagggcattcttgtcttgtgccagttttcaaggtgaatcctagctttagcccattcagcatgatgttgtctgtgggtttgtcatagattgttcttattattttgagatgtattcctttaatacttagtgtgctgagagtttttaacatgaatgagtgttgaattttatcaaaagtctttcctgcatctattgagataaacatggtttttgtcttcagttctgtttatgtgatgaatcacatttattgatttatgtatgttgaagtaaccttgcatcccggggatgaagccttcttgatcgtggtgaattagccttttgatttgctgctggattccgtttgcaagtattttgttgaggatttttgcatcaatattcaatcaaggatactggcccgaagttttctttttctgttatatccctgcgaggtttttgtttcaggatgatgctggcctcatagaatgagttggggaggagtccctcatttttttggaatagtttcagtaggaatggtaccagctcttcttttgtgcatctggtagaattcggctgtgaatccatctggtcctgggcctttttggttgataggctatttatttctgattccatttcaaagcttgttattggtctgttcagagaatcagtttattcctagttcagtcttgggagggtgtatgtgtccaggaatttatccatttcttttatgttttctagtttgtatgcatagtggtgttaatagtagcttctgatggttatttatattcctgtggggtcagtggcaacattcccttcgtcatttgtaattgtgtttatttgtgtcttctttcttctcttctttaagtctagctaacatcctatctatcttattaattttttcaaaaagccaactcctggattcatggatgttttgaatagtttttcctgtcttcattgacattcttggttgcaaatctttttctttaagaatgttgaatatgggttcccaatcttttgttgcttgggtggtttcagctgagaggaccacttttagcctgatggggtgccctttctctctagctgcccttaatgttgtttctttcattttgcccttggaacatctgaagattatgtgttttggggatgatcttcttgtgtagaatcttgcaggggttttatgtattttctgtatttgactgttggcctctctagccaggttgggaaaattatcatggaagatatcctgaaatatgttttccaagttgtttgcttttcccctgtctctttcagggatgccagtgatttatagattttgcctgtttacagaatcccatacctctcagtcatattgtttatatctttttattcttttttatttttgtctgtcttattttagagaaccagtttgcaagttctgagattcttccctcaggttggtttattctgctgttaatacttgtgattgcattgtgatatccttgtattgtgttattccactttgtcagatttgttagttttttttttttccagctgtttcatccttcagctcttgtattattttattgtgattcttagcttctttgggttgggtttctccatcctcctgaatctcaaagattttcatttctttccatattctgaattgcatttctgtcatttcaggcggcttagcctggtcaagaactcttgttggagaactggtgtggttgtttgaaggacatacaacactggccatttgagttacccgagttcgtgcattgattctttcccatatctgcctgtgggtattcctttaactaaagtgtagagtgagtacartcagtagacttcttttctggttattttcacaggaccgaggcttcgtacagggtctttattggaagctgacttcttgtctttggtttaagagaggtacgtatgttagtgagtatttttggtcttgaagctttggcgtgtcatccagtaggtggcatttaagtgtactggttagttgatagattcttgcttggttgtgtgcctccgctatgtttcctcacagttgcagccatgttccctatcaatgctctgaaagtgtgggttcctctcccctttgagtgctggctgtagaccatagcttggtgctcctgggctgcccactgaaactctggggtgatctcagcatttatgttttttccacaacttggaggcagcagagtaacggaccttagtagtgattttggccaagggtcttttacttgtatcctgggggctccaccccagagagatgcaggtcagcagttgctcagtgagagcagtccaggattcaggatctgtgctctgggcccaacctgggtgttctctagtggcgagcagtcgggggtgggtgtgacctatgggaaatggactgacccctttttctgttgactacagttagttggaggtttgggtaaggcacttagggtctttgcttcttcgttagtccaagggtagcaagggaagtctgctgcagaggcagtggcagagaggctttcagttgctcctgggggctctgtccagggagttgccgagctgctactggcttaaatagctctggtgagggtagctggtgacccaggactggaggacctgcctggtgtggagttatgggaacaggctcccatgtaacagtctggctgcttttctgtagggctgctatggtatactgggtgcctgctccagttgctaatgaccttggattttccagtacctcaaagtatcaacatagaaggttgtraagcagcaaagatgatggcctgcccctccctctgggagatccatccgaggaagatgtggacttgttgccagccttaaggcacctgtagaatatggctggagactttggttgggaggtcctgcctcatgaggaggaatgggattgaggttccacttaagaaatgctgtctggccatctttttgtagagtagctgtgatgtgctggtggaccgcttccgtccctggttggcttggactctccgaagcctgaaggctggaatggctatgtcatccaaagagcaaagatggtggcccacccctccctctgggagcttccttccagggaggtttcaaatctcttttggccagagaacactggcaggggctgctggtcccagttgggacatcccacccagtgaggaggaatggaatcggggaccacttataaaagcagtctggtcacgtttttgtagagccgctgtgctgggcttgggggactgggtctgacctgcgatggcttggagtctccaaagtccaaaggctggaaagactaagttgctcaaatagcaaaaatggcagcccacctctcccgctgggagctctgtctcagagaggtgtgcaatgcggctccctttggctggctagacttccaagccagtggttcttatcctgtgaggtgccatggaagtggggcctgcagattgttgctgcccagtcctctgaattcagcccctttcctaggggtatgtatgggggtctaacctcccacttctttggagtcgcagcttctttagccaggttgcctggaaagtcacagtcaagtcctgaccccactcccagtcttgtgatatttttcatcatagattaactttttccataattttatataaatggtatcatatagtatgtactctttggccaaggctttcactcagcataatgcttttgagatgcatttatgttgtatatagcaggtgattattcctttctattggtgaatagtatcccatttyatggatatacgacagtttgtttattcattctcctgttgatggatacttggattattatcagtttggggctattaataaagctgctgtggaaagacttgtacaagtatttttgtcagtatatgcttttctcatgtgtaatttcctagaaattgaaattactcgatcataaggtgggtatatatttatttattaaaaaactaccagatattagaaagtgcttgtaccattttgtatgttcaccaaaatatatgagcattctggccatccacatcaataccaggtattgacaatctttttaattattttggtggctacgtactggtatctcatatgctcatttgtaatgctattataatatgcacttacctaatgatattgcgtactttttcatgtgctcattaaccatgttcttttgtgaagtgtctcttcaaaccctttgcccatttttaccttttaatatctgtcttattaagttgaaagagttctttatatattctggataacaagttttatttttattttttattttttatttttttttgagacagagttttgctcttgtcacccaggctggagtgcagtggcacgatctcggttcactgcagcctctgcctcctgggttcaagcaattcttctacctcagcctcctgagtagctgggactacaggtgtgtgccactacgcccggctaatttttttctgtttagtagagacggggtttcaccattttggccagtctagtctcgacctcctcacctcaggtgatccgcccacctcggcctcccaaagtgctaggattacaggcatgaaccaccgtgcccgatcaataccaagcctttattagatatgttttgtgaatatttgtgtctggcccattcatttattaaaataatttattttttagggaagtttttcattttgaggaaacctaatttatcaatagttttaattgctttttgtgtccgaagaaacttttgtctgtccccaatgttagatttttgatatatatttattacttatatattggtatatccattcaaataaattttactttgatcttgaagctttcacccattagccagtgctgctcacttaagactttatgttgattgcaaataaatctaaatatctcaacaaataaatatagtgtcagtagtttcaggtttttttcccctccttcaaaacctaggatattttctagttttgttgagtattatatttggaggatgggaagagatagcagaattgtattcttctcaggcaaaagggatggaagtataaattgctatgggaaaacctcaaattctaacattcctctgtcttctctatacctgccatcacccaccttctccttcctttcactgttctctctgatgcaaggggtcactgcttgtaggtttcctgattccaacattttggtaaagggtgaccatctagaattgctactatagctgaaattctagctaaattttaaagaccattggagattctggacagtgyatgaatttacattatttccgaagagaccatcagatgtaagtacgatatgatctatattaataaagctactttcacaggcattttatttaacccttttctctgttagagaaaagcagtatttgtttggtaaaatgcttgagcctaaaatctgcttacttttcagacctgtgttgacagttgatttaggaaacatgaatcagaattgggagatgatctccagtagcattatggaagagttattttatattttatttcatttcattattttattttatgatagggtcttgctattttgcacaggctggtattgaacttctgggctcaaggactcctctctcttcagcctcccaagtagctgggattacaggtgtgtgccactgtgcctggctggaagagtaattttagatatcacattataggttttattttttgtttaattgtttaaaaacctttcatggatttttattttattagagaaacagagaagcaaaaatgaaaatggaaacaaaaccaagaatccctcccaaccagaaccagaatgggtgttgtaggtgggatcaagtgtacttgggggctcatcatacagagtcagtaagtgcaaatcgttttacaaggatccggagccccaatatgcagtgaagaattaaagagttctggttgcaaaaaatccccacttaatgatctaatgtctacaaggtttacctgacctatttaggagacctctgggttgtccaaaacagcgatcttcacaggactgagtaatgaagaataatagctcacccggttattagtgatagttttgtttctattatacttattgcaaatatcttgatgtgatgtgaataactgtttcccagtatctccttttatttttggccctaaaggctaagaatagcacagggtcttccactttatctagagtagccaattgtgtgtctgtgtgtatgtgtatgttttgtgttggagatgggtttggtggtggtggtggtggaggtggcggaggtggtggtggaggaggaggagatttaagtacttacagaaaacttagcagtttttcagtagctttctttgagatctatcaaggttttcttccttgccacatttgttaacccaagagtcatatatattcatgttacctgctaaatgcccatgtcaggcggttcacataatcagtggagaaagctttaagggagccaaagatgttttttaactccttatgtgatgaaacatttcttttgggatctgagaggcctacttttagcctaccacttccacttatgtgagccttccaattatgtgtacttttgaactcttgaggcagtaatattaaaaagtgaagtaagtttaagggttaaagatggtttgttgatgaagatcagtgaattgatttttataccattttctttacttttttttttttttttaattgttacagaagaagctactatggaggaaactgggccagttttagcttttcaggactattgtcctggctaaaggaataccaggtaaagtttgtatctgaccttttaatttgctttgttttattgtatgttacatagtaaccctgcactgaagaaaaccctaagcttcacctgtaacacaggattgattctttatttttattcacttattttacaaaaaatatgtaaagtcacctttttagctaatattttcccaatgtctttatccctttttaaatataaatagagctcgggtgcgatggctcatgcctgtaattccagcgctttgggaggccaaggtgggcggatcacctgatgtcaggagttcgagaccagcctggccaacatggcgaaatcccatttctactaaaaatacaaaaattagctgggcatggtggcacgtgcctgtagtcccagctactcaggaggctgaggcaggagaatcacttgaacctgggaggtggaggttgcagtgagccgagactgcacctttgcactccagcctgggcaacagagtgagactctgtctcaaaaaaaaaaaaaaaaaatatgtgtgtctatatatatatagaaatagaaatagaaatgttggttgaagagtaaactgtttgtacttaataactatttcctaattatttatgtgcccaaatataagatgataattttttccccaaaatcatctttagaaaaaatatcctagtccttataaaatctcacatttactggttgctcttagagtcagtatattttgaacaaaaaccttttttgaaaaaaaagaaaaaacctaacaatttggggaatatacattaatttgaaatgatctcagtggtgattttgtattttatagaggtcacctgacacaatcagccaaaagaaaaaatcaaagaaatttagtatgaattaagtaattttttttctaagagtaggatctcaatactaagctgttgaataccattataaagaaactgtttagggatcacgtatagcataatatggagagtcagttatggagcttgccaacttttataagacagatttaaaaaaatctgtcctactcttatgcagattggtacatgtggcttgaaatgaaatttctgctgagagcatcatacagaagatcagaaactgctgtatcgcaaaagaatttagatgtttggaaaggaggatgatgtagtccagaaaattgtattcagttagctaagacttgttaagcatttatcatgtgccaagcaccattgcattgattgattgatttaatcaatgtacatgacttaatcagtatacatgactcaaaaagtgcctctcatgatgacaaagacactgatrttgaagatgcagtgaaaattcagtttgaatattgttgcatgaaatgagtatagagaaacaagcagtatttgtaaagtagcatttcatataataattcaaactgtgtaagtcaagagagtaaataagtagatatttaactgtttagtctgtgcttaaatattcatgtatttactttgatcagaaactcttttttgcacctcatttttgggaagtgtatgtgagggtcaccttatatttaggcatatttagtacttccatgagaaaatgtagtgtagattctcaaaacaacaataacaaaatataccccaatagtctgaatggaaattaaaaaaaatacatttggtaatgtttattatttattcaaataaaaatgtttttcttgaagtttagtttattttaatgattgttttactccagaatcttgaccctgccactgtctttgtctctccattccctttccctggtccacagttcttttcttaggctggtaacctcatgtctacacattcaaaaatcttgtatttcaccttctcttctacttatgtttggatgtttagtactatctaatattatacttgataataagagctgtatgtcactacttttcttcagtttaaaatgttaaactcaggacaacaaagccttttaaaaatatttattgcctttatgacatttgtaagtttaaaagttttctgagatgaatttacttaaaagatattgtaattctattttcctactagttccttcagtatgtataatacagtttcaaaaagttttctctgagaaagatgtgtattaaacagcttaaaattttaaacagattaaaaattgatccttgacatttgaaaaaggtatatcttgacaccttcaaaaatactgtgtattcaaatactccataaaatataattaggaattactgaacattttaacggaccactttcaacccttagtgagagtttacatgctttagtacacattcttgttttttattgtctttcttgttttttaaggtattcagggactaattattataaagcccttagttatactgggctgaatatttttcagaagtacttttatatgtaatcaaaatttgatatgactagcgaccaaccttcaaagatctgaaaataaatagaacgaagttattttgactctgctgttttgaccaaaaaatgttaaaaaaaaggccctgtttttattaataagtaatgtatataacagatatacttgattctcagcagatagagggttagttgtcctagttcttaagcaatgtccaaacagccatgtccgaatgactttttcaaaatttcatataccctgacagaaatctgtaaatcagatctagtttttgatagtacagattttacacattgtttttctccccttcctttgaagttgaaacacttgttggactttctttggtgactctgaggtgatatcctttgagttttggtaagatgaaataagcatgaatttagacaagaggtaaattttctcagaaaattgcatgtttcacactgcccactttgattaaaacttcttatctgtgttttgtttaggaaaacagtgacattgtaagtgacagtccagtgtggcaagaccagatccttgaaaatgaagaagccattgctcttagcaggaaggacaaaactattcaacatgtggaagtattttgttatgccaggtatgaaaagtatttactgcaggtaaactaaattaatgactttttcactcttctttagaagaagccaacaataaagatttatgtggcattggttgctacaagtcacgttaatatgctggttttgcctgtttttaaatggaactttcagttgtctctgtttaggtaataatgataacattttaccttaacgcctccgaatttaccaagccgttttaaatatattatctcatttgatcattaaaacaattctttgctagggtagggcagatagtagtattaatagttggattttttttacagaatcctcaatggaacttaaggagattaagtagttgcagaaggtcacgtggcttggtaaacggcagggccacacttaagctccagagtggtagagctcaagattaaattccagagtttttcctagtgctccagtgttcttccaactatatcatctttcttagataatactcagtgtagcaaaatggaagattatcatttttgaatacgtaaattttgtgggcataatatttgggtacatattttggtaaattaggatagaacagttggaagtaatgttttaagtatctccctctgagtgagagattcactgtttaaaaacaattggattagtatactttttcaaatgatatatgattgacagattaaaaggtaataatcacatagttaagccattcaagtagttatagagtccagaggcttagaacatcagtctgtcaggcactttaatagtaattaaaacttaaaattcaatacaccagagattcttcaggatacgctttgtcatcttacatatcattgttgtggcagagtgttaagcatgagcctgtgaaaagtttggtaacatgtgcttgacttcttaacctatgttcatatcttcatgtaagtagcattctttccccataatatactgtttgtgttctgtgattttctgtaaaagcacagcctttgaaatgtctggtatagattataatttgtataatgctaaataccatttggtatgaaaaggtacagctgactagatattcttcagagccagtgctgaaagatttaaaacggaagatgatttcaactgaaaagacatatgctttaacgaaatgaggaataaatatttggtaactttcttacgtgcttttgtgtgcccatgaatattatattacttgactacaatatagtgacagtcacactggccttctgagaggtattatacttttgttacttcaaggccactgattactttttatgataattgaggttaatagtttctaatggctgagttgatacattttgagtgcaaagaaaattatctcattttcagttcctgatctcttcagtttcgtttgtataacttctcaaagtgagaaactaaatggttgttggtggaaggtttgtttgaagacaacgaaatagaactctgttatatgttcctcttgccagttagagcgtggagcataaagtgaactgggataatgttttatatgtcttaattcacttggaaaagttagctggttattaatgtcatagtagtaagcaggaaaagccttgagaacatcaggaaagtagagaaagtacagaaaatccatttgtaagggctatctatagtaagtgctggcaacatgggtaaataggactaacaatatctcacttagccccagcaagactggcatccttaatcttttggatcatgttcacaaacttgaaattatatgaaaggggctagggccaaaatagttgtcacaaagttttacattatacaggaggttatcatcagcactcactgacttaaaagccttatttatttaatacatatttctgacaacctcattttctttctgkgtgtgtgtgtgtgtgtgtgtgtgtgtgtgtgtgttgtgtgtgttttccccctagcattgtagtttaaagcagcaaataggaaaggggtatctgctagaggcaagcaaactgagaaccacatggagactagggttatagtccttgacttgctatgtgatactgagcaagggatgtctctattttgagtctatgttttgccattaatgaaacgtgtttggaagggtttggactaggcgatctcagaagtctctctgggctctaacatgctactatttttttttttttgagacggagtctcactctgctacccaagctggagtgcagtggtgcgtggtctctgctcactgcaagctccgcctcccaggttcatgccattctcctgcctcagcctcccgagtagctgggactgcaggcgcctgccaccacacccggctaattttttgtatttttagtagagacagggtttcaccgtgttaggcaggatggtctcgatctcctgacctcgtgatccacctgcctcggcctcccaaagtgctgggattacaggcgtgagccactgcgcccggctctaacatgctactattttaagtgctgcttggtagaataataaaggagaagacagcatcggcaagctgaaagcagactttgggccatttagtgtatgggtaagtggcttttcatatcagaagatccctcaaggccgtcactatattatagtacagtgtaacagctgatgatcacagttgtattccagtgtcttcaggcaaaagttaaataatgttctttatcctccacttgaaaaagtagaggatttgaagtacgttttagaaagatgagtattaaaaatgattagaataaaaattgtacccttttaagagacgaggttttgttatctagaaaattctcttatttcctcttgagtaagtaagagtatcactatatagtagatctttaacattcttaaaggatacattgcaaaatcttcatgcatacccttttgtaaataatgaaaaatatggtacaggtttctggctttttgtcgttgctttttgaaacatatgtgttagtgatgctaatgttacattttgcagatatggagtttgtgtgtatttagttccatacaattttatcacatttgtgggttcatgtattcactgtcacagtcaagttacagagcagaacagttctatcaccacaaggacccctactattatttttctgtaagcacatctgatctacttcttactcacccctaccattcataactcctgacaatcactaatctgttttccagctctataatcttgtcattttaagaatattatgtaaatggaactgtatagtatgtaatgttttggcatgggcttttttttactcagcataattccctggagattcatccaggttgttgtgtacatcagtagtttgttcatttttcatcactgaatagtattccacagtaatgggtttaccacagtttgtttaatcattcacccattgagaaacatcttactgtttctagtttttgctattacaaataaagctgttatgcaattttgtgcattggttttcatgtgactttctctgggataaaagttttcatttctctgggataaatacccaagtgtataattgctgggtcatatggtaattgcatatttagttttaaaagaaactgcagagctgtttcagaggagctgtactattttacattcccaccagaaatgtgtaagtaatccaatttctccacatacttaccttaatttggtgttgtcactttcttattttagccattttgatggctcattttgaatattttttcatgttctcttatttgccatccatataccatttttggtgaagtgtctgttcatgtcttttgcttgtttttaaaattggagtagttttttactgttgagttttcagagttaaaaaaaatccattctaaatatgtgtcctttgtcagatatgtggttggagaatattttccccatgactctagcttgtcttttcatcctctttaaataggatattttgcagagcaaatatttttaatcttgatgaggtctaatttatcaattattattattttgattattttgattattttggtgtgaagtctaagaactttttgcctacctataggtatagattttctcttttttttttaattatagttttatgttgtacgtttagatcagtgttcttttttgtttttcgatctaaggatatccaattgcttcaacaccatttattgaaaaggctattcttcctccattgaattacttttataccttggtcaaaaatcagttgattgtacttggatgggtctattttgaggttctttattctgttcgatctatatgttttttcctccaccaataccacattatctttattactgaagctatgtgataggctttactatcagataaattcctcccaatttatttttccttgtcaagattgttttagatattctagagtttgtgcctttccatataaatgtttaaataagcttgtctatgtctaaagaaaaatcttgctgagattttgataacaattactttaatactatagtttgggaggattgacctctttattattttgagtcttccaatctatgaacatggtatgtctctctacttatgaagctcatctttgattttcttcaatagaattttgtaattttcagcatactgatcctgtacatgttttactaattgcatacctaaatatttaattttctttggaacaattataaatggtattgtctttttaattttggttttcacatattcattgctactatctagcaatgcacttgccttttatgttttgattttggatatttcttgaaatcttgctgaatttacttcccagttctggaagcttttttgtagattgcttgggattttctacctagataattatgtgtacagtaaagaggaaaagttttatgcctttcttttcactggctgcttttttgtttgttggtttggttttgtttttaagaatctattttctcttgtgagtcatgtgttttccatccacagccatatggcaacaggttaattgtgttttctacttatccttaggctcacttaataagccctactttgttcttttttcccagaaaggaagttctcatcacttcctgaggacattttaattatatgctaatgctgggcaatcatgtctctcatttgctgaatatattgttcttgcacatggtgtctcagcatatgcaattcaaatccataatctggccaaatgacaaattaccaaaagtattacccttaaatgatcattcatgccaagagtttactgtatttgcttgtatcaagcaagtaaatagatataagtcaaacttgaatcattggtgcactatatatgtgggatattgttttaaatgtttttgtaaatttccaaaacatcatgtaaaaattactttataatgatatgaaggctaaaatattatgacatgtcttgtcactttagaccagatgacttagcttatttatagagttggtgtatattagggtagaatctatggtttgatttctttctttctttcttttttttttttttttttttttttttttttttttgtcgagacagagtctcactgtgtcaccacactggagtgcagtggcgtgatctcggttcattgcaacctctgcctcccgggttcaggtgattctcctgcctcagcctcccgagtagctgggactacaggcacgtgccaccatgcgcagctaatttttgtatttttagtagagactgggtttcaccatgttggccaagatggtttcgatctcttgacctcatgatctgcacgtcttggcctcccaaagtgctgggattacaggcatgagccaccgcgcccggcctatggtttgattttcatatatgccacttgattatttaacattaaggaagagtaaaatgtgtatttcttggttataaacaatgtcatagccataccgatgagaggtgacagcgtgctggcagtcctcagagccctcgcttgctctcggcgcctcctctgcctgggttcccactttggcggcacttgaggagcccttcggcccgccgctgcactgtgggagcccctttctgggctggcaaggccagagctggctccctcagcttgcagggaggtgtcgagggagaggcacgagcgggaactggggctgcgcgtggcgcttgcgggccagctggagttccgggtgggcgtgggcttggcgggccccgcactcggagcggccggccagccctgccggccccgggcagtgaggggcttagcacccgggccagtggctgcggagggtgtactgggtcccccagcagtgccagcccaccggcgctgtggtcaatttctcaccgggccttagctgccttcccacggggcaggcctcgggactgcagcccgccatgcctgagccttcccccgcctccgtgggttcctgtgcagcccgagcctccccgacaaatgccgccccctgctccacggcgcccagtcccatcaaccgcccaagggctgaggagtgtgagcgcatggcgcgggactggcaggcagctccacctgcagccctggtgcgggatccactgggtgaagccagctgggctcctgagtctggtggggacgtggagagtctttatatctagctcagggattgtaaatacaccaatcagcaccctgtgtctagctcagggtttgtgagtgcaccaatcgacactctgtatctagctgctgtggtggggccttggagaacctttatgtctagctcagggattgtaaacacaccagtcagcaccctgtgtttagctcaaggtttgtgagtgcaccaatcgacactctgtatctagctgctctggtggggccttggagaacctttgtgtctagctcagggattgtaaatacaccaattggcactctgtatctagctcaaggtttgtaaacacaccaatcagcaccctgtgtttcgctcaaggtttgtgaatgcaccaatcgacactctgtatctagctgctctggtggggccttggagaacctttgtatctatactctgtatctaactaatctgatggggatgtggagaacctttmtatctagctcagggattgtaaacgcaccaatcagcaccctgtcaaaacagaccacttggctctaccaatcagcgggatgtgggtggggccagataagacaataaaagcaggctgcccagccagcagtggcaaccmgctccggtccccttccacactgtggaggctttgctcttttgctctttgcaataaatcttgctgctgctcggtctttaggtccacgctgcttttatgagctgtaacactcaccgcgaagatctgcagcttcactcctgcgcccaccgagaccacaagcccaccgggaggaacgaacaactccagacgctctgccttaagagctgtaacattcaccgcgaaggtctgcagcttcactcctgagccagcgagaccacgaacccaccagaaggaagaaactccgaacacatctgaacatcagaaggaacaaactccagacgtgccaccttaagagctgtaacactcaccgcgcgggtccgcggcttcattctttaagtcagtgagaccaagaacccaccaattccggacacaccgatagcattctaatattttacatttgattgcaaggaggactaggcgagaattcaaatggattagtgcaaacccattaccactgcttggaaaatacgtcaaagtatttgggcaatataattctaatatatgtattctaatataaatatatagggtgtatttatatattatgtattctaatataaatatataggatagttattttttgattaccatgacttatttaaaaagtattctgaagtattattcaacttaaaggttttcatgatcatttcaacattaaatttaatacgttgggtattgcaaaacaggctaaagactaaaatgtaaattgtagtaattattctatcataggctaggttcaaacatcatagactgtaaagaactatccagattgttttatcagagctttgttttcctgattcttccttacaataagtgggctacttaatattttggacctaaaatatttttgctacacaaagattgtttttcattgaagtgattttttgtgattacacaatcgagttatggaagggaaatgaaaaaggactagtgtttattggatattatctttgtggcaactgctgtaacctgttgctttacatattaatttcatttattctgtgcagcagtcatgtgcatgagctataggtacatcttactgacaaacagaagctcaaggaatgctagagatagcagagccaaatttgaacttgtgtttttctaactcaaaaacgtgtgctatttccagtgtatcatgttgtatttcagtcatcaggtaaacacatgtatgcacatcaagggaaccaaccgttccaccaagtgaattaagtatttcctttgtgaagactagcacctaagaaagtgcatttacttctttaatttactggaatactatatagtattgtaatgtagttatatctgtaatgagaaattaaagtgcctaactcccagtgttaggaagctatgggaagaatccaatattctttagttgttgagaccagtttatatgccatgggattttttaaattgatacataataattgtatatattcatgggatacaatatgttttggtacatataaacattgtagaatgatcaaattaggctaattagcatatccatcaccttaaacctttattattttttgtgagaacattcagaatcatctcttttagctatttgaaatatgcaatgcattattgttagctatactcaccttactgtgtgatagagtaccagaatgtattcctcctacctaactgtaacattatacccattgaccaacctctcctcatcttcccctccctcctgttctccccagtctctggtaaccactatcaagttttttagatttcacatatgagtgagatcattcagtatttttctttctgttctcagcttatttcacttaatataatgttctccaggctcatccatgttgtcacaaatgacaggatttaattttttttatggctgtgyagtattctattgtgtatatatgccacattttccttgttaattcatttgttgatgggcatttaagttgattccatattttcgcaattgtgaatagtgctccaataaacatgggagtgcrgatgtctcttcaacctactgatttcatttcctttggctatatacccagtagtgagggtgaagattgctggatcatatgatagatttatttttaattttttgaggaacttctgtactgttttccataatggctgtactgatttgcattcctaccaacagtgtgtgagagttcttctttcttaccatgtaatagtttcatagtttatgtggggaaataaaagtagctattgtttctagttttagatcttgaacagactataaaaaggtgcaatatattaattcacacttaaatcacacaaactcaagttattcttaggtaaaatatcgttgcttgttaattgcataaagtcatctagtttctttagtgagaagagattttatctttctaaaatattaacaatagctttatacattttctgtcctattttctgcattgtactgaacgttgtttccctttttctggtataatattaaagcaggatgaaaacttatttgttaccttcaaatgaaccaactctaatgtattcataccaaaaataaagatttttttgcaataggaatctaaaattctactgatttattttgaattcttaaatttccacttaaaaattatacaagcaacaggagcttctcgaacactaatacttctaatttagatgaagcgaatacaaataaaatgtaaaatcacctgtaatttttacagtttagaggaaattactcatcactgtctacagttaagtgtgttttaggccagaattgaaacactgcccaactaaatgtggtttaaacaagtccataggtaagtgggtgggtgggtaggtagaggatttgtaattgtgctgcttcagcccatcagagccctggggcagcactccacacttctcttagccttccatttggagttacaagatgtttgccaggatttcaaagaggttctcacataagaaaaaaacttctaaacatgaggaaaaggggaagaggttttcttaacatgtttatgcttttttattttactggaaagtcttcaacaagggcccccagcagactcatcattatcttattggctgaaactggataatgtactcacttctaaatcaaacaccagcaaagggaggtaaaattatcataattggttttgatctgtcatgatccatccccaaggactgagcagcttctctctaatattggaacaaaattggagctcttaaagcaaagagaaaaagggtatttgttgttgagtagacaaccaacagtcctgctgcacaccattttatgaagttttgttcttgggtaaacatgacaagaggttgacatttcacctgtattctatagtatgtgttaacgttttaggttggtaacaaactgggaaatatatatctaccaatgtatcatattgcagcaattcaaaattgatttcactttttatattgctattttgtagaacaacaatttctgaatagtctgatttttgtaattcttatgaatagccattaaacatttattttaggaataaacagctgggtagcagtataatatatactgtgaaaatcagaaataaatggccttagaacaaagtataaacatcaaagtaaaagaatacaatgtctgcagcaagtcgtrttgggtaagagaaggtgcaaatggctgaaaaataaatggtgaacacctgtgctgaataaattaaacacctgttcctcagtttttcatttgattcctctaaaaggctgttacaaggtattcataagacacatttactttgaggtgtttctttgttattactattaattgggaagcagtactagatgatatcagaatatatacctccaaactctcagagtagtatatgaattttggcaattagtgaaaaatgcatttacaaaaagcagtgttaagcagtttttattaagaaaaattatctaaaaratattgttacattataaatgacctttggaattaaagctagcaatgtaaatgacactaaatttaatttgtgaaatcaattttgatagtgaacatttttataagaactaatgatgcagattgttttcctttagataaacagtctgcagcttaagatggttcgacttaatgatttttcaactttgtaatggttttattggggtattaaatgcactttgtcttactatattgggtttatcaggacgtaaccccatcataagtcgaggagcacctgtgtatgttaaaatcattgtaatatcttagaactccaaggttcatttgaaggcttataatgcagctacattgttttgtaattggtaaatgtgtttttatagttttcaaacacttttaaattagtagaattgaactattactggattctgaggttttctctgaaaggttgaatatctttttaagaaaatgtcttttaccacagtataaagttttaaatttggggaaagataacccttttagatgaacagaattttgctttctgaggatgtcagtggagttttaggagcttttgggtgtctttatattttctcattaggtattaacttcaaccttggcagaactccaaaaatactgtggttgtttttaatggaaagtgaggacagtgttgtgtttttattgcttgtgttttccgtagtgctaggaatctcaccaaattataatgttgagaacagtaaaacgatagtttattgatgtagaaaaaatttccgaagaataatttcttctcttcgcttatacctttaattaagtattttgacttatatcttccaggttgtccagtactggttaatgtatttcattcactctatagggcccccatcacagaatgtaatagagaaccactgactagatcatttgctatgctcagttttcacagtgtcatcatcatagtctgtaataagagaagttgccatattttgtcttatctgtaaagtgtaattaattatcctttcttaaaattaaaggcatggaacttttgctttaagagttaggcatggaacttttactgaaaaacaaaaaattaggtgtggaacttttgctgaaaattgtccccttagatccctcatgtaacacactttagttttgttggttttcaagataataaaagtgaataagagtgtgaacaattctgtagaaaatatataaatcacctttcatattatgactcttcattcttaatgctgttaatagcgatgctattatgtgcttatatggccaatgggcttttgtcatgtgaatgcagaaaacctaggtatacaggttttgagttgactgttgagctgtgggcagtttaacaatatcttatttttgagtagttttttttttttttttttagacggagttttgctcttgttgcccaggctggagtgcaatgggacgatcttggctcactgctacctccgcctcctgggttcaagygattctctggcctcagcctcccaagtagctgagattacaggtgcccatcaccacgcccagctaatttttgcattttagtagagactaggtttcaccatgttggtcaggctggtcttgaactcttgacctcaagtgatccacccacctcggcctaccacagtgctgggattacaggtgtaagccaccgtgcccggcctgattagtatcttatctttgattaaccttttagagtttataaactacttttcatatatgttagcttccttatctcacaacartttcataaaaggtaaggcaaatggactgatccccattttatatgtggtgaatcagagagattaaatgacttgccaagtgtttcctaagtgataaatctaggatagaacaaagtgggtgttttcctcactttggtttcctagatctcaaaaatattcatgtaacattaatgwtatcaatttgtttcttcactagattttattagaattactrtaacagtaaatatggcattttatttcttgacatttgagtgttattctatcattgtccctcatttttttttgtagtgttcattgtgttatttttaataaggcacttctttttttcacttaactcggactttctaatttacaataccgtgtttttttcttggccttattttttgtgtttttygcaacaagtttgtttcgcatttgaaacaaaaatagtctgcacgtataaaccattattaattaagcatttattggataccacatctatagagcagtgtggtaggtgtcgtgaggggcacagaaggagcggtgctaaggtattccctcaaggaattacagtctgatttggaagataaaggatatactggaaaactaaaggactattaaaaaggaatggataaatacatgcaaggtaaactgcatatgtgtattatgggagcatggtataatagagtgatgagtgtaattggagtaaggaagactaattggaagttaaatttaaactttttcttaaagtagtttgctaaagtatgtgattatgtttgagaatggaagaattgtgatattatgcagagtgggaagaaaaggacagaagaaacaaatgatatgaaccaaactgtcatgatttgacaattagaattgataaattyggagttagagatgccatgttggaaagtaggtggagatgaaaccagaagattagtaaataaggaaggtggtttggtttagagacaggaaaaggaagatttttttgtggggtatttgatataaggaagggctactgttagggctactgttagtcaactagcagatttttacttgccaagaccaatcacatacaaggcattctgccaggtattgagcagtgtggcaactcagtgaaaatagtgggttctgtggaggataaaatatcacagaaattcataaagcaggcagactgaatgggagcctgttctataaatcaagacaatggtggactgagaatgttagctccaataataaatttggaaatggggcttcgactagagtaatagacatcagtactaaaataggcaggaaattatacagaaaggtcctattagataccacattgtgataggccaacttaatcttttcaaggcagatatttttccctttattgaaggtcttctgtcgtatcaccaagtcaggaattcctcagtaataatcatctttgataactaccactgttgagtatttactatgtcccaggcactgtgtcaggctctttgcatgcagtacttaatttaatcttcaaaacaaccttgtggtaggtggtattatctctgtgtcatagatgggtaatttaggtggtctcagagagggtaatttaggtaattacctaaattgagggtaatttaggtggtctcagagaggatacataagtatctaagttcgcagagcttactagtcatatggtcagggtttgaaccaagatctgttattctgaagactgtgttcttcatcactgtggtaatttgcttccaatacagttcccctgtctgtcttaaattctcaaaaatgtgcatgtgacatgaaatctttatatctttcaaatcttaattttgtttcatattttactgaaacattaacagatgaatgtttaatgtctgagtcacataagcaaaacgtacactgaacttgataaaaggggtaagggaatatatatataaagcctggtgtttattattatatttcttattagtcaggatttgcatgaagatgtcgaagaagctggtgcactgcagaaaaatcatgctcttgtgacatctgcaaactccacagaagctgcagattctgccttcctgcctacggaggatgagtcattaagcactatgagctgtgaaatgctcacagaacaaactccaagcagcgatccagagaatgcgctagaagtaaatggtgctgaagtgacagggkaaaaagaaaaccattgtgatgataaaacttgtgtgccatsaacttcagcagaagacatgagtgaaaatgtgcctatagcagaagataccacagagyaaccaaagaaaaacagaattacttactcacaaattattaaagaaggcaggagatttaatattgatttagtatcaaaggtaagtactaattttacccatctttgcattgaaaacagtatctgggcccataaacccagtttttgtaattctctgagatgcagaacatttgttttgtaaagagatagtagccagatgtttgtaattcatttaaaatattccttaagtacaaattaaaaacatatttaaagtgctcacatgaaaatgctttaattatgtttttaatctatacctgaagaatacttttgtgcttgagcacatactacaacctaatattctctggacactatgaattctatcaaaagaaaaattctaatgaacctgtttagaaatccatgttatttacagtcaatttccatcgattcttttagcctttatgtatagtaactattttcacaactgtatgatgatgaatactcagaataaaccaatgaatttttaaaaatcgtgttcacatggacacagcgaggggaacatcacacaccagggcctgtcggggttgggggttagggaagggatagcattaggagaaatacttatgtagatgatgggtatgtagatgacgggtatgtagatgacgggttgatgggtgcagcaaaacaccatggcgtgtgtatacctatgtaacaaatctgcactttctgcacatgtatcccagaacttaaagtataatttaagaaaaaagtctcaaaaaaatcatgtgttcaggtttgaaagcttcagaggaaaatttaatagtgatggaggcaggaaggctgggaagaaagctattgtcttcggttatgttcctgaacataactaacttgaatgttagttcactgtaacttcacaggaggtccctccatcttagaagcgtacaatattgcatttggtttataggaagcaagactatttttagtgcaaaagaatagaaaatcagtaagataaaggattatggccttaaagggtcatgatacaggacagggtaaaagtagagaaaaacagactaaatcctataagttgagagctaacaataagtaattgaaaagaagtaggagaggatagtgaatagcacaagacttgccacagaactagcacagaactaggcttttcaatttaatgtactttcttcaagttccaagtgataggggacagagagggaccaaaacatttcccttgacaagttgtttctgcaaatcccatatcctcatactcttgctccctttgaacttgatgcctgaaaatataaatatctttttactacccatttttctttctgtctgtcatgtagcactctgtgtctgattttgcatagttggctattgcattggttctacttcatacttccgtactatctctcccacctccatctactttgaccctgtcatgatttgaaatctagcattttttccacattaccttggctgttcatctgtggatggaagtttaatcctagctcactaataaccttcctggtcccatgagcagtactctatgaaataggttaaacaaaacataaaaactgaacaagtcaaataacaaatgggctttgtgtgacaattccattttgaagtaattacttggaatttggaatgttttacctaaataaatgatgatataaatgtggttaagaatcaaggctatttcataaaagtctgtaacttttatgttagctgaaatttagtatatatcttgcaaagggaaatggtagaagacggtgctgtttcaattgtaggaattggtgtagaaaattattcagttgtataagaaaatgaatgctggttgtgggaggaaaaagacaattgaattagaagttgacacatttgaagataccctgaaggagacttctgggtattttcatcggtttgaatggttagtaataaccagttctcttatggtaagtaaaaaccaaacatgtctagaggcagtggactaggcagttgggactgcgtcctgcagagtttcatgggttcatacgttctacaaaataactaataaacatttaatgtactcattttcaaaaccagaagtatcttaatcacatataaccatagtaatacaggagattaattttccgtttttaaaatgttaagtcatttaatacatattcagtgcatgctagatggaaagcaatgtattccatgttattggggcaattggtcactccttagaaattttatctgttctaataattgcagttaataaacgtctaagtttaggatgattgccaaatatctatcttaaagccctaaagccctacctccttttttttttttttttttttttttgagacagagtcttgctctgttgccaggctggagtgcagtggcgccatctctgctcactgcaacctccgtctcctgggttcaagtgattctcctgcctcagccccctgagtagctaggactacaggcgcgtgccactatgcctggctaatttttgtatttttagtagagatggggtttcaccatgttggccaggatggtctcgatctcttgaccccgtgacctgcctgccttggccctccaaagtactgggattacaggcgtgagccaccgtgctcgtccaaagacctacctcttttctaaagtccaactcagtatctccaaactagttgacatttctatatgcgttcaacctcaaagacatcatgatataattaaatactgtggggctttacagttgacaatacacattcatgtatatagccttttaaaaagtaatagctcaaggtaggttagttaaataaaatacgtatagtgtcatactgctcagactaatagagaaggtcaaagatgaaattcttaaaatgaaagctcatttctaagtaagtccatactcttaataattatggaaccaacatgctaaggaaaaattgttaattaataaatctaatttccattattgtaatcaaattgcactgctctttagcccctcatcactgtggtagatcgcttagagggtagtgaaaaagaggcttaggctgagcgtggtggctcagtcctgtaatcccagcactttgggaggctgaagcgggcggatcacctaaggtcaggagttcgagaccagcctgaccaacatggtgaaaccctgtgtgctactaaaaatacaaaaaattagctgggcgtggcattgcattcctgtaatgccagctactcgggaggctgaggcaggagaatcgcttgaacctaggagacagaggttgcagtgagctgagattgagccactgcactccagcctgagcagcagagagactctgtctcaataaaaaaaaaagaaaaagaggcttagattctgatatgtacacatttattatttgtgagcttcagaaacaaaaatctagtataattttaattgaaatttgtttttgttcttgtgatatcttaaatgcattatttttcaagctggcattaaaccttaaggtttattggatcttattaaataaaaatgcagtttcatattttatatcttaatgtttgtgacattattatggctatgcagggatccttgagtctcaaatgtgtatctttttaaacaagtgatttttgaagtaactattttttatcattattatagagttaagaattggcaatatattctttaaaacatggtctctttcagtaatgtagtgtgttaggaagagggtaatgaagtaacgtgccatatttaatcaggatgatcagattagcttcaaaaaagtgatgtcaattttgttttgcagaatgctgaactattagtttataaaattttacttgaatggtattgatttactgatagtctttactgacttattagttgctcagactaatggtttagattgatttttgagattcctttttctttgtatagtaaagctaattttcccatttatttattatagatgtaacattcatttttaatatttattgagttataggcattaagagtatcttaatataggaaatagtcaaatctgttgcatttaaccatacggttaacatgctagataatactgtttacattattgattttatctctctgatattacttatgagatgttgaaagattaaatcaatttctcccatacatgccagcaataatcatcatcttcactttttgagaaagacatatctcatataaacccagacttctagaattacagaagtaccttataatttgactttttcagtgtaaatgcatcacaaatatttttttctttttttgatggggtagggaggttcactggactgatttcttcttataactacctggctttgtgtaagactatagattcttatccaaaaccctcagggcctggtgtattctatcattaagattaaaaaaatatattttagaaagtaatgaagtacatatactgatatgttatatgttaggttaaattattagcagggtctgaggaggaactctaactaaacacattatttctgcagtgaaatatatgaatatttatgttaatttggacaaacaaagccagagtgccttatcagtatggatcaggttttgctgctaaacatgttttgtaaaaacttatggattgcaaagttttttgaattttgaatttcagctaatcaattctgagcctgtaatagattgtgttatgtattataatatttataggtatgattgtttctacaaataataaaaaatatagcaaaattatgtatctttattgttttccaatttttctactatttcaacttttatcttgtaaaatattttctttgtacagctgctgtattctygaggattactaattgatcttctaatcaaatctaatgttagtygatakgcagagtttaaaaatattaccaggattcttgcatttygagaaggaygagtggaacaggtactgtgctgatcaagaattgtaactgggcatcagcttaagttattatggtttgttttggaaagataagcaaataagattgttattttcctcataaagcagtaaattccagtcctccgtggtgatttacaaatgtaaatgcttaattaaaatttctagtgctaattttctcatggcttactctgcagcttggtgttggtaccaagcagcacacaaaaaaccaaaaagcacaccagagttactatacccaagactagtcacacaaatccttttctcccattaatcaagattttggagagggaaaagaaagaaacggtgatttttgctgtccacttgatcagattccacacagaggaggaggcccrgagcctggttgggaaaaaattcttacccttatgacagctgatcagatcctgggttcttcactgcagcttccagaagagcagagctttgctatcctgctcacagcaccaaaactgtaggggccaagggaaacactccctcttaagcctctgaagtttcactgaaaaatcaactcacaaaggcagattaattggagaaaaggcataaaaatgtactaacatgtacatagggagaaccacagtgtttgttttagatagcactgctaaatttttctctgttaggatgacatgccgttggccttttaatggcatgrggagtaacttggcagaattaagtaagaaagctcacaattagctctgaagttagcagagatgccattagtactgatggayggtgatgtgaaaaagcctggctagagtggaaacgataatcctgttatatgtaaaggggaaaaaagtgtaatttggaatagttakatcattaggaagcagtttcttaacttaaaatcataatatttttcaggttccgtgttccagagcagatgtctttaatagcaaacaacttactatggtagaaaagygaatgctaatgaaatttcttacattttgtatggaatatgagaaatatcctgatgaatataaaggtatttttttcattaagtagtgctctccaattatttgacatttcttactattttaatatgcttgctctgatttagtgagccacttattactgttttaaaatgcattctaactctgcactatcaataggttagccattagtaacatttagctatttaaatttaaattaattaaagtgaaataaaataaaataaattcagtttctcagtcttattagctgtatttcaagggctcccatagccccatgtggctacagtgcagatattttcattgctgaagtggcatgctagattttaatttttattcttattatttaaatactactgtcaactggctcttcatagatgataatctgttttcatgattccattattttttctcataagtaaaaatactatatattttatcattttccaggattgcttttgcatagaatcttgaactatttcgtttgaaaaaaaaaggctagatggtatatggggaaaaatactggattcagaaaaggcatggtttctattcttggctttgacctatttcattatgtgatctggggccagttacttcattgtctgttaaaaattgaatatgccattttagtgtcagagctatatactttaagtccattggtctgaaaatgttatccaaaattggaatatactattgataatttatttataaagttacaatgagaagtgcagcgatattttttttcctctgtgaaataatgaaagtctaatccttgctcttaaagcttcaagtctactaggtactgtcatgttgttatccacagtggctgtgtaaaattcaattctctcagtaaattttcataatttttatttatgtaaattatttctgtaaagtttttgtcttttatcatgggatttatttcccaccactaacagtccaattacattatattctgttcttggtttaaaggagtaacttctgggggtcccgtatgttttgatgtgattatgtggccataagactgattccagtagccacatggaaattcatttcattattttttagtttattttctgagtatcagtgagaagtatacgttttacaaaactcacatatttatcattttaaatcaatacattcccatgttgtcatagttgtttaatattttcagtaccattattggcattatcctgcaggtttcatgataataaagtgagattattgccaactatgacaacccattgagttatttaatattttctagttttttttaaatccatgaaatgctcaatcataattcatcatttaaagctaaaaattgtgccattactccaaataagagagagagattgtttccattttttcctaagatcaaccatcagtgtccaaaatgtaataccacctatgtcctttgtgaggtctgtgaaacacacktcatctcctttttgtggggtggttttaaatagaagtttagttctgattttaagtgataaaatttcatcttttcataggatatgaagagatcacattttatgaatatttaaagactcaaaaattaacccccaacctcyaatatattgtcatgcattmaattgcaatgacatsagagacagccagcagcaccatagatggtctcaaagctaccaaaaactttcttcactgtcttgggcggtatggcaacactccatttttgtttcctttatatggccaaggagaactcccccagtgtttctgcaggtaagtttgccattgattttcttgtcccttctaaaagtgatacttgaataacagatgaaaattaggcaggcaaaaatgagatttattcaagatttagtatatgcaaatatatactttattctatttattttttataatctatttacctacctatctacccacctaagtgatatattcagtgtggcctctttttgagcttgataaaaatactataaattcctttttccactcaatagcatgatggaaagtattgtcattgcatataattttagttaattttttattactatatagtatgttattgtgaatacaccacaatctattttttcatttttctgttgatgaacacaggatgtttccagttttttgaggttaacacccttgtgtatgtttcaagttgtgtatgttcaagaatttctctcggaaacatatctaggggtggaattccccagtcctgagatacatgaatgttaacactttacaacatcgtgttcagttatttctctagagggctgtaccaattataaccttttagccgtacataagaatacccaaagctttacatgtttgccaacatttaaaatttttttgtcaacctaactcacataaattatcattgcattggatttttatttttcatttccctaattacctatgaagttgaaccttttctcatatgtttactggccattcatgttttatcttcagggaatacttgtttgtgtctttttttgtttgttttacacatttttaaaaatttttattttttgtgggtacataggaggcatatgtgtttgtggggtacatgagatagtttaatacaggcatgcaaagtgtaatccatcatggtaaatggagtatccatcccttcacacatttatcctttgtgttgaaaacaatccaattatactcttcattttaacatgtacaattaaatcattattgactgtagtcactctgttgtaatatcaaacactagattttattcattctttctaactacgttttgtacctattaaccattcctacttatccgctgccccctcaaaacccgccccaggctctgataaccatccttttactctctgtctccatatgtttaattgttttaatttttagctcccgcaagtaagtgaggatatgcattgtttgtctttctgtggctggcttatttcacttaatataatgacctccagtttcatccatgttgtcatgttgttgcaaatgtcagggtctcattcttttgtttttttttttttgggagatggagtcttgctctgtcacccagggtggagtgcagtggtgtgatctcggctcactgcaacctctgccacccaggttcaagtgattctcctgcctcagtctcctgagtagctgggattacaggcacgtgccaccacacctggctaatttttgtatttttagtagtgatggagtttcagcatcttggccaggctagtcttgaactcccgactttgtgatccacccatctcagcctcccaaagtgctggtattacaggcgtgagccaccatgcccagccaggatctcgttctttttatggctgagtattactccaaggtgtaactgtactacattttctttatccatttatctgttgctgggcacttaggttgcttccaaatcttggttattgtgaacagtgctgcgacaaatgtggtatgtagatatccctttgatacactgatttcctttcttttggrtatatacctagcagtgggattgctagatcgtatggtagctctatttttacttttctgaggaacttccaaactgttctccacagtggttgtactaattaacactcccacccacagtgttcaagggttcccttttctccgtatctttgccagcatttgctagtgtctttcttttgaataaaagttattttaactggggtaataaaatatctcattgtaattttgatgtgcatttctctgatgatcagtgatgttgaacacctttttatatgtctccttgtcatttgtatgtcttcttttgaaaaatgtctattcagatcttttgcccaatttttagtcatatcattagatttttttcctgtagagttgtttgagctacttatatattctggtcattaattccttgttagacgggtagtttgcagatattctctttcattctgtgggttgtcttttcactttgtttatggtttcttttgctgtgcagaaactttttaacttcatgtgttcccgtttgtccatttttgctttagtcgcctgtgcttgtggggcattgcttaagaaatctttgcccagaccagtgtcttggaggttttctccgatgttttcttgtagtagtttcaaagtttgaggcattagatttaattctttaatccattttgatttgctttttatatactgcaaaagataggggtctagtttcatttttctgcatacagatatccagttaccccaacaccctttatggaaaagactgtcttttacccagtgtatattcttggcacctttgtcaaaaatgagttcactgtaggtgtgtggatttgtttctgggttctctattctgtttttttggtttatgtgtctgtttttatgccagtaccatgctgttttggtgactatagttctgtagtataatttgaaataaggtaatgtgattcctccagttttattatttttgctcaggatagctttggctattctgggtcttttgtgtctctatatacattttaggattttttttatttctctgaagaatgccatagatattttgatatagattgcattaaatctgtagattgcttagcatagtatggacattttaacaatattgattcttccagttcatgaacatggaatagttttccatttctttgtgtcctcttcaatatctttcatcagtgttttatagatttcattgtaggaatcgtacacttctttgattaagctaattcctaggtatttaattgcatttgtgggtattctaattgagattactttttaaaatttctyttttggattcttcagtgttgacatatagaaatgctattaattttgtatgttgattttataccctgcaactttactaaatttgtcagtctaatagktttttgatggggtctttaggattctccaaatataaaattatatcatctgcaaacaaggataatttgacttctctcagcctctcccagtggccaccacagccactggtcaactgggagttctgccaggccacccctgatgttcacttaaaccccaagtacccttcagtaagcttgtgttgaatgcttccaggcctgggccttacccttcatggcagtgggctcccctctggccgagggtaggyccagaaaggctttctaagagcctaggcctcgacttgagttcccaagagcctgcttggtgctctgcacccctgtgtctgagttggtgtttaacacacaacacaaagtyccctttacttttctctctgcttttctcaaacagaagtcttttgccatagataccacagctgggaatgtactgggtctcacctgaagccagcatgtctcagaatctcacccaaggctcacggcatactacctgggtattactgttgattattttgtagccaagggcttttaactagcaagtgatgagccctgccaggattgggtccttcctttgaaggcaatgggttcccttatcgtccatggtatgtctagaaatgttttctgggagttagggtctagaatggtggcctcatgactctgcctggtgtcctatcttattgtggctgagctgctatccaagatgaaagacaaagtccttttactctttgctctcctcttctcaagcagaaggaattagacaccttcgttgctgtgagctgcatggcctagggtttggggaggggtggcacaagcactcccttagctgcccaggctgtttctccctaggtcatgtgctgccctagtccatgggctctaagcccagcctagcattagcacttgcctgggaattacagtccttgtgtcctagattgcctttcaagtttacctagaactccagagcactttagcccattgtgacaaggcttgctgagacactcgagttccagctgctgggatgggccattcctttcttgctagggctggtccaaatgttctctcagtgccacctgagcctagcatagctttgctctccactgacagggcagcaccaagttcaatgctacatcccccagttgctatgctctcactccctcaaatgcatagatttctctttccacaccatgtggccactgccgtggaattggggagggttggcattgaccattcaagactgtcttcagtgcctccttcagtgataggaagttgcagcctggtactgtgattgcttacctgatttttgcttcttatgatggttctttttttgtgtgtagttagttgttaaaattccgcattcctgtgggagggatgatcactagaggcatctatttgaccatcttgctccaccctctcattgttgacttttgcccatttgtctattgggttgttgtcttattgatttgtaggagttttaaaatatattctgattagtgatcttttttcagttatatgtgttggatgtattttgtcttatggtttttatgatacataaaggtcatgaagattaatatagtcaaatagagcaatcttttttttttatgcttagctttttttgggaggtcatttagtatacctgaagtatagagacaagactgcttagatttaagtcctgacttttctgtttattatccatgtaactttgggcaagttttacgacctctctctgtttttcaggaatcaaatttgggatttttttattcagttgtagctttgtgtcctaattcattattttctgctctttattatctcctttgttttgctttctctggattatatttagatcatctctcccctcccctgcccttggcaattattaggctgaagttccgtgaattaagtattcatcttttaaatattttttaatataagcatttaagaatagttcctctagtttacatctactggtggcaaatgctttctagttgtgtgtatctgaaaataactttttcttcttttttctcttgagtggaagtttactgagtaaacaatgctaggctgacaatttttgttaatactttaaaattttattccattgtcatttgtgttccatttttgccactgaaaagttcagtgtcagcctactttgtcattttttattatgacaagttacaaagatatctttttttctctcacattgtttttaatatagtttgtcttttgtattctatatttttactacagygaatcttaggtgttaatttctttgtatttatcttgcttagtataggttgaaccatatgaaattaacattattcaaccattttagacctacattatcctatggttcaactaaatacattgtgctttttctgtctgtaaatttatgtttattgttttggaaatttatcagccaatatctttataagtattgttttttcttccttttctcttctcgcctttttggaaccctaagtaggtaagttttagaacttagcattctctcttctgtatctctcaatatctttttcatatttgctatcttcttgtctttctggctgcattctgggtacctaattaagatctgtattccagcatattgattctcttcacctgtaacccattcattttctttcttcaatattatctttcatttttagaaattctactcaccatcttctctgtcattcttgattttttttacttgttcatttttgaaattatttattcatttcatatatagatattttacattctctttctgataactctaatatttaaacttcataacgatataatattgccgtgtattgtttctactgattcatctcagtgatttgtgtgtgtgtgtgtgtgtgtgcaatgcttttccttagctgagagtttatatttgattgattttaatctggggacccaaattgggagtgcctttcttcagggattatttgtgtttgcttcatcctcacggcactacagaattaggatcattttagttccctttgggggtcgtcacttaataatgcaatacaacctccacatagtgataccattacaagatatatatatatatatatatatatatatatatttaatttcagtgtttattgctcaaagcttttatttcaggttagggtttgtattgtatgtacatggggatcagtgtttcccatggacattccccttccttcagtgtcattggttcaataacaattatttcatccaagacctagttttggtattaactggaagtgtcttcacagtatctagttcagtttactactggaagtaggtattctcaaatttacattacctaaatatgtgattttatgactttaggtgggaacgttataaatttggaagtcacttatttccgaatatgatggatctgtgtatttctagacaagctcttcctcttctgattacttgtcaaagtaggaataaatggggagtgccatgtcccccaggaaccaaaggtccttctatcaacttaatacaagcgggggagttctatggttttcttagttactctttccctcttcctgtgtcattgcctgattcaaaggagacacaccatgtttcctcttatgttgccacttgctactcactcctgtggagcttagggtaaggaacagaaacagaatgaacagatcactgggaagtgatctaaagctcactggcctccttactagtgttttacaaaaatggaatgtttagccctatttctcttttttccactaaatccctctatttctaattcatacattaaaaaatgcattttgtttttatttcttttgaagggaaaagacatttacaagttttgtttgtcatgtacagatataaaatttcagaatgtgatcttatgtattgaatcttagacaaagaaaacatttttctccaaagatggttgtaaccttaaggctgagatttgtcagccttacatatatttttattatctgcagagcctacatgtggctcagattgaatgttttttataaaaattatacctcatcctgccgggtgcggtggctcatgcctgtaatcccagcactttggggttaaatatattaaacttctgggtaattctcttgagttcttacattttatatacaagagtctgtctgtgaattataataaacatgcatttccttgacctacagatattaacttttagttttatattagattctcttcataatgctttataattccatataaatattgttttatttttatcctaaagtagtaacactattaccatctatacatcatagcctacactttttatcaccaggttatcagaataaggtatcacctgttctgtgatttctaaccaccattctatattctgttttaatataagcctcttaagcatttctcacagccagttacagcatgttctcatcaaggctactattataaatggtatgcatgcatatttatgtgaaggattcaaagacacttggaagtcatatccttgcattctaaatgatttctgcatgtgacattttaactactagagataactttcatgaataaatgtcctttgaggcttttatcaatttaaataggtagatttttttttggtaaagaaaatgaaacatatttatgttgctacctagtatccattaatatgtcaagatacaataattggagcatattggaagaaaagtcattaaaacctatatatttttctagtctagcaagctttacagttttccctaatgtaaattaattggttgatacattttctggcacattgcacaggatatatatgcagtttatagactttaaaacgctcacaatatattttccaaacagaagtcctttttaagccttaactgacctatttgtttatttgtgtggttggtaacatagtagcctttataactacattctagtttggaataagttttatatactacgtcaggtatttataacctgttaattggagcagtatcagtgggaacaaacttcacattttttttttatgtgtagatgtraactgcccagagattgttacttaattttgttaaaggagggcatttaactgtcaaccttctagataattcagcctttcattattctgtggcctagatttgatctaattttttcctttaatgtggtagaattgctaaaagatgaaggatgaatatgtttcacttgtagcttgtggtataaatttatgtatgtaaataaatcatgtaaattatcaccaccaaacacgtttttaccaattgttgaacctcagatgaaattttcctgactgttgtatgtggaaaattgaagatgtgagatttataggaaattgtgtaacacaagctgatctctagcttatagctttcatttatttatttatttttaacttttagtttcaggggtagatgtgcaggctctttgttctatagataaattgctgtgtgtagtaggccattcttgcatttctataaagaaatacctgagactgggtaatttataatgaaaagaggcgtaattggctcatggttctgcaggatttacagggagcatggtactggcatctgctcaacttctgggaaggcctcaagaagcttacaatcatgatggaaggcgaaagggcagcagacatgtcacatgaccagagcaggagcaagatagagggaggtgccacacactttttaacagccagaactcatgagaactcactcattatcatgagggcagcaccaaggtgatggtgctaaaccattcatgagaaattcacctccatgatacagtcacctccaaataggcttcacacctccaatactgggaactacaattcaatatgatatttgggtagggacaaatgtacaaacttattctgtccctggcccttcccaaatctcatttccttatcacgtttcaaaatacaagcatcccttttcaataatccccaccaaaatcttaactcattccagcattaactcaaaattcccaagtctcaaattcaaattcttttctggaaatgagttccttccacctctgggcctataaaatcaaaacaagttatttacttccaagatacaatgggggtttaagtattgggtaaacatttccattccaaaagggagagattgtccaaaaaaggggggctacaggccccattcaagtcctgtaaggagtgggctcccaaggccttgggcagctctgcccctgtggctttgtagagttcagcccctgtggctgctctcacaggttgttgagtgcctgtggctttttcaggtgcagggtgcaagctgcctgtgcctctaccattctggggcctggagtattgtggctcccttcccacagctccattatgcagtgcctcagtagggactctgcatggggcctccgaccccacattttccctatgtactgtcctaatacaggttctctgtggtggttccatctgtgcagtgggtttctgcctggacacccaagctttcccatatattctctgaaatcccggtggaggctgccaagccccttccactcttatactctgtgtgcctggagtcttaacacaatatggaagccaccaaggcttatggcttacaccctctgaagtagcgaccagagccaaacctgaggtcatctgagctgaggctggagctgaagtggcctggatatggggagcatgttgtgcagggaagcagggccctgggcctggctcccgaaaccatttctttctagcccacaggacctgtgatgggaggggctgcctcgaagttctctgaaatgccttctaagcctttttcccattgtcttggctgttagtacttggctcctttttagttatgcacatttctctagaaagaggttgctttgcagctcactttgattcttctcctaaaaatgggcttttcttttctaccacacggccaggctacaagttttctaaacttttacactctgctttcccattaaatataagttccaacttaagtcatttatttgctccctcattgagcataggctattagaagcagccaggtcacwtctggaatgctttgctgcttagaaatttctttaaccagataccctaaatcatcactctcaagtcaagcttccacagatcccccggacatgaacagaacgcagccaaggtctttgcttaggcataacatgggtggcctttgctccagttcccaataagttcctcttttccatctgagtcctcctcagcctggacttcattgtccatataactgtcagcattttgatcagagccatttatcctgtctctgagaaattttaaactttccctcatcttactatcttcttctgggtcctctaatttcttccaacctttgctcattgtgcagttctaaagttgcttcygtattttcaggtatctttatagcaatgccccattcctctgtacaagttttctgtattagtcagttcttgcactcgtataaagaaatacctgacactgggctatttataaaaataagaggtttaattggcttacagttctgcagcctttaggaaggatgcagcaccataggaagcatggtgccgtcatctgcttggcttctggggaggcctcaggaagcttacaattatgacagaagctgaaggtggagcaggcacatcacatggcaagagcaggaacgagagagagagagagagggagatgccacacatttttatacaaccagatcttgtgagaactcactatagtgagaacagcaccaagaggatgatgctaaaccattcatgagaaatccacactcatgattcagtcacttcccaccaggccctaccaccagtactggggattacaattcaacttgagatttcgacagggacaaatatgtaaactatatcacggggctttggtgtacatattgttagccaggtaataagcatagtacctgataggtagtttttctagtttctcagtcctcacccttctcccatcctgcaccttcaggtacgtcccagcatctattttttccctctatgtgtccatgtgttcctgtcatttagctcccacttataagtgagaacatgtggcatttggttttctcttcctgcgttagtttgctaaggataatgtcctccaactccatccatgttcctgcaaaggacatgatctcgttcctttttatggctgcatagtattccatggtgtagatgtaccacgttttccttgtcaggtcttccattgatgagcatttgggttgattccatatctttgctattgtaaatagtcctgcagtgaacatactgggacatgtgtttttatggtagaatgatttgtattcctttgtgtatgtaaccaataatgggattgctaggtcatatggtagttctgttttaagttctttgagaaatcaccaaactgcttttcttagtggctgagctaatttacatacccaccagcagtgtataagcttcccttttctctgcagcctcaccagcagctgtctaacttacagcttttaaaaagagatttagagaaggccaaaagttacaaatatataaatggatatatgtatctttaagcagcttgctcaaaattataggagcaacatggagggaatggaaaaggaatctcccatttaatgaacttattcagtgatgacaggactatgcccaaaatgggacaacatgctactgtgattttgtcataaccatggaatttgtgcatttatatagactgtaaggtattttatattgttttttcttttccccctgcttttaaaaatccccttcttcattgcagagtcaatacattttacggagtgttttttagttctctttggataaatcataagataaagcatctcttagaccaaaggaactaccttattttattctatgataaccattgtgtttttctacagagagttttcagaaatctaagaaacatttcctatcctggatcaacctattagaaaaccaagagaagtcttaaaattggccaaggagtatactgttggaaaatttaaagagtttatatattcaactgcatgtgaagtcagagcaacattgagatggaattttagtgtctgcccccgatgttgttgctcctctaccttaacaagttggagttagattatagatgtagattcttcaacagtacattattttttttttcttccatagtattctccttaacctcttttcttgtaaaaatctacctactattctggtagcagtacaaaaaaaattaaagttgatagaactcttttatattgttttgactggttgtctaatttttacaaatgaacaaagttaagataaaaaggctgaggctagaaaccagattttctaatatgcatttttcttgactcacctattatatttttaaacaacttttttgaaaataattaagacataatttgcaaaaatattgtgttattttctggaacttgttatatttgtggtatttcttaatttttaacaacttgtaatttgctatgacttaattattttctcattatggatgcatattcagcttccagaaaaagttggagagaatacggggcattcttacagtattctagaaacatgttccaattctgtgcccaatacaaaatgccagtttagataaataaagaatttatttcaactttctatattttaattaattgataaaggtaaaaggaaaaacaagccatgagcaaattatctcctccttacccctataacttgaatttgtgcattcgataagcattaatgctgaggagcccagtagcggttagaatagttagcattttttcatgtgtcttttggctgcataaatgtcttcttttgagaagtgtctgttcatatcctttgcccactttttgatggggttgtttttttcttgtaaatttgtttgagttcattgtagtttgagttcattgtagattctggatattagccctttgtcagatgagtagattgcaaaaattttctcccattctgtaggttgcctgttcactctgatggtagtttcttttgctgtgcagaagctctttagtttaattagatctcatttgtcaatttatgaagctggaaaccatcgttctcagcaaactatcacaaggacaaaaaaccaaacactgcatgttctcactcataggtgggaattgaacaatgagaacacagggacacaggaaggggaacatcacacaccagggcctgttgaggggtgaggggaggggggagggatagcattaagagatatacctaatgttaaatgatgagttaatgggtgcagcacaccaacatggcacatgtatacatatgcaacaaacctgcatgttgtgcacatgtaccctaaaacttaaagtatatatatataaaaaaaaaaaagaaaacattgacctgtttcatgtccccatccccattggtttcctcccacagtgtcatagarccacgtgatatagctaaatctaggtgcagaaactgaccctgcgtcaaatgggtagatttgactagtccagatgtgtgtgtgtgaagctcgattattgaatcacaacatactatccttttgcagcactgcagctgaggagaactgcattgagatatgcgaaatgttcttgatctagcatccataagaccttgaaatttatttacaaaatgttttatgtttcttcataaaagaagtccatagtttcatcacatttcacaggcatccatgacttaaaaacaaggattgagaaccgttgttaggaatttttattatttttttaaactcagataaacattccttaagaccttataaaaggaagaggtcctaaagagtgaatacaagagtgcttctgggatttaaagacttggggttgggggttgggggttgggggctaagggaaggggaaaagttggaaaatgttgccgttagtactatgatatataggcacctcttcatataacatgcaagcagatgatatctatgccttagtcatatgggacagaaatattataagtgtagaatagtgaataagaaagtatattttggagccagaccaatgggatcatctcctgattctgctatttattaactgtgtatcattgggcaaattatttaacttctctgtgctcatcatttttggtgggataatagtacatacctcataggttgtgaggattaaaatgagctaacatgtagaagaaagtgcttttaatattgcttgcccaagtactagataagtgttagctgttattactattactgttgttactgtgattgtttttaaccattgctgctgctgctgctgctgttacagaatgccagcagggaaaatatgaggcagttagagacttagctagatttagtaatctaagttaggaatcagcgattttttttttcgtaaatagacaaatattatagtacatagtttaggtattgcaggccgcgtggtctccattgaaaccttttgtagccatagacaatatgttaacaaatggatatggctgtattctaaaaaatttatttctaaaaataggtggcaggtttttccaacttcagttgaatagtctttttttccaaaaattgataattttaaaaaaccccagtattaagagattatacaggaatgtctcaatgcaatgcctagtgtatattagtcatgcactaagtatttgatggattaatgaatgaatagcagatgatgtataactgaggaaattgtatgttaaggaaacgatagagcagtgtttttccaagctttcaggtgtgtcagaaattaacattactgagttccatctccagcatttcttacttgtagatctgggtggagcatgagaatgtgaaattttaacaaattcccaggtgttgctcatgctgctggtctagggaacactgctgtagaagaagcaatcacaagaattgttctctgggcctaattctaatgaacaagaaagaaagggtttagttaaaatgaccaaaatcttttgaagaagcatctgtgtctttattgtaaatgtaatttttttcatttctttccatttaattcaacaacaactttttaaagcatctattctctgcataatactcttctaggtatagtggatgtacagtatatgaaaaagaatatgacatagaccttgatatcaatgtcaagaagcatctagttaaagacagatggtatgcacttatggaccaattagagaattagaaaatggattttatcgggttccaaaattttcagtagaggtatgaatgcatgatcagaaggggcctaaacagttatgacatgaaactaatcaaagtaggctgactactttgctgaagttataggaatctcagattactgttaacccatccattctcagaaaagagcaacaagattgggctccactctaagccaataaccatcagtagtctgttcatacctatctttaacatggtgcgtatatgtttgagatactaaattgtttcagagactcatggtttagaccagagtttctcaatctcagcactatttacattttttttttttgccaggataattttctctgtgttggggaaagggctgtcttgtgcattgtaaaatgttagcaacatacctggattctacccactagatgccactaccttcacccaacccacttgtgacagacaaaaatgtctctaaacattgccaaatgccctatagaggcagaaccataaccgcttgaaaaatactggtttgctccaactcagtatatattgaattgttgtagtctttacaataatatgataaatatatgattttctttctctttaacaagtaacctcaaactagttcaatgttgaaaggcagtgatgtcgtttggctctgtgtccccactcaaatctcatgtcaaattgtaattcccagtgttgggggagggacctggtaggaggtgattggatgagggcagatttcccccttgctgttcttgtgatagtgagtgagtttgtaagacattacaacagtgtttaaaagtgtgtagcacttccccctttgctctctctttcctgcttcgtcatggtaagacgtgcttgttccccatcaccttctgccatggttgtaaagtttcctgaggcctcccagccatgctctctgtatagcctgaagaactgtgagacagttaaaactccttcataaattacccagtctcaggtagttctttatagtagtgtgaaaatggactaatagaggcaggaggaataaaattttcttgcagtcctttctttgaatcttattactcatgttttgattctgtagtctggcacaaagtaaaatctatttaaggaacaggacagttttagatgtgttggcatttgaaccaatgggctaatttgtgagggttatttagcaaggtgccaaagcatataggagatactgagtagccattgatgagcaaattcttgtataccatatcttagtagttagaaaaagaataagaatatggggggaataatgtgcacatacgcatatcctcctcaattttataaagaaatagaagcaccattccrcaccttcatattccacccttaatcattgttaagttggttgcatgtcttcctacattttacatgcttgtacaggtaactgtgtataaatgagtacatatatgcatactttaaagaaatttagatggctgtattgtctggtatgaggatgtatatgccataatttaatcactttccttgttggtgtaagcattaaaattatgtctttgatatggaagaaatatctcatatctagaaattttagaaaataacataagtattattttttgttacaagaattaactgaaatcccatcacctgttaacaatagcacactgaatattttggtgtattttcttctacattttttagtccacacatttaaaaaagtatatagctttgtgcatcacttaacaacagggatacattctgagaaatgcatcattaggtgattccatagttgtgcaaacatcataaagtgttcttacacaaacctagatgatacaacctactatatgcctagactgtatgatatagcctattgcttcttggctacaaacctgtacagcgtgtgactgcactgaatactgtaggcaattgtgtaacataatgataagtatttgtgtatctaaacatacgtaagcataggaaaggtacagtaaaaatacagtattagaatcttatgggactttcctcatatatgtggtccattattctctgaaatattgttatgtggcgcatggttataatctcaatattttttgtatttgggcatcttcaactatagaataagcagacttacagccatcattaaaaacacacacacacacacatatatcagcttaaaatagcaacggaaggctggctagattaagaggaggtctttaaattcaggaggccttaaactgatatgcaatgtttgtaatcagttacttgggtttcaggaatttagggggtaaataccctgaaattgcatgccaaatattgtgcgtataatgtgcatagctacatttttctaggaaggaagttcatagtgtctctattagtgtctcagaggagtgtgtgactgccccctgcaaccccaccaccaaaaaaaaaaaaaaaagattaggaaccactgagatatactatctcaattgagaactgtctttactaaattagaagagtagtgtgcagtagattgacaaaaagcttctatcccaaaagtttgaaggttgctatttgaatagaattcttataaactatggaattttggaggataaaataagcacagcaacatactttattttcagaataatttgtatatgattttaaagacaatttcctctctagttgatagtttatattagcatggagatgatacatgattatgtttgtatgatcaattatttgtttttcccttgaggaaagagtgtttcttgggataaacagaagggggtggtgagataatccatcattttgaaacctgttctctggtgatggatggatatattggtaaagtaactcaataatcttcatttttttccaggttattcacagatcagtgaacattgtcgttaataaagcaatggaatgcttttgtgtccttgcctgcattattccttacgttttgacagaaaaatatttcccatttgggaataacctcttttaaaacttacatttaagtatattttgtggaggaattattgtgactctcatgagtatattggaattacattggctatatagattatagagtttgatttccttcttttttaaacctttcctatggtgtggatacagtttaatttccttttttttttttttttgagacagtcttgctctgtttcccaggctgcagtgcagtggcaggatctcgactcactgcaacctctgcctcagggattcaactgattctcctgcctcagcttcctgagtagctgggattacaggtgtgcactaccacaccatgctaatttttgtatttttagtggaggtggggtttcaccatgttgcccaggctggtctcgcactcctgacctcaagtggtctgcccacctcagcctcccaaagtggtgggattacaggcttgagacgtgagccaccatgcccagcctgattttccattttaataatagcccccttcagtgctaactaacttagatactagattaccctcataggtagatacaaaacttacccagtccagttttctctgtatgttatatatgtatactattccagctcttaaaataattttaatagtttgtatgagaataaaaggtggttgactcataatagggcaaggctgatatttgaattaaggcaagtgtttggagctgaaatcttagtttgattaaactgaaagatagtattattacacagactgtttttttttttttttttttgacggagtctcactctgtcaccaggctggagtgtagtggcgcaatcttggctcactgcagcctccgcctcccgggttcaagtgattctcctgcctcagcctcctgagtagctgggactacaggcgcccgcaaccacacccggctaattttttgtatttttagtagagacggggtttcactgtgttaggcaggatggtcttgatctcttgacctcatgatccacctgcctcagcctcccaaagtgctgggattacaggcgtgagccactgcacccggcctgcacagactaattttttaaagattgttcaagataattcttgacccatctctggaaccagtatactgttacccagttgtgatagaaatagtatgtgaaatgtgtttatttgctagctaaatttaagattgccattcaataaaaagtataacacaaaacaaaaacaaacaaaacaaaggcagccagatctaaggctttacttgctgggtttccgtgtgttctctactattccccagtgtaaatttgtttttgttctagattaaaataatccaattaatgtgattggtataaattgtagcaaagctatttatttctgattcttcatcagtttaccttctactttggaagggaatactcaaaaactgagtctttttataaaatctttgttacatcttatgaactttgtaaggttttccatgtgctacagaagtatcaatctcagaaatgggttttgattctaactttgtcatgttgttatttaggtggacttgaacatgtcatttaaattcccaaagcctcagttgtcttacctgtattatggaaaaggccataatctagtcttacctcctacctttggctactttgagacttgtatgtgataatgtaaagaaaagagtgttgaattttatcccacactaatgcagagtattattacataaaagttgcatgactttgcggtcttgatgtttagaatgaatgttttggtgattactgaaagattaatttatatattatagatgattcagtttatacaaactagatttggtattaacatttaattatgtaattaaattagctaataatttatgtctgttgatagatgtatttgctttataaaagtcatcttcatctctcccatagttctgagcatattgccttctacaaaatgggtactccataattttttcttatcaaattctgtgttttactcatacacagttaattgcctagaactttggtaggcacatagtaggtgcttagtaaattgactttttaaaatttaattagcaattaccataaaaagaaattaaatattatgggacagaaacttttcctttcatgtactagagaaataatttgtaaaaagaactctgttaggactgaaataattaatgtagcttttactcttcctcgtttttatttctggatctcttcatgctccatcctctgccctccctccaaattaggcagtagattcacgcttgcttaatataataaaatagtatgaaagttttgacaaatatttttacagtcatgtgctgcatagtgacatttcagtcaacaacagaccacatatatgatggtgttcctataagattctattactgtattttgactgtaccttttctatgttgttgagatatgttcagatacacaaatacyattgtgttacgtttgtctatggtattcagtacagtcacacattgcacaggtttgtagcctaggaacaataggctatatagcatatagcctaggcatgtcataggtcatgtcagctaggtttgttaagtacactctatgatggtcacacaacaatgaaattgcctaatggtgcatttctcagacctgttgttaagcgatggatggctgttgacatggtttagatatttatctcctccaaatctcatgttgaaatttgatcccccagtgttggagttgggacctagtgggaagtgttagggacatgggggtggattccttatgaatggcttggtgcgatccttgaggtcgtaagtgagttctcactctatttcacatggaaagtgttaaagaacctggcctcctctcctccctcccttgcttcgtcctcttttactgtgtgacacatctactccctctttgccttccaccattattggaaacttcctgaagctctcaccagaagcagatgctggcaccatgtttcttgaacagcctgtggaactgggagccaaataaactgctttataaattactcagcctgaggtattcctttatatcagtgcaaacagactaagacagttttatttggtaaaacttctctgattttaatctcaccaaattagaatttataacaaaacattcataacaattttaatgtttttacctcctactctgtatgtaaacagtttgatgatcaaatgaataccatgaacaagaaggtatattaccttcttattatacctactcaagaaaccaaacattactgggtatatacccaaaggattataaatcatgctgctataaagacacatggacacatatgtttattgtggcactattcacaatagcaaaacttggaaccaacccaaatgtccatcagtgatagactggattaaggaaatgtggcacatatacaccgtggaatactatgcagccataaaaaaggatgagttcatgtcctttgtagggacatcagtgaagctggaaaccatcattctgagcaaactatcgcaaggacagaaaaccaaacaccacatgttctcactcataggtgggaattgagcaatgagaacacttggacacaggatggacacaggatggggaacatcacaccaggacctgtcatggggtggggggaggggggagggataacattaggagaaatacctaatgtaaacgatgtgttgatggatgcagcacaccaccatggcacatgtatacatatgtaacaaacctgcacattgtgcacatgtgccctaaaaaaaaaaaaaaaaaaaaaaaaaaggctgagcgcagtggctcatgcctgtaattccagcactttgggaggccaaggtgggcagatcacaaggtcaggagatcgagaccatcctgcgtaacacagtgaaaccctgtctctactaaaaatacaaaaaattaaactggtgtagtggcaggcctttgtagtcccagctactcaggaggctgaggcaggagaatggcgtgaacccaggaggcggaggttgcagtgagccgagattgcgctactgcactccagcctgggcaacagagcgagactccgtctcaaagaaaaaaaaaaaaaaagctaatttcaaccattttgtaaatgactcctgcaatcttgaattcatgtactgagtgacaacacttgaatttaataaacctatattttataatatgcatccttcatttatttcatagaaattaaattttgccatgcagatacacacgtgtttgtaaacagccatccctattaaatgttttgcttttccatctgcagtttttaaaagaaaaatgattctgtgtggctgtttttcttaagtaaatctcttttcactctattagaatgtaaaatattccttctcgatccccacagtctttaattgtggtcctatctgcatagaatcttattcttcaggtgtatttaaaggagaaattaactctaaaataacccttttaaatagcacacatttattgaacaaataattagctttgatcctaactttgtgttttaacttcttgtattataaaagtctgcaaagtgtatataggcatagtgtggtggtcaagagcacagactttgaagccagactttctgagttagaatcctactgtttaacctctctgttttacaatttcttcctttataaaaaaggaatagtacctatatcatggggttattatgaggattaggaaattgatatttgcaaagctcttagaataatatctggcacatgatcagcactatatgagccattgttagttaaaataatttccaaactgtgttaagttgtgaatatatgaattcagattttttttcttatttatttattttattttattttttgagacagagtctcactaaatcccatgctggagtgcaatggctcttcagaggtgcgatcttggtgcactgcagcctcaaactcctgagctcaagggatcctcctgccttagcctcccaagtaactgggactacaagcacaccactgtgcctggctttgagtttaggttcttaggtatagtaggctggtctcaaatgcctaacaaattgagagacagacttctgattggagtgtttctaccttccatgatgttttcataatcaacacttaactgccaggctgtagtgatcctataacaagtgtaaatgtaccaagagcagagctgctactgtcacatatcttgtgtagcacctgcttgtccctcactgaattaactttcttgcttgtctttttttgtgaggttaggcctcactctttccatgcattgtggtggggcagtagtgtatgctatgatgtacttctttcctagaatatacagacgaaaacaagcattagttttctttgtgctccaaaaggagaaataaaaagtgctgtttaatgtccaattaggacatgaaagttttaatgtttgaaatgggctctttaaggtctgcaaactaaggcaatcactgtattgtacagataaatcaagtgcgactcagaagtgttttgtcatatgtttttatatgttcagtattctagccacgatgagactgcactactcatgtccagtgcagtttctgttttataatagagatttaataatatcacaatttatatgagaaaagaaatattgctttatttctgaatagttactggggtagaaaataattttccttggacatgtaaactttggaaatggtattttaaggccctaataaacacattgatgcttgttaatattcacagccaattgaacaaaccaaatatttctgctgttcactttagccattctttagagagatagtcttaatactagaaatgtactaataaaattggcctattgcattcggaaaggttttagaagtacccttatatagtgaggttaagaaatacgaatctgtcaaccttgcagattaaattagagcttctgtgcagtttgctmcccctggaagatatcaaaggagctatgggtgacatatctccataagtagggatattttctatagtgatacaaagctaagtttgccagattaaattgagtttaattccttaatgtcagtttggagcatattgtttgtatgttgaaatggcatgaggaaaagatactatcagaaatcaagctagtaaaaatgaggacactgaaagcagcaaagcacaaaagcatagtgcaaggtactttgaggtcctctctggcaggatgccctcttgttctgctaagaattgaatacttaaataatcattagttctttaaacccatttatatgtcagcatacatggtggatgcgttttcacatgtgactcattcccagggatgtacctagagtttttacaggctttggcatagatgagaggctgtagtctctgcatgggtcccactgtgacaccatttttttctcctatgggattggggtacaatactgcctctcagaccatcaaggttaagaccactatattataaaacgaagcatgaaattcatagtagatccgtaaatcatctaggagtgatagcttttattgatcttgttaggtggaatttggcttattgacaactgatatgtgtgtttccttatgttttaaggaaaaaagaaaacacaattttagatttcttgtttggatgaaaaaatagtatctaagatatgtgaactatatctctttgtgggtctggatttttacgcatttttagttccataaagcaaatcgaactggtctatttttggcagtgcatatattaggtaaggatagcgttctgtttatttttttgctattttttttccctaacttactgctgttctgtttttggttgtgcctcatagcaagttgaccgttttttcccctgaaataaagtatttttgtcttatgaaaataatgcatgcctatgattaggaatttggataggaaagaaggtattaagaacataaaatttaaattaataattatttttatcagaattaccttgattcattttggtttgttttaaaaatggcttgtataggcttgtctttactttgaccatcctgttacttagtatccccgccttaatttatgcagtgtcaatactactagaatacttgaaaactaaaaagagctctttcatattgctcaatatggtatcattttgtaaacatgtttgttgttaaagtttgaaaattctcaggcttttttcgctcttctgtggcttccagtgttgcaaatatgttttgcctttttaatatttacatgatttattggcaaaggaagaaattctgatcctcctacaaataactcgataaagacttgaatttctcatgaggggaaggttacaagacataataaacttgaatccataagttggagaaattaagttatgggaaagcgtctctctgtctctttgtgtgttttttaaaaatagtattatcacaaagtttctgtgaggactgggaataagagagtggatttcagaggcccatccatcaaagttgaggcatttttccctagaatgtaggaatagaaaacagtatatatgtttatatgctactttttgcaagactaaagcgtgccagttwtgatgttaaattagaaactagacatttcaataaaatcagccttttctacgtcagaggttttttaaaaacaaaactgtaaaagaaatttaawtaggaactttgaccttggggacttgtactagttttgatctaattttcttctacccattgactatgtcctctttgaaaacagactgcttccctgtccaaagattgaggccctaaacctgtcttgcaagtacgtactcttggtcacaagagggacctcgtgagagtaggagtggttcatgtgtctgttactaccagtaccttagtgaatttctaacattctttgatagccatatgagttttgtctatrtatgcatacacagacacactttaaggcatgttaggtatggtttaatggttatggaatttctttcttttttaaaaaacttattttttttattttctattttgagacagagtctctgtcgcccaggctggagtgcaatggcatgatctcggctcactgcaacctctgcctccctggttcaagggattcttatgcctcagcctcccaagtagctgggactacaggtgcatgccaccacacctggctaatttttgtattattagtagagacagcgttttaccatgttggccaggctggtctcgaactcctgacctcaagtgatccgtctgtcttgccctcccaaagtgctgggattacaggcatgagccaccacacctggcctggttatggaatttcttaccaaagacctaaaactaatattaaatgaaaagggaggaattgactataaattcgggctgttttatcatatgcatatttagaataaaaagagctaaaactaatattttattaaatgaaaagttaagggaggaattgactataaattcgggctgttttatcttatgcgtatttagaataaaaattaggattcatttagtaaatatatactgaatgtattgatcccagctcttttgtagacatttggaatacactgctgaaaacagaaactctctggttgtggaagatgttgaaggctcttcccagagagacagtagacaaatacaatttgagagaatgaatgtgctgtgaagaaaagaaaaaaagcaaatagggtaatagacaggccagggagtgacagttggcaggaacagggaggaattcctctttagagggcataatggtcaatgaaggccactaaggagggtggcatttgagtgtgtaatgataccagaatatgatgggaatggatgagtttttgaatatttgagggaagagctctctagtcagaaggaactgtgagtgtcagaggatcttttgatatgcggaaaggttgagtgagggagttaatcaggagtgtgtttgtgacaataccaatggaggccattggtgagcatacacatcattgctgcttgcttttttgatgtatcactgtgcttccctaatttcttacgttcaagctttctgtcttttggtatatgattttctgagtttgagactttttacttcttttggaaaatatgcatcatatttaatttgctttattgcttttatatagttgtatgactcaacagctttgatgatagaaccttagctgaagggctggggaactttaaaaaacataataaaatgaagcattaaattcaggacacagaatgttctgtgtgtaaaaatagattaaataataataatatatcaatgtcccttgacattttttctctgatctccctccagcctgtcatggccttgtgcccagtgtttatcttaaggggcagaaatggcctcttgtcacctttaggaaaaactccggttaaggcaaagacctactgttcatttttcatatatagaatcccacatgcataattttagaaatgaaaacattgccttacatattgcacttatgaatttggaagctattttcaaagattcttttatgttttcagtttctaaagcattaatacagttcagttattataattttttattttatttatttatttttttgaaacggagtcttgctctgtagccaggctgtagtgcagtggcgcgatctcggctcactgcaacctctgcctcttgrgttcaagagattctcctgcctcagcctctcgagtagctgggactgcaggcgcccgccaccatgcccagctaatttttgtatttttagtagagatggggtttcaccatgttggccaggatggtctcaaactcctgacctcagattatctgcctgcctcggcctcccaaagtgctgggactacaggcctgagccaccgcgcccggccctatttttataatttaaaattagtacgaatgcatatgtatataatagttcttatgttttgacaataaagatactgaataaagagacactttcattgtgtccacacagtatatttctctcttaacaggttccctaaccctgaagcctgtcttctttcttgttatacagattagtttttaattaaagaaaactagttggatgcagttactttctgtgaaatgaagatttattttggaagtgaccttcactttattagctgaagcagtaatcagaagaattaatagaataatcaaattatatacaaactcataaatcatcttgaatagtgctgtcaaaagttcggctattagtgggtcatactgttttgcagctatgattaagaaaattacaactgctgatttgtaccttgataggaaccaaaattgcttttgtaaagcatatgtagaaggggggctaccagccaaaaattttgacaactcttagtttatctgtagtgcaatttgatgtcaccagggcaaagttgaaattcagtacatgttggtatgctctctttcagtaaaatctgactcgttggatataatatactcaattagagttatattgatttaaatgtctgttgtttggggttaataacatcaaagaattagattatactccagatatacgcaattatctgaataatatactgtaaagatattaagttgctttagtgaatgtttctcgagtttgtaaacaagtaattgaagtggcagtttaataattgaaacttaagcaggaaaaatatctcattagacttagtacttcacattactcagaaactatttacatggattcccatattctttttaacttcaattaaaatgggacaaatgggaaattccttgctgctgagttttgtatttttttacagttgcatatacaggaatcgtatgggaatcgtgaagctagctggtgatactaactacaagtttcagccacagctttgtacagtcaaacattatactcttgtcagagcctattaaagtaaatttattttttaaaaaaaatccaagactgtactaacttagaaaacaatttttaaattactgggcagtataatttattttgtatagttgaaagtgacattttctttttttgtaactaattttttacaaaagaaaaccatgcttacaagtgaggaaaattgtctttactcttggtcagtagtcagacacaggtattaatttcaaataaatgcccattttttcaaattagtattcccatagtgttaatttcagaactctccaaaacttctgaaaagtatgaagattatcttggtattaaatggcaaataactgttatgtaaaacgtatgagcattctatgtaagaataactcagaataaggcttaaactttcttttatcaccggctctcatctcagagagagatatttttattttaaattaaattttaattattaaaaaatctctattaaaaatggaagtattacaaatgaggccagagtgcccttaaggcatttatcctcctcaatttcatccttagccccctaaccctctatcggaaggtaatagctcttgccagtttgtggtgtatctttcctgatcttttgctgtgcattgaaatatatatattttttctcatcagaggaaatatatagtattctatagtttttttctttttttttccttctgaagtttcaagaaacaggccagaaaccacagagaagtaaggctaactattaccgtggcatgacagtcaattttgtgaaaaatagctaaagggtgaaattcttgaacatataacccacaggagggaagaacatggtttttgtgaggtaattatatctcaaccatctaacagagttctttgagaggggtaaataaggtatgaacaagggggagccagtgaacatttgaatttccaaacagcctctgagaagattttataccaaagactgctttaaaaaataaatgttctcccaccatggggttgggaataatgtttagtcatgcataaagatctagtttaaacacaatatggaaggaagggggtggtttatatgagctcttacttgcatggggagatttttacagtaggctttgccaagaatcaatgtttagttttttgtgttttttttttaacatttttataaatgatttaagagtcagcatcgtaacacacttccaacccaccttccagtttattgttgatgctgagagcttatagatagtaaaataaaatgctaagctgaagagtatttgctaacggactatttcacaaggaccctgtgaaaaagcaggaaaatgacatgagtggccgtgtttctaagaagatggtctctgtacatttttcaacccatgaaagagatctaggagttgttatgtagggctccctaaagacattcacttttgatatttttgtttctacattcagaaaaaccaacataatcctgaacatagccatgaagagcattagaagtaaaagaagtatattctttctggattcaaaatggatgtctctttacctttatgttatttgtacaatttgaattttcaagactgggcagcaaaatggaacaatgatttaaataaggattactcaaaacaaaaatgaatatatatcatacaggacattaaaccagagaaagagcccaagaaaggagattgagcaaaagaaatcttatagagattctaagtaggattgctgtaggctagtttgctacaccccaaaagtttgaaccaaaggctttcttttgaatttaaaaaacctatttttgaatgaatttgcttaggtatctctgtggcagataataaagatggggcaaatagcatgggtgttcagactgaaaaatgcaattttattaagagcttagtttaaattatgatgtgtttaaagagtagtcaggaaacaccagtgcttttccatcaaaagttccattgaaatgatgtccattgacatcattgtgataagctatattgaggaatcattgagttggttcggtggttctggcccttgtacaaaccaggtggtcactgtacttatgaaacatagatatggaggctagggtttgacccaaacatataagttgaccctcagtattttagaaggctttatgttttaaagattgagtgatcacttgtagtctataatttgtgctaatttattctggacccctggtacaattactaatacagatctgtttttgtcatccaatacatagttttactgtgactgtcctatagaaggttaaatttaaggacagctggaaaaactgaaagatattgaatgtatcatctacagtctcatcaagaatagaggaagctagataaatggctaagatttataaaaaggaggcactttttgggagcaagttttctgaaggctatgtgttgttttttttgacagctttttctagattaagcatgatgattatgccttccaagattgacagcagttcctaaagggcagtccatctgcccacaaccttttccttgagtgggaaatccacaccagaagccccactagactcagatacttgtactacataatttcttgaattagcagcagtgctgttattccaggtccatgatgactccttaaggcacagaaactaacctgttccttgtgccctcctatatagaaattagtacccagagtattaagttgtaatcttgatgaatggccaagagatagtagtggtttttgaggttggtaacaatttgctgtctctaataatcaccccacaggtggagtaagagtgctttctgggtattccttcacagcaatacttgtataggaagactaccaggcttgagcagttgcatttgattgcttcacatttcatgggggagactgctttcatgaatgtgcacattaccttatacttgttctgaggaagacacctcccttctgcctccagtctattagcaattcttgtcagcttgatgtcttatatatgtccccagcctctccacttcttcatgtgcactgccattaccttgctttaggtcaccatcttctcttacttggtttatggcagacataactggcctcccctctttcactcttgcccctttgagaattctccacagagcagccagacccattttaaaaataatacaaatctgatcatgtcactgccttgctcaaaacttgctggttgtactactcattgtacttaagagtaaagtttaagatctttaccctggccttgaaagccttgcatgattaggcccccaactatatgcgtcctcgtttcctactgtattcctccctattcactgtgatccatctcccttagccatctctcttcttcttcaaatacactgagctagcttgcacttcaagttttgaaatttcattttctttctgcttggaatgttcttccaccctttcatgtggtcagtttcttctgatcattcaggtctcagctcagataccagttcctcaaagagactgtccctgaataccctgtctaatgttccaacccccatatcaccttcaccttatcctgttttattatcttcagaacacttaccactatctactcttatttcttgtttgttgtctctctcttgtactaggtaagttatatgacagcagggacagcatttgtctcgcatacttttgtatccccagtgcccagaattatacctggtacatagtagacctagttctacaaatatttgtgcataaaagtataaatgttgttgcttgttgccatcagcattaacacttctcttaaaactgtcacaagttcctctgtagaaggtagttgaattgaccaggtccccaagttgcttgaattctgttagaaactacagggcttgaacacctggaggtggactctcacacagtcaataagagcaatgtagcctacaaaccccacattggtggtacaatctgtaattattatctcctttgctacggaagatgatagctaacaaaagcgttgatgtatttaacatttaccatgcaccaggcagatagtaagcactttacatgtattaacccatttaatccttgtggcaagtctatgcaatagatatcattatccccattttatagtcttgagaactgaagcactgtcacacagctggtaagtgggaggaatcgggaaaggaacctaggcagtctgactcaagagttagaatgtccacattaatttcacaatcacccccacgagttgatctctttgcaatttgcacatcattactaaagttatacacttgacttctagtgacctagtaattttgattttggtgatcactgcttgctaaacaagcccactcaacttctgtcatcatgactcatatcaggtcacgcttgctgttttggcaatactggatcattgtgaatgaggctatgttgtagtggaacactcatttgaaggcttttttgatggccttgctgaatagagtaaaaccttatagataatgagtttcaagagcttgtagcagaggatgaggcctggcttgggattgttttgaacgtaactgtttcctgaggctgcaggagtcattgcctatgaaagatcatccccaacttggtttgatttaaggttttcttgacattaaaatggtatgaaagtgatacacattcagtacactcctcaacttatgatggagttgtgtcccattatacccattgatattttcagtttacaaggcaaggagcatctgtatttagctactgctcttgaggaagcattctgtttcaggccaataggaagtccatgctgagttggattccaatagcttgagtcttagcagggatcttggggagagatgatgctatggcatatgccgtccaattttgccttcccaggagccagacccactacagcaaaatacagcatttacttctgacacccaccatacaaatattctccttccctctacttcctgctcaaagaaagataccaaataccaagaaaggaagaaaaaaaaggggggaatgttagcataagtgaaaactctgataatttactttatactgtagatcatataacatgtttgtgggttacatatttatattgcatatttatatcatttatattactactacatgatttagtaatataaatatgcaatataagtatgtaacccacaaacatgctatctgatctacagtatatagtaaaactgcatttatagtgcatgaacatgtgtgtaaacagcactaagaccatcctgtgtaaaaactgcatttatagttcatgcatatgtgtgtaaataccacatgcacatgtgtgtaaatgcacatgtgtgtaaatactgcatttatagttcatgcacatgtgtgtaaagacttttgggatccccttcccgtgtgtgtgtgtatataaaaataaatacatgcatttagatttccctacatgtattttttcagactggcagccaccaatcaggtcaacattacaacatgacagaaaactcaatatgttgttttaaatatagtgttatgataaatgcatatgtatgaatatagttacaagaaacaaagttgaactttttgtagatagatgcaatcactgaagtcttacagtgtctcgtgacatgtaggcatgcctacttactgttggaatggaacttctgcttttcagtttacggttttagctggggtgtcactaaagcacattgatgatcaatggtcactctaatttttctcttgtaacagacctttttgtttggtttgtttttaatggaatttgatgaagagttcaaatgtatttttgtagtgacttttttggggacagtcctacctactgtgtttagtagatttcttttttagataagtcctgcaaaatttatacttgcttgcctctaggctgcatactaccctttggaagggaggtgtacagagctgtcttgccaggtgttatgttaggccttaggatggcttctgtaaactgcaccaaagatggagcctacctgacatctcagagatgtttgccatctttggttgcttaattgtccttcactaagacgtgttaacctttgggttgttaggctgccatttaatgcactggaagaaaacgtgtcatgtggaaacttattacctcccccaaaatcatggtaaagtatttaccttctactcacagctttttctttatttaaaaatttctagcttaccagtatactttatacatcacattttaaaatatggattacaagatagtcataatttgctaggtactctgaagaccactattcccatggttatactttgagtttttgcactatctaaaatgaagtcacacataatccatttaacatgtacagacagaataaacatgtactttcttgagagaaaataatgtgtagaagttgagggattattttactctttgtaataatttttgcaattcaacaggaattagaacaagtcttagagtaactttgatcatctgattctgttgctttccttcataatcccaagaaagataatactgacaatggggcaggttggtatgatggttaacagagaaacctctgagaccaaatcacttggatttttaccccagcaataccatttcctaaatgacctcaagcaagtcacttgacctcttcctcagtttccaaatctgtgaaaccctggcttataggattattgtaggatacaatgtgttaatacatgtaaaacatctgttgtgtagtaagcactcaatgctagttgtgattattatttgtatggttgttgttgttggctgtgtgccccaaagaacagtatgtagccaatagttatttccccacatgtaattccctacttctcatgtaaatgcctcctatttgggttttgaatacagctctcaagaactccctactactgtgcttcttacccacttacaaaagatttccactattgggccgggcacggtggctcacgcctgtaatcccagcactttgggaagctgaggcgggcggatcacaaggacaggagatcgagaccatcctggctaacacggtgaaaccccgtctctactaaaaaatagaaaaaattagctgggtgtggtggtgggcgcctgtagtcccagctactcgggaggctgaagcaggagaatggcgtgaaccagggaggcagagcttgcagtgagccgagatcgcgccactgcactccagcctgggcgacagagcgagactccatctcaaaaaaaaaaataaaaataaaaataacaaaaacaaaaaagatttccactattgctcgttgacaccaagtaatccttacacccccaaccaaaacttattttttttaaagactatcggaatgactgataagaatagcatacagaggagtctttatatcaatactcattttgtgtggcacttcttacaaatcacttttttttttcacttgggcataagatacatgaagaaaatacagaggtgacagagaacaaatgctgccattatgagctacacatagcttccctttctaacaaagactggtatgggggaaaaacaaatgagaagcaatatgaaaratgtatgtgcacatgtaaccatatacctttccaagagcacaaaatacttcttatgttctcatttaaaattaagaggatatttaaatgaattatcacaattctgtctcattattaaacttcttctataatatttcccatcattcacactagttcttaacattctttacattcttgtgttttttttccatatagtatatatccactgttaataaatcatattgttgaaaatcaggtaattttttgatgatttactataagtagttatagatgtccctgtatctcggcatctataactgtatttaaatgtatttgaggccccatttagcctaaaaatacttcataaaattaattttcaaggaaaaggatacttaatattataaagtaatagtatatttcataaacattatactatttcataaaaggaggtctttatagaaaattacatttaattttggttaagtggattatttaggcttttgataatgtaatagcctgtggcatattgttttatatatttttaacctgtatatagttttaaccttatacagcttccagtgggttctgaatttattcctttgtatttcttgtaatgtggaaagacatttaaaagttatttttctccagtggagaattgattcaataatatgaagttttatctaatgctctttttctgtgtgtatatgctttatggttgaacatgtggtcgattttagagtatttgctatgtgcagataagaatattgtatattctgtcgttgttgggtagggtgttctgaattcaggtcctcaatatcttggttatttttctgcctcagtaatctaacaccatcagtggggtgttgaagtctcccactattattgtgtggttatctaagtctctttgtaggtcactaagaacttgttttatgaatctgggtgctcctgtgttgggtgcatttaggatagttaagtctttttattgaattgaaacctttatcattatgtaatgcccttctttgtcttttttgatgatttttggcttaaagtctgttttgtctgaaataagaatagcatttccatttgcttgatgaatctttttccaactgtttactttgagcctatgggtgtcacagcatgttagatgagcctcttgaagacagcatactgttgggtcttgcttctttatccaacttgccactttgtgccttttaagtgggacgtttatcttgtttactttcaaggtcagtattgatatgtgaagatttgatcctgtcatcatattgttagctggttgttttgtagacttggttgtgtggttgctttatagtggcagtggtctatgtacttcagcatgttttttctgctggcaagtatctttcttttccatatttaggtcctttgaggatctcttttaaggtaggtgtggtggtaacgaattcccttagcatttgcttgtctaaaagtattttatttctcctttgcttatgacacttaggctagatatgaaattttgtgttgggatttctttttttaagaatgctgtatataggcccctaatctcttctggcttgtaatgtttctgctgaaaggtctgttgttagcctgatggggttccctttgtacctgatctcccccttctctctagcagctctcaagactttttctttcgagttgaccttggagaatctgatgactgtgttttggggattgtcatcttgcatactatctcacaggggttcttggaatttcctgaatttgtgtgttgacctccctagcaaggttggggaaatttttatggatgatatcctcaaatatgttttccaagttgcttgctctatctccatctctttcaggaatgcggatgtgttataggtttggtctctttatgtagtcccatatttctcagaggttttgttcagtttttcagttcttttaaaaaattttgtctgtgttgattcgaagcatcactcctcaaattctgaggttttttttttttccctcagattggtttattttgttatttatgcttccaattgcattatgaaattcctgtagtgatttttttttatttccagaagttctgtttggttctttcttaaaatggctaagtcatctttcaactcttggatcattttactgctttacttggatgcgtttcaaccttctcctctatctcattgagctttcttcccatccaggttctgaaatatatgtctgtcatttcagccatttcaatctggttaagaaccactgctatagagctagcgtggttgtgtggaggtaagaagacactctgccttttagggtcgccagaattgtattttgtttgtttttttcttttttaaaaaactttgattttaagttcagggctacatttgcaggtttgttacatagctaaacttgtgtcatggtgatttgttgcatagattatttcatcacccaggtattaagcctagtaccctatagttatttttcctgatcctctccctcctcccagcctcccttgacccataggccccagtgtatgttgttcccctctatatgaccacatattctcatcatttagctcccacttataagtgacaacaagtagtatttggttttctgttcctgtgttagtttgctaacgataatggcccccagctccatccatgtccctgcaaaggacatgagctcatctttctttatggctgcatagtattccacagtgtatatgtaccacattttctttatccattctgtcattgatggacatttaggttgattctgtgtctttgccgttgtgaagagtgctgcaataaacattcatgtgtatgttgtctttacaatagaatgatttatattcctttgggtatatacccagtgatgggattgctgagttgaatggtatttctgtctttaggtccttgaggaatctccacagtcatccataatggttgaactaatttgcactcccaccaacagtgtataagcattcctttttcaccacaaccttaccagcatctgttattttttgatgttttagtaatagccattctgactggtgctagatggtatctcattgtggttttgatttacatttctttaatgataactgatgctgaacttttttccatatgcttgttggctgcatgtatgtcttcttttgaaaagtgtgtgttcatattctttgcccacttttttaatggggtgatttttttcttttaaattactttaagttccttatagatgctggatattagaccttagatagatagattgtaaaaattctctcccattctgtaggttggctactctgttgatagtttcttttgctgtgcagaagctctttagtttaattggatcccattgttcaatgtttgcttttgttgaaattgcttttggcatcttcgtcatgaaatctttgcccatgcctatgtccagaatggtatttcctagattgtcttccagggtttttatagtttggggttttacatttaagttgttaatctatcttgagttaatttagatatatatatggtgtaaggaaggggtccagttttgatcttctgcatgtggctaagccagttatcctagcaccatttattgaatagggaatcctttccccattgcttgtttttgtcaggtttgtcaaaggtcagatagttgtaggtgtgtggtcttttttctgggttctgtattctgttccattggtctatgtgtctgtttttgtaccagtaccatactgctttggttactgtaaccctgtagtatagtttgaggtcaggtagcctgatgcctccagcctagttctttttgcataggattgccttggctattcaggctgttttacggttccatataaattttaaaatagttttttttgtagtcctttgaagaatgtcagtggtagtttaatggaaatagcattgaatctataaattgctttgagcagtatggccattttaacaatgttgatttttcatatccatgagcatgaatgtttttccatttgtttgtgtcatctctgatttctttcagcagtggtttgtagttctccttggagagatctttcacctccttagttagctgtattcctaggtagtttattcattttgtggcaattgtgtatggtggtctttcctgattttcctctcagcttgacagttgttggtgtataggaatgctagtgatttttgtacattgattttgtattctgagactttgcttaagttgtttattagcttaagaaacttttggctgagactatggggtttctagatataggatcatgtcatctgcagacaagatagtttgacttcctctgtttctattttgatgcactttatttctttctcttgcctgactgccctggccagaatttccaatactgtgttgaataggagtggtgagagggcatccttgtcttgtgccagtattcaaggggaatgcttccagcttttgcccattcagcatgatattgactgtgggtgtgtcatagatggctcttattattttgagccatgttccttcaatacctaacttattgagcattttaaacatgaatggattttgaattttattgaaagtctttgatacatctattgaaataatcaaggatattggcccgaggttttcttcttctgttatatctctgccaggttttggtatctggatgatgccagggtttccagaattcttacggtggttctttctcgtctgtgtgagctggtgtttaacctctgaagttgccgggtttttttttatatgggttttttgcttttatatttttttatttttttgaaggtttgtttgtggtataagttgggtttatttcattggcttcctttctgggtactttcaggtggccaaggctcagctcacctgtcctgggctgcatgctctaaccctaggtggctgggaccaggcctgctactttgttctggtttattgaggtcaagcacctgctgtgctggagaaggtgaggtgttcccattccaatggcaacaattcttcaacaggggctgccagcaaaagtgctgcaattgggcgtgggaggcacagaatgggtgctgtggcagctggggcacaggcaagtgtatactagcagggcagtgttgggctccatgggtgactgcagcaatggtatcgctgagggaagggctcccagtgtgtcagtgggactgtggttggtttgtgtgtgcatgggcgctgatgtggtggtggtagattcttatgcatgtgggccctggcagcgtggcttggggaggctgtagttgagtgcgcaccgttgaggggaggctgcaagtggatgctcactgggggaggtttgtcttcaaaaatactctgatgggaaggtggagactgtcagtcaatgatctatgacagtgaactctggcaaggattttgtcagggcagctgaggctgtgctgcaagcaggtgtggccagaggagatatcagcacatgggggtttgtttagatcacaccggcccaatcctgcaggtaagatagacttgcaatctccaggtccagttgctcacaaagggtaaaaccacctagaggagcatggtgagccttgggggatgggctcccttggttgtgctccactgcaactcttcccgtgccaaaccttctgggctccaagtatactggatttctgtctctaccaactctccgagcaattctccttgccatctcaaatgtccatggggctcataggggctcctgcatctagcattccagaggtccatgacaaaggtgaaccattctatgcctatttcactcaccccttctttaggagccgctagtggccaggaacaagttttggtgtttggcaaccccatggagtcttctcggcctcctcccttttcagccctggggcctgcattctttctccgtatatccactctcagtgccttcttcctgaagatctgttcgcagtatgcttgtctacttgattgtctggtctcgcttggtgggagaagcttttattggctgtgtctagtgtgccatcttggctcttctccttccaaatcattttttcaaggttccattctttccccactgttttgtaatgccacttctgtcatcatttccatacattcatggatctttttattactttcctattggtgccataacaaacttagtagcttataacaacacaaatttattatcttaccatcctggaggtcagaagtttaaaactggttggcagggctgcatttcttctcgggccactaggggagaatctgttccttgtcttttctagcatatagaagctgcctgcattccttggcatgtgccccacttccaacagtgggatcattctgacgtctactcctgtcttcacatcatcttctttgactttggccttcctgcctcctgtcctccagtctcctctcccgtctcctttctcctttccttttccttttttctttctttctttctttctttctttctttctttctttctttctttctttctttctttctttcttttttttttttttttttttttgacagagtcttgctctgttgcccaggctggagtgcactggcacaatctcagctcactgcaacctccgccttccaggttcaagtgattctcctgcctcagcctcccaagtagctgggattacaggtgtgcaccaccatgctcagctaatttttgtatttttagtagagacaaggtttcaccgggctggtctcgaactcctgacatctggtgatctgcctgccttggcctcccaaagtgctaggattacaggcgtgggccctgcctctttctttcctttttttttttttttttttttttttctgagatggagtctcactctgtcacccaggctggagtgcagtggcacgatcttggctcactgcaatctctgcttcccagattcaagcaattctcctgcctcagcctcccgtgtagctgggatgacaggcatgcaccgccgtacctggctaattttgtatttttagtagagacggggtttcaccatgttagccaggctggtcttagaactcctgacctcaggtgatccgcctgcctcggcctcccaaagtgctgggattacaggtgtgagcctctgctccctggccacttctttcttttaaagacacttgtgattatgttgcacccaccagaataatctcccagtctcaagatcagtgcattaatcaccactgtaaagtccttcttgccagatatggtaatatattcacaggagccagagattaaaatgtgagcatcttaatgggagagtgcatttttcagcctaccatagtcgtctttctggacattccattattattttcctgtgtttttgattcattcaccctaagcatacccattttataatctcaatcagatagttataccatccgaatatcattttggggagtttaatcctatttcttttgtctgctcactcaaagtaagatgtgtttcctcatgtgttgtataattttagattataaactcatcatctagggactctatctgtggcaatctcatgtggccttggttagtcttattccaccagaaagctttagccattgcttcccctaagtgtccaggagtctactcactgacccagaaccacttctcatgatattttatattttattggctaagagtttcttgtatcatatagtggtataatttcaaacccctaacatgtatgagggcagactactgataatattaataaatacacagtgtaatcttcctccattcagggatccacccaaagaaaaatggkttttttttgcttgttttctccctctttttgtacgtggatttcttttcttggttaccctttaactgaggcatagctctttaataatccagatattataagaaaatatctcctttcctacttactgccttgtttggatcttaaggcctctcctctccttatgtgtgcattaaaacttatgcacttagattactactgagatagacacactccctagggcttctgctgcatttactcatgtttactgctctagctttcagttcccagtttagttttggctactggagattttgtttacatttattgtaagtaaaatatctaggagttttccagagtcttccctgcttaattcctctttaacacttctcaatggtgatttctcttgggtttgtcatacatgcattacctcttgaagctgtttgtgttctttgtaccttaggtaggcaggagctgattttcgggggataattggctcttgcttagggacacttctggtttgctcacagttctaagtgtcagcattgtattattatcagtaacacctctactgtgtcaagatattactaatcttgcctctgagagatttttaatactatgatagagaaaatagtacattatcaaaatgttttttctgtaataccagttatgaagtgtaaaatacttaaaagaaaatacttttacctttattttcaacccaattaccctaattcttatttttctgttctctttctaggatgtgtgctgtgtttggtggaatttattgtcttcgccattcagtacagtgccttgtagtggacaaagaatccagaaagtaaggatgatataagtaaccttcatatatatatathtatatatattcatatatatatattcatatatatatattcwtatatatattcatatatatatacatatatatatatatatatatatatatatatatacatatacacacacacatatcccaaacacaagtgaaaaatgctgaagtcagttttaagaaaaagattcttcaaagatcctccttggtattaataacatatcaaccttgattaaaagtaatttgtgtttaggtcctccagaacaagaatagtgagttcagaatatagaaactaaattaatttccctgcaatatgcctatagctcctggtcatccaagcttggaagacaaatcatttcagctgccagggggtgggtgatgagtgatgttagttttccttgtggccttacctcctctaattgattttcatcagatgacaacaaagccctctgttattgcatttttaaaaatggaattcacctaaagactcatcagattaatctctgctgataatgcatgtcactccaagagaaaagactttaatgagtttttaggtagattgttgtcataaaccatgctgccctcttatctaaggataaattttttacaatagtatcaggcctataggctgctttaggattgaaataagaatttaccttttctttaaaagagctgaacaccatctgtttactgtgtattttatatttcagttataatcactggtctgaattagactggataaaatattctttgatttctgccttctacactgaaacttaaatattttagatccagttttagaaactatctaaattgcaatgtgtttttcttttttttacatgttctcaacaatctactgacctgtatttcttagatgattgtttttaggagtatatagttaaatagtatttttgaggttataaaacattttaatatttgaactggaagcttaaataatataaattttaagctgtttctttcattttacaaaagttttgtatcgtttaagtggcatacaatgtctattaacttcttatagactagttgtagtgaaaaaactagtattttgaattatggtgaagaaaatcctcaactctggaaatatgtaatgcttagatagtaaatttgctttagaagagtaattctgtagtataagataacattgatacgtattttaaacggcttgtaaagtacctttagcacttttatagaaggatagtacaaaatgaaacatgatagtttgcagagaaaaattaatccctaaaggcccaggatgttaacatcttgattcatgaagaactctgttgaagttaaggaatagttgtctttagacttctagaatcatttttctttgtgcattcattttgctacaagagtatgttcccatgacagaaagccagataatgaattgcttatttggtgtttatttgcttagattcttttacccttggggtcccatttcagtcccatgtgacatgaataatttgcatagctcatgtttgtttgtttgtttgttttttaaaggtatgctagtatagtaattgcctttgttgaactaaaggctaccttttccttacctttgacttagtttttatgacatgctctaaacagaggagctcttttttatgatctggtacagattccagttgcaacagatagctgaaagctaatggtctagagaccaaatgaatctctagattggtggttttcaaactttaatgtgcccaaaaattaccaggtaatcttggcaaaaatgcagatttctgttcttcaccctcagaaagtgaaattggttaatatgcttagggggaatgcagtaatttgcagttttaaagaaaaccccaagtgaatctagtataggaagtccttagattagataacactgatctgtaaggtaaaattgagggtttagtaaagggtactgtgttccatcacaaactgggggctctaggtcttaattcagtctaaggccgtatcaatatgaaactgccagatataccaacaatcaaatgtgaattttaaatagcagacagactgcttctaagaatatcttcatagaaagacatgtcttgttttgtaacttctaaggcatgagtaaaggttgtgtagcccttgaatgagaggagacttggatttccactagtgccatgaatgacagtgggcaaatcctttcctctggaccggatcctttatctgtaagatgaatgacatggactctgcagtaatctctggatatctttctagatttgacatgccttggttgagttcttagatagttctttggtaatgttcttagaaagtacttggcttttccttatttagaaataaattatcttaaagtattttatatgctcaaatgtaagccattctcacataatgcatmatcttcagtcccagtgagaaatttaaagaagttgaacaacttggatgtgcctgcttttatgaatataaattaaatagcacacagtcttcttgtgctattaattatattgttatattactagaaccccagttttccagtgaacatcatcttcttgtccatcttgttttttcagaatgcaatgattttggattctgtatatgaatctcttcctggaaaatttattctaagctataattatttatttctgtaacttgccagtttttaaaacttgacctgtaatcatagtactactgtcatctacaatattctcactatactaaattgcttaagtgatctttaaaagttttaagactcaagcaatacttgaaaagtataagttcatatttataccttcagtaataattaccatatttatattaaatttttcctctttaaactagcaagtcaaatagtctctataaataaaagctagcattgactgaagttggctcaggtcagcgtatctttaccaaacacagctttgccattcaaaatcaaacatacaagagagataaccagtaataggagatattttgttaggacttgaacataaagtgagggatagttttttgagggaaaaaccttgacattgtattaggcaaatccaacatacatttctttttaaggattcaaggctggcttaaacaattgttatgttctaagtataattagggtactcactaaggaatctgcaaagatttgcatttgtctccttatggtttcagtttgcctttcttttcctagttttctatatggaacacttgacatcctctctcctctttaggacagttaagaactacttatactttgagtcaaagttctgagtttattctgtgatcccacagactacatcagaaccctctgtcagtctccactccccactgtcacatcccctcgtatgatcattttataagttctctataagaaaaggcaggatctcactgttgtatctccagaaccaaggcaggttcctagtagccattatactgaataactttgagttaaataaatgattaaagattaaagactggctataaccctttttgtgcttttctttgcactctccatttaggaaaactgagagaggcataagggatcatagcattgagtttaatgtggtgattatacatcaaaacactgtacaaactttgaccgaagaaatagggcattgaggaggcacactaaatcatggtatatggaatatgtaaccaaatgcatacctattttcagccaggttttatttttcatttttgtttgattggttctgctttcttatttgagaggatgtaggtatgcatcagtggttcttttctaaaccttttcactaaattctaatactgcatgcttccgttgactgtttttagaaaaactgaatgttctagttgaacagttttcttttcctttgcagctatgctgaccaggtaaaactccggtaaattagatctggccatttagtagtatagtatttgatatattggtagggtagagatgaccttggactaggaccagatacatctataaccaatagttgtaattaattacttcagctgctgtttcctgtgtacttcacctgtctcacttaccagctttcctactatgactctttcttgatgtcaggaatatatttttctgatgtcaggaatatatattttctgatgtcagatatatttttctgacttttcttttctttttttctatttttgagacagagtctcgctttgttgcccaggctgcagtgcagtggtgcaatctcagctcactgcaacctctgcctcccaggttcaagcgattctcctgcctcagcccccctagtagctgggattacaggcccgtgaccacgcttggctaatttttgtatttttagtagagacgggttttgccatgttgtcagggcagtctcgaactcctgacctcaggtgatcagccggcctcagcctcccagagtgctggtattacaggcgtgagccaccacgtccggctgtctatgccttttctagatacttggaagttagtaatgaatagaatgtgagaccaagtttgaggtgactgactgttaataccatttgtcattgctgaagcactgattttagcatggcctgcttgcaaaatggtagtggtcatattctggatacttaacgtctgccaacccccgtgctagttgttatggggataaagaagtgaatgaaacatggaccttgcccttgtatacaaggagacttcagtaaagagtacagctctaaagttagatagattggatttggatcctgactttgtcactagctgtgtgtacttgagcaattgtttaactctctgtgacccagtttctttatctagaaacttggacaattgactacacctacttcatagggttattataagtattaactaaatagacaaaacttgtagaaccatttgttacacattgtaagtgctagctatgttagctaacaataactattaatataattggagaccttggaatccagtggtgggggagacctattgtgaagattcttctgtgctatgctaataaggaatttggactataatcagaggtaacaagattaaatttgctactttaagttagtaattctggcaatgatttggaagaagcactgtgatggaaagtgattcttttcctcctaaatcagagattctgtatcgtttttttcctgtctctacactattcacaaagtacggaatacttcattaaccatccatccattcacccatccatgcaacaagtattatttgttttctttttgccaggcactggggatacagcagagaataagacaatcagggtctttgttctaaggaacttacagtctactgggggacattacagaacaactaaatttataagataattgcacattgagatctgttcggtatgcagatctggccccctccttatttaaaaagcttcagtgcctttatataatctcagaataaagtgtaagacctttttacatgacatatgacgggtgagactctgtaatctggcctctgtctccctgtctaggctcatctctcttccctacttgcttttcattttattgtcacataatactgatctgttcatgggtctctgtacctgctgttctcttacttgcctttgtaaccccgcaaattctgcccttctacctgagataactgtatccttatttgcttgcttaactgtatgttatcctttaaaagcaacaaatgtgtcacttcctccaaagagcattccctgatactccacccctccaccataagatgagttaggtacctcttctagtactgtgtaattccctatccttatcttttatcactggactttgctattgtcttaaaattgtctctgcctgaatcttcaaaaattgtctctgtctgaatcttgtcctttagggcaaaacatttttattcttacctcttagaacagtgcttggcacatggttgttatgctatacatttatgttgaacaaatgaactaccaatttsctakcaggtcattatcatattagacattgtaagagtctaaggcagtatcagtggagacggagagaagaggctagtttcaggaagtatttataaagcggaatcaaaatgttatagcagactagatataaaaagagatttgaggtaggaaaactgctgattatgccattgcctgacatagggattccaagggagtgggagcaggtgaggagccatgataaactcagtttgcagcatgctagttttaaaaaatgcttggctaataatactatattatttccttgagatttggtaagagcaggtattaagttcctcatgacacccacagatggtaatgatgggtggcaatagatgtgttaattcatttgtggtaatcattacacagtgtatatcaagtcattacattatacacattgactatatacaatttttgtttttcaattaagtatttattaaaagggagcttggagtctatccagaaagtagtagataatagacaattacaaatatggatacagaacttaacagaagtcagagcctaaaactatagatttgaagttatttgcctgctaatggtgtttagaactagtagagtgtttttcacccaagaaaaatgagtgggaagcatttgaaatggttttatggatgaggtagcatttgaactaatgtgtttgagaaagctcagaagggcatagtgactagggaaaattattttgttttcttcagtgattgagaatcttctaatttccttagtacattttcctttaaattattccatatgtgatttctgctttctttatcataaaattagttggtatattcattctgaagatcacagagattgaatacttgttttagtgttatttttcctcttctgggccaaattccagattttgagttttcatcttactattttcttcctcatcatcattttgctatctacacacttatatcgttgaaccaataactgaataacttgtgatttgttgatttagaaagcttagctctagaaatgttctgtctggcttgagtgttttgtatggtcagcttggtcattgtgtccctgtaactggagacacctgttacgttcctcctcaagttactatttatgaggctcagcaaggccctcaactaaatcttacgtggtttaatctttcctgccttcctcaggtttatgtgggaggggtattttcatgactctggcagcactgtttattttgctgctttctgttaattaaatgtcatctaattttttatatgaatctttataatacaaagactaaatttagatctaaaatcaatgtttttttattcattgttttcccaattatgctgaatatatgacagtaagttaaatgtctgagaggaaaacatatcttatcacttgcttaaacatgtcttgatttgagcagttttgcttaagcctagagtcttagtacttcagcgtgatattatcaggtgagtcatgttattatcatctaccagactgagacttgggcatatgtgaccatcacctcaatttctgcagaaacaaatattttatctgtaccaatagcccttgatttttctccacctagcacaacataagagatacaacagtagcagtggcacgcttgacagtgatttttttcctgggatttgggagcttatcagaatctccaggggtactttataatttcaaaaagtcccccaggtgtgattctgatttgcttccttttcctcctcctgctctgagaatcaccgtttctttagaagcatcagcataaataggcacatgtattagtatcttctcctggtatggttgagctccctaactcccaaacccccatacttgccttttgagtgatctccattagttctttctaatatcataacttttgaaacaaatgtctgtcaccaaaggtatggctaccaccaaaacaacctcgttcatgtttagaagcctacaaagcttgagggccaggtttaataatacagtttaaatgggaaccctttttaaagacttacactcaggtctgagatttatattaacactgaccccctcccccagttttattttaacattttatgatgaacattttcaaacttatactgacatggaaggaatttcaagagaacacctgtatatccacctcctggattctataacattttaataaacttgttcagtcacacgtctacccaaatattaacccctctatccatgtatcgagtcatctttttaatgcatttgactgtgaattgcagatgtcagtaaaatttcccctaaatacttccagcttgcatattattacctggagctcaatatttgttaagtgtttttcttttgatgtaaatttatatacagtgaagggtccaaatcttaagtgcttcttaactgagttttaacaaatgataaatctgtataacctaagcccctatcaagatatagaaatttaacaaccccttttttctgcccagttatttcctcttgactttacatagtctctgaattaaaggtaagaaaaagatttgtcagtgcttacaggacaaatagagattgatgtttaatgacagcagatttctcttctcaattgcctgaagcactttgtgtttcaaatggtatatgagtgttttaaaatagaagactgagtgaattacttatattttcagtttttaaaacattattttggagaatatcagatgtaaatacttcagatctattttcttaagtattttataaggcaagagctctagttcaatgaaatatgaggaggtatgtatagaaacagaagtgtagaagagaaagaaggtggagatgagatggaaaaaaatcatgtaaatattaacgtaatattacaaatgttatattaaaaggtggttaattggttaaaatatctattatgtacatgtaacatcactagacatcatagactatccttacaacagtgggatgccatttattaaaaaataccagcatattataatctgcctttaggaaatacaaattaaattcctctcactattggtcttgagtgttagtcattttatttttaatgcctttattcctggaaaatatcacttatatggcttatttttaaagtgaatgaacagattttaacttataccagtatattttacagtatgcttttggaattaatttgcttgcatcttatgaggggcaacacataagttcatttctaataaaataattctgttccccaaaggagaagctgtgacacaaataaattgatatttccataatcaaaagatatagcaaacacacagtcatttgcatatagttcctgaaatattgcatactggctttgtcaatgctggtaagtccatttcaaggatgttgcccttagtccattagtttggataatgagccctataaagtacatttataacttgtggcactgcaaggagatggattctaattttcatccttttatctagacacattgaaagaaggtcaatggagggttctatatgattcattgttccaacacatatcagatgacagagacctgataatgtccgtgcataagtgttttccttatttggaaacaacacttcaaagaaatctttctatgatcatcctttgaagtaaagtagaaacagatattaaaagaagctctatcacatttttctgtttcaaacattatccaacacgtgaccatatagctattcttggacaaaagagaaaccaacatttaacagaaaaataaaaacctcgtaaaaggcctttacaggctctgaatggtatagcaaggtatttaatcaatttttctctctttcttttcttagagctgtgaaggggggaaaaaaaagcctgttttctaaacaaagggaatgcttttatgttcctaaatattaggaaatttatggtttactataattcttatcctgactttattcttattaatggcattcaaaatacatgtttaagttgtattccatgttcattttgtactttaaaagccctcaaaatagcaacaagaatatatattctgtcatttactgtcagttttgtgtcagaaaacatggaattgtaggcaagttttaaatcttgtcttcacgtgaaattcattttagattcaaaattggtagccgattacattttctcaattatttaatcattaatatgaacttttatggtatgcttatcttctttatagatgtaaagcaattatagatcagtttggtcagagaataatctctgagcatttcctcgtggaggacagttactttcctgagaacatgtgctcacgtgtgcaatacaggtaaggccccctccacccattagcaagcgaaggtaattttattgacattcctgtgtaattctgttcttcaagtaacatgcaaataaatgccaaaccaaagatatattcaatatcttacttcacttacagggtctggttttagggaagcctagcataatttcaactcctttgcttcagctggggtttgtctgtaggtcaggcattcttctttcatgagccaaggaaagattaaagccgaacttgacttggttttgggaggtgacacttttatcctgacttaaatctttgaaacgtgccttctggtggttatataactataaacgaaacttatccatggaatcagaattactgcttcactgttttgtgcattacaggcagatctccagggcagtgctgattacagatagatctgtcctaaaaacagattcagatcaacaggtaaattcagtcctatatatttttaataaaagttgtatatatgaagatgtttcggtatatatatacatggtgaactaatcactacactcaagctaattaacatatgtctttacatagttacctttttttgtggtgagaacacttaagatctactttcagcaaattttaaatatataataccatattattaactgtagtcttgtactgtacattagatctctaaaacttattctttttgtgtaactgaaagtttgtaccctttgaccaacgtctccccattttgcctagctcctggcaagcaccgttttactctctgcttctatgaatttgaagctttttgtatttcacatataagtgcaatcatgcagtactttcctttttgtgtctggcttctttcacttagcataatgtcctccaggttcatctatgttgttgcaaatggtaggactttcttcttttttaaagattgaataatattccattgtttatacatacacacaccccatttttaaaaaacccattcttccattgatgaacacttaggttgtttccaaatcttcgctgcaatgaataatgctgcattgaacatgggagtggtggatcataggataattctatttttaatttttttgtggaacctccatactgttttccgtaatgtttgtatagatttgatttgcattccaaccaacagtgtaaagggtctgcttttttctgtatcctcatcaacacttgttatgtcttgtcttgttaataatagccatcctaacaggtgtgagatgaaacctcattcagtcctgtgctaataacattgttactaacttaatctacatggtaatatgtataaatcaatactggcaaaatacagcgtattaagctatatgtactaaagtttgagtatcccttctccaaaatgcttggggtcataagtgcttggattttaggggtttttttggggcggggggtgggtttagagcattttggatttcggatttttggattagggtactcagcttgtcatattttttaaatgtgtttttaaaaaaatacatgatggcaataatgtaatggcattggtttcttaaggatttccatccagtggaacaaatagttgcatcttatataacagatttattttaggaaaatcagactaaatactagattttgatgattatttctgtgaaattgaaaatacattgttatggggagaaaaagagaatccccagagaatacatttaaaaatctggtaggaaaagacagtagccaaccctatggcaatgactataagtccactgttaggcctggtttgaatgtatttccacacatgtccccggttatggtatttacttaccaccattgttcatttcagtaccctcttctttctccttacccccagttccatagaggaatgtcattatgcctctgatttttcctcagtcagacctcttaaattccagggtaccagttctccttctgaccatattttatagtgattgataaactcaccttactcagtaggcgtgactttcagttctgtatgccactgctaaaagtaggctcctaaagttctttaagttgaaagctgcttcttatgtaaaagaaatatgtgagtggataaagtcaattcatttgtaacaatttttattgctaataaatgaacgttatatacaaaaaagtcccccaaatatacttgttatatgtgtaagcataaatactttcattaagccattcagcaaacaatgagtgccttttaccttccagccagtgttgctgggttctaaggagatagtggtcactatgatagcatctctgctctcaaatagcttacggtctggagaatacagatactgataagtagcaactgtagttcagagtgacaagtatgagcatgggcgggtagaagaaatagtacagcagctattatattacttactccactgtcctacaattactggtttattgtctgtatctcccagtaagctatgaggtttgtgagtggatcaaagagtgccagggaggcagaagagtgaagagagcaaatagagataactcttggaggaagctaagctgtgaagagtaagagagaggaactggtctttgaagagggatgtggagatgaagagggtgtttctttactttaaaagattagtatatatttcagctgatgggatgaagccagtagagagggagaggttgaagataacgaagtaagaaggaggataattgatagatcaaggtccaggcaaaggctggggaggctaaaattcagagaacaggcaaaaatgttgcccttggatgggatgggagacacgttgaaaccagagggtgaatgcatttgtagatttgggaattcacatcttatgggttacatttattctttaaattataaacaaggtgaggtcatcttttgagaatgggggtgtgcaaatgtggatgggtagaagctcaaggaaagatgtaaaataatcaccataaggagttggagagtgtactgtctcatggtcaaattgctgggcaatattaatggcccagttgagtctgaaggtcatgaatctatagtggcattaatctgctcctatccttccagctctttcattctcttacccccacccagtctgttaagagacgtacaattcctcattccctgtttcttttcagtttatcatctgccttctgcccttttccttttccctgtgctagaccccatagtaaatcttctgaattgctctttgtctgacactctcagtacccatgttgtcatgtcctttcactacacccacagaggaagatcccattcctgagtcaggctgtaatcttcatctggatcactgatggctgcttaagaaaaccatgcaaccagacagactaaccatgccacagacacaagggtgccagcgttattcagctggaccttcagcacacaccaccagtcagttcttccactggcctcagacagcccctttcccttttccctcagtgcctaatccaagtcttcctgattttacccaccctgcttatcccctgctcctctcaacctgctgcccctcccccaccaaccttgcttcgctgaaaatagtgaggctgtccaccacgcgcagtagtccttgacttcctgccccaccaccacgtgtgtacttcagcccaggaatgaatcaggaggctcccctccttgttcaaagccagcccttttgacaagtgctcttgtacacgcacacacaccaccctttattgcctgctctctctcctgtatcttcagcctctccccactgctgctggcaacattttttttaaacagacacagacacacacacacacacacacacacacacacacacacacgcacacacaagcattttctatttcatatatgctagtatatatatatatactactttctatttcatatatgctagtatatactttcatatatgctggtatatatatactttataatatatagtatatatataatatatatattagatatatatgctatatattatatatacttattatttatatattatatatacttcatatatgctgttatatatattatatawtatgtaattaatatataatatattatgtaatgtattatatattatgttattatataattaatatattatatattatatgtattatataattaatatatagtatatattatatgtattatatattaatttcatgtattatatattatgtattacgtattayatattatgtattatatatagtatgtattatatactatatataatatgtaatacatattatatactatatataatacgtattatataatatattatataattatayattatataagtttgtactcttggcttccatgaaactgccctttggttcccctcatgactctggctgtttcctctctacttctttagtgggctcttgttcctttacccagtccttaaatatcagggctcctcagtatttttccctcagcccacagtatgccttgctttgggcatactcactagatgactctgtgtagtctcatgatatcaattctgcataaatcttggtgacagacacttctgtatctcccaggagtgtctggcccacatgctaagcttcctgctggacatctgtcaaatggaatacactcagaactgaactcaccatcttccctccacaaactgctcctcatccagtgttccctacttctgggaacagttctgacatcctttcaatggcaacttcttccttccctctctgacatctcttcaacttcacgtccttcaatgtacttcctaaaagttgctttgatctgccttttctcactgttcagttaggttctcatcacctctgacttgtaattggtcaccctgcctctcatcttgtctacttcaaatctgccttctacatatccttcagagtgatcagtctaaagtgtgtgtcctgattgtctttctttgttccctgtagagagttttcttctttcatcttctctctttttttttttcttttttttttttttgagttgtgcagtatagatagaatgatgagacttagagggaagaataggtgtgggtccaggtaaattttatggaagtgatagtagagggttgagggaattcttttttgatggttttttatcatctctatgaggtttgagacagttaacttctcagagttcaggtgacggaggtactgtagtaggaggttactaattgcatctcagttaaaaaaaaaaaggtgatagtcgtagaaatcaaaagacgtccttacatgttattgcagtcattaaggtacttttccaattatggtcatgtttttagttgtactcatttaactattgttcaacattcaatgtcttagtggcttctatctctttaatgccaaagtacattttctatcatgaacaaagggagttaagaggaacatggagaaataaatttttgagacattttgaggctagaaatgcacataaaagtaggatagtcatggttatcaaaataatttctatgtaaaatttgttttaggtgtttcctctttgggccatcactgtgacattctcagtcaaaatgtagcatagcacttatagggcaaagtgcaaatgggcttttcccttttgacaagtattttctatgtgagaggataaaatttcctcagatgaatattagtttgaggattagtattgaaactttaggatctacaaagaaacattgacctgggtcgggcgcagtggctcacgcctataatctcaatactttgggaagccaaggtggctggattgcttgaggtcatgagttggagatcagcctggccaacatggtgaagccccatttctacaaaaaatacaaaaaaaaaaaaaatagccaggtgtagtaatgcatgcctgtaatcctagctacttgggaggctgaggcatgagaatcacttgaacccaggaggcgggggttgcagtgagctgagattgtaccactgtacaccagcctgggcaacagagtgagactccatctcaaaaaaaaaaaaaaaaacaaaaaaaaacattgacctgaaggtcatttaaagttttaaaatataaagccatctagcgtatcattaatgcctaggatagcatactacatataaataaatagtacttaagaataattttacattttacttttgattctgaatttctagttttattaatggagtctttaaaaattgttttcaaatgttttgatatatatatagtttgactgcttgcttcaatataattggaatgggtaacatctttaattattaatgctaactgctgtttttagccattatgagtaatcaagattgatttaatatggtctgatttcaaacagcaaaatacacatatttcagaactaagaagtcataattgtatcctttgaaaaatacagattgagtatcccttatctgaaatgcttgaaaccagaggtgtttgggatttcagattttttcagattttggagtgtactagttgaatgtccctaatctgaatatctaaaatctaacatgctccaatgagcatttccttagagcatcatgtcggtgctaaattttggattttggagtattttggaatttagataatggttactcaacctgtagtaagtttatagtaagaaacctatagtaagtaaggatttaataaatattaaagatatttaaaagttattatctatgagaattatgaaaatgatacataaatatgtttcaaattctgttccaaaattaaatccttacaagscatatttttttcagacatgatgtttgaaaaagatactcagtttagaagttaacagcattttaatgttagaagaatgaaaatgagatctaacagctgtgtctgatactttatttttgctttttagatttccattttgacagtgccagcagaggaaccaggaacttttgctgttcgggtcattgagttatgttcttcaacgatgacatgcatgaaaggcacctgtaagcatagtagagtggttatttgtattttgtgtttgtttagggggtaaagggggcagttattacagttgtgaaggttgtatttgtagagattttcttacttttttattattcacagtttttgtttatataaaagatggttatagagtaagtcatttcacaccatccccttacctataaacatttcagtggctaaatcttcacaagcatgatgttttagttctccagttaaggaattttatgactttcaattctaatttttatttagcttattgaaaacctggttgcataacattttttttattgttaattttttttctttactttcttagtccatttgggctgctatgaaaaaataccttagactgggtaacttataataaacaatagaaatttattgctcacaattctagaggctggaaagtccaaaatcaaggtgccagcagattcagtgtctgatgaggaccctttcctcataagtggcaccttctgtgtgtcctcatacaggcaaggggataaaaaagcttccttgaacccttttttaagagcactaatcccatttatgagggcagagctcttgttayctaaccatcttccaaagcccctacctcttaataacttttgcattgtgggtctacttgaggtattaagaggtaatacttttgtattgcatatgtcaacaaatgaattgtggggagacacaaacattgaaaccatagcaccttgaattctaaattctaaatccaattactgaacttttttcatgtataaattttcaatktattttgtttatttatgagactaaagttaaggactactttacctgytctttcacttatttgtttcaaattttttgtttccagcattagatatcatgcattctacaacatatttcttgaggctatttcagtaaataggagtcaataagtatacattatacatcactgtgtctagacctaagctatgtactataagtattagaagcagaaggtgagatacctgatttgaaatgctcataatcttactgctcacctaatggaacaagactatttattaaccaagtacaacatattgtgctaggcatttcatggtacgtaaagatgaataagatattcccttaccataggagattcacagtctagttgaacagataaaacaagcacagaagtagctggaagatgcaaaatatgagaggtaccaacaaacagtgtactctagggattcataggagggagacataatatcattaactagaaaaaaattttttgtaaaaaaatatttgagtaaacgtaagtgttactcagattgttatgtgagttctgagaagcaaaaaaactaatatggttttgcgtagtcacaaggaaaacttcagtggggaaatgtagagctactacttaaaaatgggaacatgtggtcaggcagaaaagtgggaagtctgatgccagcagagagggttaagaaaacttttcaacattgctataatcctaaatttcctttggaaaagtagctcagaggaccatttctccttttatagtgtattagtcccttttcatgctgttagtaaaaacctacccgaaattgagaaggaaaagaggtttaattggaatcacagttccacatggctagggaggtctcagaatcatggcaggaggcaaaaggcacttcttaacatggcggtggcaagaaaaaaatgaggaagaagcaaaagcggaaacccctgataaacccatcagatcttgtaagacttacacactatcatgagaatagcacaagaaagaccggcccccatgattcagttacctccccctgggtccctcccacaacacatgggaattctgggagatacaattcaagttgagatttcagtggggacacagccaaaccatatcattctkcccctggcccctccaaatctcatgtcctcacatttcaaaagcaatcatgccttcccaacagtcccccaaagtcttatttcagcattaacccaaaagtccacagtccaaagtctcatctgacacaaggcaagtcccatctgtctatgagcctgtaaaatcaaaagcaagttagttaacttcctagatacaatgggggtccaggtattggataaatacagccattccaaataggagaaattggccaaaacaaagggtttacaggccccatgcaagtccaaattccagcggggcagtcaaattttaaagctccaaaatgatctcctttgactccaggtctcacatccaggtcacactgatacaagaggtgggttcccatggtcttgggcagctccactcttgtggctttgcagggtatatcctgcctcccggctgctttcacaggctggtgttgagtgtctgcagcttttcctggcgcaacctgttggtggatctgtcatcattctggggtctggaggacggtggccctcttctcacagctccactaggcagtgccagaataggggctctgtatggggcctccaaccccacatttcccttccacagtgccctagcagaggttctccatgggggccccacccctgcagcagtcttttgcctgggcatccaggcatttccatacttcttctgaaatctaggtagaggttcccaaaccccaattcttaacttctatgcactcacagggtcaacaccacatggaagctgccaaggcttggggcttgcacctctgaagccacagcctgagctctatgttgggccctttcagccactgctggagtggctgggacacagggcaccaagtccctaggctgcacacaatatggggggactggcccatgaaaccactttttcctcctgggcctctaggcctatggtgagagaggctgcagtgaaggtctctgacgtggcctggagacattttcctcatgggcttggggattaacattaggttccttgctacttatgcaaatttctgcaacaggcttgaatttctcctcaaaaaatgtgttttctactgcatcgtcaagctgcaaattttctgaacttttatgctctgtttcccttttaaaatggaatgcttttaacagcacccaagtcaccttttgaatgctttgctgtttagaaatttcttccaccagataccttaaataatctctctcaagttcaaagttccacaaatctctagggcagggccaaagtgctgccagtctctttgctaaaacataacaagagtcacctttactcgagttcccaacaagttcctcagctccatctgagaccacctcagcctggaccttactgttcatatcactatcagcatttttgtcaatgccattcaacaggtctccaggaggttccaaactttcccacattttcctgtcttcttctgagccctccaaattgttccaaccctctgcctgttaaccaattccaaagtcgctttcacattttcgggtatcttttcaacaatgcctcactctacggggactgatttactgtattcgtctgttttcatgctgctgataaagacatacccgaaactggaaagaaaaagagatttaattggacttacagttccataggctgaggatgcttcagaatcatggcaggaggcaaaaggcacttcttacgtggcagcagaaggagaaaaatcaggaagaagcaaaagcagaaacccctaataaacccatcagatctcttgagacttattcactatcacgagaatagcgtgggaaagaccagcccctgtgattcaattacctcccactgggtccttcccacaacacatgggaattctgggagatacaattcaagttgagatttggctgtggacacagccaaaccatatcatatagtgatttgtgctacaggaaaatcttcaccatgacagttgttgttattttctattattactttaactatttttcatgtctttttatctgtgttagcttcttagatataaaataaaactgcacctattatggtttttgtaatttgtattttatgtttgtgaatattatttttcaaatttccatttttagtttagattcacggagtatatgcacaggttcattacaagggtatatcgcatgatgctgaggtttggtcttctatttatcctgtcactcagatagtgaacatagtaccccataggaagtttttcagccatttcctcccttcctccctccttttagagtctccagtgtctattgttcccatctgtatctccttgtgtatgccagatttagctcctacttgtgagttcatgtaatatttggatttctatttctgtgttaattcacttaggataatggcctccagctgcatccatgttgctgcaaatgacatgattttctttgattttatggctgcatagtatcccatgctgtatatgtaccacatttttttaatccagtccaccgttgattggcacctaggttccatgtctttgctatcatgagtagtgctgtgatgaacatgggagtgcatttttttttctttgtacaatgatttcttttcttttggatatatacccagtaatgggattgcttggttgaatggtagctctgttctaagtttttagagaaatctccaaactgctttccacagtggctgaactaattcacattcctgccaacagtgtataagcattcccttttctctgcagcctggacagcatctgttattttttgcatttttaataatagccgttctgactggggtgagatggtgtctctttgtggtttgatttgcatttctctgattagtgatgttcagcattttttcatatgtttgttggctacttatgtatcttcttttgagaagcatctgttcaaatctttgcctgctttttaatgggatggttttattcttgttggtttaagttttttatagattttggatattagttgttttttggatgcatagtttgtgaatattctctcccattctatagtttgtttgttcactctgttgataatttcttttgctgggtacatgctctttagtttaatgaagtcccatttgtcaatttttgtttttgttgcaattgcttttgaggacttggtcataaattgtaaatagtcttcataaattgttttgtaaattatttttccatttgtcatattttaatatccccagtctaataattcatgttcactgttgataatttggaagatatgaaaaagaaaagttactataatccctctaccaaataatgataaatacccttggtgtatgattctttgtccttttttctttgtatgggcatgcacatacattttcataaaatgcaatattgttttatatactgttttataatatgtttttaaataaatgtagtacaaaaatggttttgcatgtctgtgatagcattttcagtgattttggttatgccatttaaactgaagtgagacctcaattttttcagtgatgcttggtagaagtagagcaattattgtctcaaagttttctatcttgctaagatatggtcttttgctagagcgtgtaggtttttgttggggtttttaaaatctgagaccattggtgtttccagttgtcagtttctatggctcttacttggagatatatgatacaaaaagaaaacccaggggactctgccattttgctctttggtcccaagttctctagccagtctgctttcttcgttccagctttcagagtcttgctatgttggttttatatattatgtctaagatttttagctgtactcaggaaaaaccgggataacctcttttattctttctggatgtggaagtctcaaagtgcccccaaagttatatcgacttacacatccaatggcagtttataaacaagcatgtctgttttcttcaaagcctcaagagcactgaatattatcttatcaaaactcttttgccaatttgaaaattgaaatattgtgtttaaacttgcatttaataactcataacgttatgagttatgagctgtaccttggccccttttagccatggctagagcagctgggatgcagggcaccacatccttaggcttcacacagcagggggccctggcctggcccatgaagccattttttcctcttaggcctccaggcatgtgatgggaggggctgctgcaaaggtctcttgacatggcctagagacattttcaccattgtcttggtgattaacatttggctcctcattacatgtacaaatttctacaaccagcttgaatttctcctcaggaaataggtttttcttttcaatctcattgtcaggctgcaaattttccaaacttttatgcactgtttccctttcaaaaccggatgcctttaacagcacccaagtcacctcttgaatgctttgctgcttagaaatttcttccaccagataccgtaaatcatctcccttaagttcagagttccacggatctgtagggcaggggcaaaatgctgccagtctctttgctaaaacataacaagagtcacctttactccagttcccaacaagttcctcatctccgtctgagaccacctcagcctggatttcattgtccatatcattatcaacattttggtcaaagccattaaacaactatctatggagttccaaactttcccacattttcctgtcttcttctgaacccaccaaactgttccaacccctccctgttacccagttccaaagtcgcttccacgttttcaggtatattttcagcagcgccccactctaatggtaccaatttactgtattagttcattttcatgctgctgataaagacataccagaaaccgggcaatttaccaaagaaagaggtttataatggacttacagttccacgtggctggggaagcctcacagtcatggtgggaatcaaggagcaagtcatgtgttacatggatggcagcaggcaaagagagagagcttgtgcagggaaactccctcttgtaaaaccatcagatctcatgagacttattcactgtcacaagaacagcatgggaaagacctgtcaccattattcagttacctcccgctgggtccatcccacaacatgtgagaattcaagatgagatttgagtggggacacagccaaaccatatcaccatagtttaatcagtttatcagtacaaaactagacaaatggactgggtttgggttttttagtcttaatagtaaggcttacaccaggaaggttgactgagaaagttaagtttcaatttattatttatactatgccttgttctcaataaaaagagaagttaatgttcatttaaaaatctagtatgcattctttttaaaataacattcattactgtagtagtgctataatagagttaatgtgtaatatataacaagacttaagaaatacactgagataaaactgatatttttatcattcacttgttcttattaaagcttaaattctttttttctcctcctttttcaatgcttttggcctgttcatagacattcaggagcaatttgtaacttggacattaaaagactttaatgatatattttcttgctgctgccctaattgagagtcactgacgtcacaaatagttgcaagttgttctgttctcagtctgtcttctgaaacaactagccttataatctcatagaaggctttaaaccacctttttcttttctattgatttctttctgtttcaagtcagaaaaaagaaaaagaagcaaatataccctgtgtttattttatgtatccaaacctgttcgtaactcatttatttttctctttttaagctccccaattatgggcaaattatatagtttagaatgttacacagtcattctctttcctaactacttttacttccaaatctcttttaagggttttgactttcctataccttttgaataaagcatatcctgagcacaatagaacatgttttaaaattcacataattgtttctttacagaataatgtagaaacataatttcattattttcctggtcaagcaccaaaaactgaaaatgctaaatatgcttattatgccataacatcccacttttggggggaaggatgtgtggaatttgacattactcataattggaaagaaatgtatattcagaacaatttgtttcaaatagaattcttggtggaaggctttttaccattctatctgaatgttgttatttatatatgtctacattagctatgtggtggaattctcatatttgtagtaattatgatgttgaaatgtttgtgatcatccatttgatcatggttttgtagaaatcaaacaataaaatcgtgtttaagaagaataaattttaaatgtaaattttatatttttaaaaaatcattaactctaaatggattttgttgtgacttattttcccttcaaacaactacttaaaataagtggacaaacacatctatacatttaaactttggttccattgtataagtgacagacatgtaatcagtattgctaaatgagtggaaccaagtgccttcccttgccctaaaacttgatgctgtaataatgaaatcatgaaataaacttattgttcttcctgttggaagaatcatttgacaaatattggcaagtactgtaactgatttagttatacttgaataaatcaaatataatcaaaatatagaccaatgagactttgtgacttgtacgcatacctcaaagtttataaaatgaattttatagaaagtaaatgatgtaaactttggtgatttaattagagttcaattgtttaacaaagaatgtgttttaaagatatattattcatgagcaaattaacttggacatacttattacaaaattatggcttttagagaaattatgggaattcttcagtaaaaatttaagcctttttgtagttttaaacactggatttcatttatgtctaatctagtttgtccattattcattagccataacaatctatatgtgaagatgtatttttctttgaaaaatattactgattttaaaggtattttccccacatagataaatccaagcagatgaggaagtttaaatttgtcacgggtactctactcttaactagtgaaggttttatgttgttgtctttaagtacatattaagtattcacttgttaactaattctgatactcattttatctttacttctcttcagtatctactactcaaattcgtccattcttaaatcagcacaagcttttacttcccattgagcatggggtagaaatttgtgaatttttagtgttgactaatcaggtttgactaatattgtggcactttatattaaatattatttaattactgtgtcacagtggcgtataatatataaaacattaaatcttaatgttttagatgtcatgtaataagataaaatgtataattctcagtgttttcaacttctcaaccacttttttctttatacaaatcacactttttacactttttatttttaatcctgtgctatgcaaatactgtactgtatgtagtcttaagtgtgtgctcaagaatgtgcttaagacataaaactacctcagagttcacttatactttttattctctttaatgacttttcatagatgtcacattgccttaaatttggtttgatttagaatttgtaaaatcatacgtatgccactgaagtttaccttcacatcatatgggaatagtatatatgaaaggttcttgaaaggcaaataaatagttcaataaacaagggaggtacatttcattaacatactaccttatagtggtggagaacataggctaagttcaaatcccagtttttactaactacttgactaaccttaggcaagttacttaatttctatgtgcctcagctttcctatctgtgaaataggaataatgatactatctgcctcaggaccgttattagtatcaatgttacttaagctgatattttgatagactgataggaaatcatgattatccagtaatgcaggggtttttctaagcaactttgggttagcatcgttattgcatctttttttaaagtagtaaagttatgttttgtaaaatctataagtccacttaaattttcctcccctcagctaatttggttcaagttactgggattgttaaataactgaaatgtatttgtttattgtgtttttcaaagctaaacaagccatattttttttcacagagttcatctttcaggacatacccaatatatttatttctattcatcttatatcctaagtgaatttaatatgagatttactttcttttaaagtcatttgtaaatgaacaaaacattatctttgcagcccttccattcgacattcattttcatgttctttgcagtacttactcatacactagacattttgaatttttttcgtacatactaatcaggcaataacagctgttttattctgggatttgatgttacaggatgttagttatctgtgatatgattatatatttgtgaatatataatgtgaaatatatatatgatgtatgtaataatccagaatttcatgtaggtactggtttatatactttttctgcttttgtgaccctagttttaaaatgctatataccttttataaaaatgagttagatattgatttaaaacaattatcagtgcctttttcatttgctttttgaaaatgtgacatttcaaattattattgttagtattatcacaaaacaaagatttgattttattatatgtaaactaatttttcttcctgatcttaargtgatgttctggagttcttaaattctactgagaaagtataagccgactatagactttttcatagttgaattaaaaaattaaattgtgtgtcatatatcatcaaactcagttccttacttgctaccatagagaaagtgtgtctctgaggttctctgttttattgatacagtcatatcctcatttgtgctatattacataaagtacatgtggcctttatagttatatgaaagatatgttaccagccacattgatctctatgtaaattaattacatatttctagttaggttacacaacaaagcctacttgctgactagcctataaataaagattctttaaatgcatttggaacaattttgcctgcttgtatagagtgaatgactgctgtatgtggtaacctcagaagcttraggaatagatttcctaccttttacagcaagcatttacttaggttttacattcacatttgtaatgccatccgttttgatttaaaatctgtcatcattgaaagaattgtagctggtgagtaaggaattagcttcgtaaatttgagaccggaagaggtcttaaagatggactaattgcaccccttcattttaattatgaggacactgaagccagagagaaaaactgacttggccaagtagatatagagagctgacgtaataccagacccacgtaatcatcctatagtatgtcactctgctactgtacattggacttgttacttttaaatgtgctcattattgtgcacattctgagcagaaatcctacttctcatgtgtttcaaaacaactcgtaagagcgatcagcattccaaaggcagttttggagaactgaaagtgtgttgttatttctagttttgtgttgttacttctcacttctaaattaaaacttattttgcactaagatttctttaatgccaatacaaatctaagtgtattgccaaaagagggattgtgatagaaaacacattttttcattaagtctttggccatttttagctcattaagcctttaagcagttgctaaatgaagtcaaaggagcatagtttataaaaagatattaattttttttttgttcagttatctcacatggtgcctgtgggaaatgtttccacttgtattgcatcttccacaatcttagtgatagttgtcaattggtactaatgaaacgtaatacttttaggaaagcatttaccctgtatgatctaatttgtggtcgttgttggcctgtattgagcaagttcattatttggagaagaattaaagtcacatagatgcaaagaagtattttacataattgaatttcagtagaaatgtgatagcatgttctacatgtttggttttgagtttaccttatacccttaaggtcttcagactttttgctcatttatcccttgaaccctttacaagttgacatacacagtttttcatcagaagagtcaaataattgcaaagaatataatttctaacatcgtaaatattgacttatagtaaaattataacatcagtcatttaaatgtattcagtggaatctaagtatcagggatatttgatacccatcacccatttaaaaaaataaatggaaatagaatttttttgaaactttctagggcaataagcttctaatctaaaactttcttctggatttagtaattaatgcaattattatttctacagaattaatctaactgtcataaatatattacagttttggtaaataaatattaaacagaataagtaaaatttcactgaatgaagtaggagaggtggagctgagcatctgtatgagaacccccttgtaggtgatataacttgtgaaaagtcctcttgtatcctcacacacatcccagtttgaatgctgctgacttaagtgactgactgtgccttctgcaggagattattagaatcacataatataatttagtgactaaaggcagacactctgcaggcaggccatatgggcttcaattcgagctctgagtcccagcccttccttctactaattgcatgactttaggaaatctgcatagccccccatccctgttttctcatctgtaaaatgagaataacagtttgctgttgcacaagtaaagtgaaatgatacttgtagcatgcttaaaatagtgtctaacacatgcatgttatttgtacagtcaactctagatattctcttaaatgtattttgagaattttatagatatatcttaatgtgtttataagcatttctcagacagatttaaataatttgagattatcaattggtacttccctttcctctttcctggtaaatcagataatttcccaaattttatacaagaaactaatcagaatttccccatgaatatgtacacatagatctattggtatgggaatgcatatctatttaaacacaggaatacttgatgtttgtccgtgacagtgagacaaattataattaacatttattgaatacccactctaagtaaaagttgtatttaacaaaaaggagaaaaatcgactctaaagcttgcccctgcaaaggacttacaagatatattaagattaataaacaaatgttgagaatcaatgaattttaaaaagagcacaatcagcaatctctgatttgaagagaaccaaaatgaattcagtaatctatactagaaggtgacctaggtaacaggaaaagcaggaacggtaaggggaaaaagtagttattcataccttaaatttgtattaatagatcaattaacaatgtagcctctaagcaaagtcaatgtatagggattataattcagcttatgaatgtctttgtaagaattgttataaaactcattaatcatgagatgataatcttacttcactactagacatttttcctagcataacctgaactgtctgttatgttgctaagaaatataatgatatactaacttaagtgtatctctttaaaatatatgtcctgtttaacagaaccaatagtttacccattaagatattttccaaaatatacttatttatgtccaggttcatctgctttttcccaaataaacattaacaaacaagcaaaaaactggaaaattgagaactttgggcattggtatttcacgagattttgaaataagagacaggatagattatctcctatggattgctgacctttgtaactgcataccctgtttacttcagtaattatctaggaggattaagtctcatcccaactaatgctatacagcatttgaaaaaagttaaccaaaataatttttgttatgaagctcattatatctttggaaataattagtaccatacatcctacagtatcccagaaccaatgagaatcattgttaaattcatgtgaaaacaatgcttaaataaggtagacctattattaggccataagtaattcaggaaccatccgaaaatatacttcctttagtggacctgggagggaaaaacctacaacatttgattttagttccatggttattagagtccctcaatttatgcttagatatattttaaagtagttgaatgtagaataaattttgataatgagaatcttattctgatgttggctttcatgataaaatttgaactatcttcctggagtttaaaaaaaaaattctagtagtctgaaataaactattggaagagaagtgggtgtatctttctccccctactaatatagtggggggaggaatttctcggtactggtacttactgttctctaatatattctttctgccattattgtatctcatcccaaataacaggaccataagaacttctgtcatttggaggtccctttactcctttattgcaaaacacagaactctttattctttcttcacctttgtgcacaggcctttaggagttttaacggagttaggctacaatattttacttccatgaagggccttgtttgtacgtgattttctctaacataaacattctccaagattcaggccccataactctgtaaatgcaaaaggaaaataatttgaaattcctgaaaatattatagactgttttaacctatgccgttttatgtgctttcaagtatatgtgtgattctaagtcagcagtgttctcccaaaaggtttttagataaccctgtaattagtagataatttgttgttaacttatcagcaaaacatgtataaatgggtgtttctgtctgcagtatatgaagtgtgttctcttaggtaaatacatacctcactttcagcctttttttacccagttattctttaggaatgtcataagtataacaagctcttttctgtgaataaatgattgtctaagattttctactctgttttatcaaattaacatcaactggtacttcttgggtacttgttgggtacttcctttagctgttagttaacaaatgttgtaaccaccatgacttgctcagctctctattatccataataccagcttaatgccttaagtataagtaaaatagatttgtgatgacaaggaactcaaatattttttttttaacagatttggttcatttgacttgcacatcttctaaaacagcaagagaagatttagaatcagttgtgcagaaattgtttgttccatatactgaaatggagataggtaagaaaaataattgataactcatgatggaaaggtaatgtaaccatcataatcttcttagatatatcatgaaagtttctgcaacctgaactgaaatgggatgtattcaacaacaattcacatgttttgataagatgcttgagcacagtgtctgcctaaacatgtgggaaaatgttcactctacaatgttaaaggaagtatatacatcatacacacaccaaaaaaacataattaagcacaaaaatatacatttatatgtatagttacacagaaaaaggattgttagaaaatcagttaattttggtgggattatgggcaattttccttataattttctttattttacaagtgttgtacaaaaagcatatattcctttatcagagaaatgtatcttcctttaaggaaaaaagattcaactaacagattaaaatattaattggcagatgtagaaatcctttcctatccaatagtctttttttttttttgagacagagtctcactctgtcgcccaggttggagtgcagtggcgtgatctcggctcactgcagcctccacctcccacgttcaagcaattctcctgcctcagcctcctgagtagctgggactacaggcgagtgccaccacacccagctgatttttgtatttgtaatagagacggggttttcctatgttggccagggtagtctggaacgcctgacctcaggtgatccgcccacctccgcttcccaaagtgctggaattaaaggcgtgagccactgcatccagcctctaatagtcttttaatacatagtgtgctagtgatttaatatttaactcccaaaagtgtatatgctacttattcatgggggaaacacattttaaaactttccccctacataatagggtagcacttgcagctgtgaatggagaaaatatggcatattttctgtgtaaatgataaaagaagccttttgcattttcttttatatgaagtgaaggtgatttttattgtaggatttgcatgtgcacttgaatcttgatcattttcttccattgatttatatatctttattttctttgcatgttacttttgttcatgcaaccatttatttactcatacctgttctgtttccttgcagctcatttcctatgtgggttgcttattttcttaatgcagagatagtgcatagaggggggtttatttacataagaagacaaactgttctgttctttaattttttttttaattttatgggtacatactaggcgtatatatttattgggtacatgagatatattgatacaggcatacaatgtggagtaatcacatcatggtaaatgggatacccatcactttaagcatttatcatttctcagtgttacaatcattccagttatactcttttagttatttttaaagtacactgtaaatgactgtactcaccctgttgtgctatcaaatgctagatcttattcattctatttatgttctgcaccctttaaccatccccacttttccctcttccttctccattacccatcctagcctctgataaccatcgttgtacactctatctccatgaattacattgttttaatttttagctcccacaaatgagtgagaacacattaagtttgtctttctgtgcctagcttatttcacttaacataatgaacctgttatgttctcagaggctaatatcaattatgttttttgggagctacccaaatgaagtatttgaaaacttcactttaatttgggggttaatttacaaattaaattattttagttttaatttattaatttgtaagttacatattttctttattggaaagtatcatataaatgtttagattattaaaaatttgattgctaaggtaaaatacatgataatattcctaaatctaatatggagtcatagttttttcttttggctttaactacaactatactttgtgtagaaaccctgagtttcttaattatttctgaaattttaaataattcttatattgtaatttcattgtgtagtagtctcaatgcactaaatatgaatcatgtcattactcttcactttttaaatgcatttaattttctttaaaaaaaatcaagctgggggaaattacatgttcattacttagcatcctctatccattttagatttttaaacattaatcttaatagttaaagtgatcccattttgaaatgatgtattgtttagaacctgagaggaattctttgataagaactatgtgctcagaagggtcctcaggtgcactgaggcactgaaaagctagttttcactgacacataggcctttttatcatcaggatgaggtagtggtcatattttaattaaaatgtcagaacaaatactgttggagttattgaaaatgaatcaccagataaagtgagcactgggccatagcaggtcaaaaaggcaaagtcacctggagaagagaactcaattcattttcctgcctaaatgaggaagaaggaactttatgagcaatatgaacttctaatacattaaagcacattcttctctgtaggagaagcccctattttcacagattgatggcttttagtattatgttttgattatttgacattcatataataccttatgctttactgcattgtaaatattttagtttaaaacatgtaccaaaggaataacattatttgggcatattttctttttgtttgtctttgaattctacattctctgtgcttcataatcctcagtgaaagtcagcctagtcaccttttaaaaaaaatctatataatagccatcctagtacgtgtgaagtagtatctcatagtagtcttgctttgcttctcccccagcgattagtgatgttcaacatcttttcaagaacttattggccatctgtctgtcttctctggagaaatatctattcatttcctttgcacatttttaattggattttttgttgttgttgagttgtaggagttctttacatattctggatattaatcccttatcagatacatgacttgtaaatatttgttgtggcattgtaaataggattgcattcttgacttagccctgtgcttgattgttattagtgtatagaaatcctactgatttttgtgtcctaaaactttactgaagtcgtttatcaattcaaggagccttttgatggcatctttaggattttctaggtatagaatcatatggtcagtgaagcgtctcactcattttctatctcaaagagcagcactgcctaaaaaaacagaaatttcccttataggtgtagtttaaagtccatagctagtgtgttaagtaattgttgggctgtgaaagcaaatgtcttaattcctttctgtgtgtgctgtatccagactcagtcagggctatgacagtctccaccactctgctggtattactaacatagtttactctatccctaaacatggcatgcagctgtagacaccatttcttgctttcttgttattgttgtgctatagttgcttttcttctacctaccctattctacacttactccagtttaatttgcccaagaccctattctaaattacctgttacatctttagtccttcttactatcaagttgaatgaaatgagctactgcagaaaaccagttctacccctggcaacttgtgatgcactcctagccaaagctcagcaactttaatattttttgacagttttgcacttcacaactgcatattctttttctagctatctctttgccttccagctgacctcaaagaaagatgaagcaattatatatctctttaaagttttaaggtcaaagcctgataatgccctagtatccagagcatttatcttcagcctatgtcagtttttcaccttcctcatggtttcttttcaaaggcgcaacgtctatgaaattagtttaaatctattggattattcatttcctccagcgtttattaagtgaagtgttcctttgagctggatgtttaatgagatacaagataagctctcctagtatatgcttagaaatgggctgggcactattaaagactttccagaccttagcccacttgttagcagtgctccccaagtctggtatcccaaatcataggagatacatttaagtatcttcccataagattcgtgtaactaaactcattaatcagtttactaagagccatatgatgttagctataaaatatgaattccttatgttcctttattttgtcaatagatttagccacctaatatgttcctacatgaagttagcaatatcttagatgactcgtagatcttagcaccagaaaggggcaccttaggagatcacttcttccactcagtttcttcatcctattccactaataattatggattattcaggttgaactaggaaaataacttatttggtgttcttatagtggagatactgtaaattaaatataataaaatcctgtttatcctgatgtgggaaatagggctttcttgttaattgaatactgctattaggtgaagatttctctacattgattaccaattaaataatagtaattaatgagataattatgcctttagcattttctttgttattcatgaggtgcctcatggtcttgggcaatcttcataaacattcattattattgtacaaaatttgaacttttgttcagattcaggctaaagaaaactctctagtcaatgaatgtatcaacagcagtattttatgttttcaaacagaaaatttaattataacagttttaaagaagagaggcaaataaatgattatcaaattagcaagaaataggctttatgcattgagattagtaatgttggacctttttataagcacatcgtactttgatcatacctgaaaatacaataacatcaattcagaaattatttactgagcatctgtcgtgtgctaggccctatattagggaaccaaaaacaaggaaggagagtaagaactaagtctacttcatgtgtatatccccagctcctagctcaatgcctaacacgcataaaagacacrtgctcttaaatgagagaacatgtgctcaaaatggcattcactgttatgacttcatttttgatatttgttggttgtcattaattttttaatccaataagacaaagcattaggatgtgagttaggacaacaaagttttaatcctgtatttactatttttttaataataactttattgagatatcattcatataccatatgattcacccatttgaagtgtacaattcattgtctcttagcatatttgtagaattgtccatacatcaccaccatcagttttagaacatttccatcaccccaaaagaaacgtcataccaattagtgatcacctcccatttgcccccaatttccttcagccctaggtaacctactaacccacttcctgcttatcctggatatttcatgtgtatatactattgaataactatataatttatcaagttggtttgtccatttgaaacataaggaaatcaatttatgttatcttctctatagggaaaattttaggatgaatgtgatcataaaccctttgatactagtgagaagaagtaatagaagtccaaaggagcatgactggagtaaaatctaattaacttactaatcaaaatagagtgtgtagatgcaaatttactaaatgtttacatacgaagctctgatttcctactatgtctagtcatggcttaatcggtaataggctacacagtgtagtaattgacaaacatattgtattttagaatgtaaataaaatttatttctatatttagaaaatgaacaagtagaaaagccaagaattctgtgggctctttacttcaatatgwgagattcgtsagacatcagcaggagctgttataatgatttaccatccaacgtttatgtctgctctggcccagattgtggtttaggaaatgataatgcagtcaaacaggtaaggctcttgatgtttctcagttttgtattaagatgttggtgtggttgggaaatattttttcctctgggaggagagaagtctagaaaagcatctctcagtagtaccatttctgtaatttgccctaaaagttttttctatgacctacraagctactttaaatatactttaaatacaggatcaggtattttcactttcttgaataaaatgttgagttacagagattttttatgagttccatcgtgggaatgacgatagaagatgctaaaaatacatatttcataagaatttataatgccaatattttaaagaaacattgtttctaacttaaacagttggacgattgctatattattttgaaatacataaattatttttcttggtaaacagtcaagaaggttgtaactactaaggcttataaaattaattttacagtagtcttaatgcattttttaatcatagaaaataagttatagcgtagttttacatagttaacttgattctatttatgttttgacacaaattcctgtcccaggagctaccattactgctgctgaggtctattgtaaagtaaggtggaagtttgtgatagccatcccggtcagggctatgaagaggcacagtttgatacaagctgctaaaagtgagccatgattccattaagctgaatattgatatgtatatataaatatacttctttgccctggacaggacgaaaacaaacagaaaatattttttgagacacatttctaaacttttcacgggtagaactggcacatctgtccattaagtcaataattgggtaatttaacattgttctaagaccacagatggaactttcattcccgccagtggcaaggatcttatagtagcaaatgtcctggttgagcctgtaatctaattttgagtcattgtagcaaagctatgtctatcatgaggatacagacatctgcagtttttttctagaattcttgtgtattttcttcagtgcctgatggtgatcctggataatcatattcagccagtgacaccaaacaaaaataggaagtcacatctctcatccatcattccttctgttagtttagtaagaacccaagatggctgaagatctgcatttatagcttgaaatgatcaagtcatttttaccttgatgttctaattttttgcaagtagaaattgccaacaagtttttagcaaggtagcttaggtcatttttatccctgaatgaacttttaatattttttaaccaaaaaaatttaagtaagggcttataatacaagtactaatgtaagctaaacatctaaactgcatgctagaagattataattgagggataattttatcatgaggtaatttgcttctcaagaatataatcttcagaggtaacatgctatacagtagaaaacagtatagtgctaattttggtactaattaatatatgctattaaatgtaagcagttttaaatttgttgtatagcttttaatctcatcaattttgggggaaatattataatgtctactttaaagaacattgacaatgtttataaatagcttgtgtattcagataaactgcatgctaattcctgtgtatcagcctgtaattatgtcagtcactaattggtgatttctggtgattggtattttccaaatgaagattatccataaaagctctcagaatatcacctagactttgcttgtgttgacaacacaagcccatgcagatttcttctttttttttttttttttttgagacagtcttgctctgtcacccaggctggagtgcagtggcgcaatcttggctcactgcaagctccccctcctgggttcatgccattctcctgcctcagcctcccaggtacctgggaggcgcttgccaccacgcccagctaattttttgtatttttagtagagacggggtttcaccatgttagccaggatggtctcaatctcctgacctcaagatccacccacctcggcctcccaaagtgctgggattacaggcgtgagccaccacacccggcccgatttcttcatttttaaaaagcaaatgaaatacttcattttaccagttggcaggtttacatcttttcttatttgtaaaatgtatagaggttgagtaatgtaaacttgacactcttgttttcatagggaaccatttatgatttgaagatgcaccgaaaacataaagtgatctgtctttaatacccacaagttcaaattgtgtgctcctggcctccaagacattctctattgccaccgcaataccaacctaagtgatagttgtgattctttctatgacttgctcatttttgtatttcagttttgtttttatttttctgaaactgacatctgatatatctcttttcttggtagatgttgtgtaccatttacccaaacgtactgatggacagttccatagtcctcattcccaagacattgatagctcactccttcaggagccccaccctcttggagatgtcactaccatgggaataagaataaatagtaccatactctttgtattttacttcaagtataaaatgagttaaattggctgatgttgggctgggcaggcaacttaaccaccatttagagcattgttttatggacagattagccagtcacttacgacgtttgatatacagcccattattaagttgagagctaactgtatagattgaactatcaggttgttcacatacggtagtgccatttgttttctcatgcctttgagagagagcgagcaattttagatgtcatattttctgtagctgccattcatttgagcactttctgtgtgtcagattctatccttagcatctcatatatattatcttatttggtcctcaaaacaatcttatgagataagtatttgtgatatacccatttatagataaggaagctaagtcctgaaggggctgaataacttgtccagaggycccatagctagtaagttcttgagccaagaattaaactcaactcttttggatcccagtgcttgtacactcacccagtgttatatgctactttcagcttatgagtaggcatacatcctaaaaacattaaagtactatattgatgaaatgtttaattttgtttgtgttgatgtatgttaactaaacatagaaatattttaaataattcactttgttctctctgtacttgccagtgtgagcacaccaagtcacaatataattagccctttccaatgttttaaccacctgaaattttttaccctttgatctaacttctggcttaaaaaaggtgaagaggatgaaaagttgccaatcaactattctgtgcttagaactaggtttagttggcaaacaaaatgcagcagaccaagaagcattagatacactttccagagcatggcagttgaccctaagaggttgcagcagttagagagaggagagatttgggaagggctggagtctggctattggaaattggcatcaacaagggccagggcagatgggctataggtgggagtttcataagcaggtagaacacaagaaagagtggtgtgacaacctgcaactggtgctaatcttaggaggcaggtggtgcatgacaagatatatggaagtatgtggtgtgggatccagccacagagactggagtttagggtaaaagctattctatggggaggaggcaaaagggagacaaggtgtcaaacacagaggaactagcatagaagaagtaaaagaattagtagtaataataattattatatttatacttaatatttgtattaaatgttactgacattctattttatgccaaggcactaaggatccagagttgactaaaagtatttgtcatcctggaggaatcactgtcaggtaaaggagaaaagcatgtaaacaaatgacagtgtagtgtggcgtatgtactaatatatccaaagtctagaaataacagaaaggagaaatgagcccaatctaggagtcagagaaccttacggagaggggtataacagaagagtagcaattctccatctaaatcaaagacagtagaattgaaacattctggatgtgaagaataacattggtaccagtccaggatgtaaaagataaatatcatggtgtattgtttcatacaaataaacaggtattagtaaatcaagaagtctgagagatggaggctagatgaaatggtatatgataagatcagagaaggtaggcctgaagggttttattttctatagtaggaatcttggattttatcctattggtgatggggagtcattgaagaattttaagccaaaaatggaataaacagaattttattttccattgacccatctgaggatggcatggagatggattatatgggggaactctagaggcaaggagaccagtccaattctgaggctattgtagttgtctagttgaaagatggtgcatgtctgggctatgtcagtggggaaggaacagatgaagttaagagatagaagataaaattgatagaatttgatgattgtttgcatgccaaagataaaagggagggagaacttttacagatagtaaaaacagagatgtaagacaaaaagaccattaggggaacggaagtatgaggtaatggctttgtctgatctaggtcctgcttctacaggggttgcgtgtctctagcaaaggagtatggtgagtctccgggatggagagcaaagacaggcatctgtaatgtttaatttccaaatagccataataaaaaatgcagttagctatagttaccatgctgtacattagatccccagaacttatagctgaaagttcatacccttaaaccaacagctctacactccccagcccctggcaaccaccctcaacttttttagattctacatataagtgagatcatgtgatatttgtctttctgtgcttggcttatttcacttagcataatgtcctccaggttcatttatcttgtcataaatgacaggattcttcaattcaaatttgacaagagagcagattttaagtattcttactacaaacacacacacacacacacacacacacacacacacagtggtaactattagtggtgatggacgtgttaacttaattgtggtaatcattacacagtgtatatcaagtgaccttgtacaccttaaatatatatactttttgtcaattaagtatttaaaaacttaaattgtctatagtaattggcatgtccaagaacatacccttgaaggttttttattctgttaccctgtcatactaataagttcagcttaaatcttgacatttttacttatgttattattagtaataatgaaaatagctaccatatatgtcggcttaatctctgatattttatagataaggaagccaaagctcggaaattgagaaagcattccccaaatcacataactgctaaatcgtagagccagtatttttactgaggctatcttttcaaaacccatgagcttaaacaagtgctatagtccttaaagtccagggaatggaaattctatcaaaaagcaaatagttgaacaaacagtgaagagttttcttcatttgaacagtgacttgttaaaattactatatgctaaattagactataccagtatcacatgtgggcttgtattagtctgtcctcacactgctataaagataccacctgagactgtaatttataaacaaaagaggtttaattgactgacagttcctcatagctggggaggcctaaggaaatgtaaaatcagggtggaaggcaaaggggaagcaaggcatgtcttacatggcggcaggagagcaaagaaagcaaagagggaactgccaaacacttttaaaccatcagatcttgtgagaagtcactatcacgaggacagcatggggaaaagtgcccccataatccattcatctcccaccagtccctccctaatacttgtggattacaattgcaaatgagatttgggtagggacatagagccaaaccatatcattctgccccgacccttcccaaatctcatgtccttttcacatttcaaaaccaatcatcccttcccaacagccctccaaagtcttaaaactcattccagcattaactcaaaagtccacgtccaaagtctcatctgagacaagtcaagtcccttctgcctatgaacctgtaaaatcaaaagcaagttagttacttccaagatacgatggggtataggcattgggtaaatgtccccattccaaatgggagaaattggacaaaacaaaggggccataggccccatgcaagtccaaaacccagccgggcagtcattaaatcttaaagctccaaaatctcctttgactccatgtctcacatccaggccatgctgatacaagggctaggctcccacagccttgggcagttccaaccctgtggctctgcaggggataggcactgtgcctgctttcatgggctggcattgagtgcctgtgacttttccaggtgcatggtgcaggctgtcagtggagctaccattctggggtctagaggacagtggccctcttcttacagctccactaaacagttccctagtggtgactctttgtgggggctccaagcccacatttcccttcagcactgccctagcagaggttctccatgagggctctacccctgcagcagacttctgcctggccatctaggcgtttcctaacatcctctgaaatctatgcagaagctcccaaacctcacctcttgtcttttgtgcaccctcaggcccaacatcacgtggaagctggcaacgctcggggcttgcaccctctgaagcaacagcccaagctgtacctttattccttttagccatggctggagctggagcagctgggatgtagggtaccatgttccagggctgcacagagcagtggggcccacccagcccactaaaccatttttcctcctagggaagatctctgacatgccctggagacattttccccattgtcttgtctattgacatttggctcatcattgctcatgcaaattgctatagccagcttgaattcctccccagaaaatggttttttcttttctcccacatggtcagactgcaaattttccaaacctttatgctctgcttcccttttaaacataagttccaatgtgaaggcatctctttgtgaacacacatgactgagtgctttcagaatcagctgggtcacctcttgaatgctttgctgcttagaaattttttctgccacataccctaaatcatctttctcaagttcaaagtttcacagatctctagggcagggagaaaatgctactagtctctttgctaaagcatagcaagagtcacctttgctccagttcccaataagttcctcatctccatctgaggccacctcagcctggacatcattgttcatatcactatcagcattttggccaaaaccattcaacaagtctctagaaagttccaaattttcccacatttacctctcttcttctgagccctccaaactgttctaacctctgcctgttacccaattccatagtcacttccacattttcaggttatcttttagcagtaccccactcctggtaccaattctcaatgctagtgcctcttacactgccataaagatactacctgagactaggtaatttgtaaacaaaaaaggtttaactcacaaggccacatggctggggaggcctcaggaaagttacaatcatagcagagggtgaaggggaagcaaggcacatctcacatggtggcaggagaaagagaaaagggggaactgctaaatacttttaaaccatcagatattctgagaactcactatcacaagaacaacatgggaacagccgcccccataatctagtcaccccctaacacgtggggataacaatttgagatgagatttgggtgaggactcagaaccaaaccatatcaaggctctataagaaatcatataaacaatattaaggaaattgtatttctattgatatatagaatgaatgtatttcagttctcaacaatctgaacacttgataatgaacctgatgaggtactgccatccttgaagagtggacctcaatacatgtatagaattaaagggagaagtcatagaattctgaaaacagacttacggaagttcatgtattctgatwaagtactgtagcctgtktaagcaaatttttaaggataaaacacttatttttttttagttaatgccagaaatgcacacacattttaaaccgatttccaaaaacgattttatcttttcttccttggccaggctgaaacacttttccaggaaatctgccccaatgaagatttctgtccccctccaccaaatcctgaagacattatccttgatggagacagtttacagccagaggcttcagaatccagtgccataccagaggctaactcggagactttcaaggaaagcacaaaccttggaaacctagaggagtcctctgaataatggatatacaccaaactggatacccaactttggaaattctgactggtctcagagtctacttgatagaaggactgtttgagaaatgttagaaagcagcagcaattataaggcaaaataggtaatagaaatccaaaaggggattttccttatagaggacattccaagaacacacaacacttataaagcacattgacttgctcattttaaataccaaacttgtgtgactagcagatgaaaattataaatcaattgattctcaggaatgtaactgtggatatgaaagtgatcctatgcattgttaataattccatggtcttaggacaattttgcttaccactttggatctttgtttgaaagccacattttcagaaccagctcatgtattttctttggttatttgaattttattttctttatggacaagagcatcataacataatgataaaaacatatagaaaaactaaagtatcatgatctagatagaagcctgtatttggaatacaggtttgttttgctttctatgttgagaagcattgaaaatgctaatataaaggtgtttagacatttttacgaataagtcagtagtgttttttagtatcagtagtgatatttgtttgtaaattatttacatattgggaaaggtcaataatgaagaaatgaaagaatggaaggaaaggtgtggataggctcattggtatttgaatattctgtctgtcaagtaactagagtattaggctaattgtctacagacctaatttaatcctggctgtcctactgatgatatttggtaaattgtttaacttctgagcctacgtttctccatatataaagtggaaatagtattactatgcctactatatgagaatggttatgaagacaatgcaatgccatgtttagaatcggtttgccagaagaaaattgttttagaattttcccattgacttgatgaatctcaaaagtctcacgcaggaaataattgcttgctgtcagtcaacttccaaacaaaatagatcacagtgtttttattgcattaagctttttaaatgaaaatttcttttttaaagtagtattttatagtcttacagaccagtaaaaatagtaacaagtagaattgtggttttgaaatattactaaggaaaacactctataaattgttttattccttttctggtaggtaaacctgcaaccaccaaggactccaaattgtgtatgacagttggtaagccctaatatacactacataaaaacgttagggctgcctgtaatcccagcactttgggaagctgaggtgggtagatcacttgaggtcaggagttcgagaccagcctggccaacatggcgaaaccctgtctctactaaaaatacaaaattttagctgggtgttatggtgggcacctgtaatcccagctactttgaagatgaggtagcagactcacttgaaccagggaggcggaggttgcagtgagccaagattttgccactgcactccagcctgggtgacagagcaagactctgtctcacaaaaaaaaaaaaagggggctgtacataggcagcaaactaagctgcagtgatgttgcctatatttaaattttctcaaatggccaagctctgatggtctactttatttgagcaatagttgagacttataattgcctataaataaacaaacaaatgaactatttgtttttttttctcacaacatctggcctatattgtctgtcaggaagccatggctccaatgtaaagtacatagttcttacatacttcaactgcagctggtccctgacctcaccaggtttcagagatgttcttaaaggaagccagctgtggcaggtcacagattcatgggaaatggaaagaaccaaggaatatagctcttgcctcacctttctacccactgcagatatagttcaagccagagtaatggaagaacttaacttactagcctctcaggctgctcctatccctacctcccagtgtacagcccctccccatctctttagtcccctttccctcacttccccttttataatgtcacacaaatcagggacagtaggatcacattataacctactttgtcatagggattcgatttttcttatatcaaatcatgtttcctgaaacccagctggggcatatgcactcaatgtctaatacatacttattaatgtaccggatattggccttgcccctggatatcagcaatatattataaaaggttccagtagatgagacgattgagtctgaatacaattgcagtaaattgtgccaataaagatattgtactgttacggtcttagagttaaagccgcttgaatgcagcatgcacattcatgtaaacagacaatcagggtaggcctagaataaccacaaaaattctattggccttactgcagccacctatatgtagaacaatggaggagatagtttgtggtccattattgtaccctgtttcatccattagcatcagaatctctctttcaggtcatttattaaatatgattgaaatgtttaaaagttcctgaacatgattcatgatgattaaaatatcatacaactgataaaagactttaagaactttatatatttcctgttgcctcaaaatgtaacagaaattattcttagagctttgattttagctatcctaattactgcaaataaatatttgttcttatagttttaaatcaaaaagaaaagtcttgttataaaaccttaagcttgaaatcatattaataaaatatattgtacatagtggaaaattttcagtagctaatttaaaatttcagaaaatgctattaaagaattttgattcaagtatttaaactgtttagttatgcatgcttcttattaaccgaaaatgataataccatttagtttagtgatcagtatgagaagcaatacctaatcctatgttgctattgtattttttcctagttggtgtgcctgctcagaaaaacatatactgtatgtgtatacatacctgtgtatatataaaaggtcaatttatatatttttctataggaaaatggagtaacaagttccctatctcccatatttatttgtccatagtaaaatggccacattgatgataatttctagaactagtttctgagattgtcagccctttgtctaaaataatggcagtattaatgattgacttctgtcactgccatagttacctggattgtcagccttggtagcctttgtctaaagtcctaaagagttccaaaaaaaatgtgttgaaatttaattgctaaatagtggttggtgattctttacagtaggaattgtaataattttcttgcaaataagttatttactgctattgatattgaataatttgtcttttattcagatatatttcaaaaagcatgaatatatgattattcataaattgtatactttaccagtaagttttcagaggaaataaagacttttaaatccttttcagtcatggtgtcatattttgtaatacttgcatcttttatatatgccaagaatttgaagattgcctttaacctgatttatgttttaatattagtctagtatgtaaatacttaattgtcaagctgtatatttggttttgtttttaggcatctgccaactgtgctaagtttgtgagaaaggcaatgaaataatataggggcatgagctactttgcaaactgttctagatgccaacattagtgccaatatcaaacaaaggtggatgatacctttctctgtttggaatcagtgctgtagaggctgtgcggcatgggctgtgaatttacagtacattgattgcctacagactgttttcacatctcacttacatgatgagaatctgaaaggtttttcatatctgctttgtaaatgagaacctgaaatgtttttctttaaggggtttgagtccccagcaactcatttgcaagagacaagagactgctgatgttctttttatgcagaaattatacactaaactatgatttgctattgagtcaaataattaaagcagactcacactttttgtcaatttcaagtagtttctaaagttcctcagtaaggagacattaaaaagataacaggactctcaaaactggcagcttatctgtgagattattaattaatcaattttaagaaagataagattaattgaatttttaaataaatagctgtattatccttcaagcaccttgaaactcatacaatattcacactttaaaaaaaatggttccaaatgtttgaattttctttaatgatggctgtttaaaaatactggttaagtggtttaacacttagtatcccaagtcacattttgaaggctacttttctttccattgatgcacaatttagctttggggctgcaatgagatacccttgtggtataagttgccatgtctgctctttctggtgatgatgactcctaggacaatatgacaggtaatcattagaacctggatcctggtagactgtagggtctttttggtctatcgttgaagggggatttgtgcttgtaactcctattaataggacttgcatgtgtaaatcttcctcctgtcaatgagacagttgactcctaaaagaaacattctttagaggtggacactgtaactgatctagaagcctcagtgaattgtcctattcaggatttttatgtgtggggaaaaaaatagaatgagtgtaccaacttagccgagcattttctccagaacttgaaaaggtgaaatactagcacttaatttttccatttccatttctaaaatatgttagaaactactgctctatgtgtactattaacatagcattttttctcttatttttaaaagtaaaataagtttgcccaaggttgtgttgaaatcacattttaatatgtcaataccatcctgaaagttctggaaattaacatcttaaagctatataataaaatccagtctcataacaatcaaggaaatgcagacaaacccaggagatatgttttgtttatcaagttggcagaatcccaaatactgataatagccagggtggtaaggatgtaggggaaaagacactcatacattgtgagtaagaaagtacataagtaggttacagcatattcaaaggacaatttggcagaacctgtcaaaacttttttttgcagattattaaaatggcattatttttaatatttacaaattttttcagtgccacttttagcttcaggcagtacatatgaaggagtattacatgggaatattgcatgatgctgaggtttgggatatgaatcccatcacccagataacatagtacccagtaagtagttttttttttattattattatactttaagttttagggtacgtgtgcacaacgtgcaggttagttacgtatgtatatatgtgccatgttggtgtgctgcaccccagtaagtagttttacaatgtgtgtccccctccctccctccctccctccctcctctagtaggctgcattgtgttattaccatgtttatgtctacatgtgctcagtgtttagctcccacttacaagtgagaacatgctgtatttgggttttctgttcctgtatttgtttaggattatggcctccatctccatccacattgctgcaaaggccatgatctcgtcttctttttttttttttttttttttttttaatggctgcatagcatttcaaggtgtgtaagtaccacattttctttatccagtctgccattgatgggcacctggattaattccaggtctttgctattgtgaatagcacattgatgaatatatgagtgcatgtgtctttttggtagaatgatttatttggcatcagaaatgcaaatcaaaacctatcaaaactttaaatacagatagcctttggccaaacactttcatttctaaaaacccagcttatagaatgttttgtacatgtgcacaaaatacaaggttccacactatagctttatggttttatttaatttttgaaataacctatatgttcattaaatggagactggcttgaattgttaatataggcatttaatagtatagaatactatgcagctgcgaaaagtgaggtgcatctgtatgaaatatatctccaacatgtttaaaaaccaagtcacagaatggtaagtatatatgtgtaaaaatcaaaaccctgtgtttattacatatatatgcctatcatagaaaatttttgggaagttacatactaaaatggtaactggttatgttgggaagagattagtattcgtaggaggagaatgaaaagacttctaattctacataattgttttagttttccagttttttataactagcaagtattcacgtattgttgtatttaaaatttgaatctgtttagtaatccaacgccaagttcttaggtggcatgtgggacctccaaaaatagtgacttcagactttgggttacattgatgttttataaagtgcagttcagatatgaaaggtaataatcaacgggtgactagttacataaactatgattcatctcttacaatggagtactatgcagttgtaagatggaattaggaaactactgcttatgtgatcaccagaatacacttttaagtgacagaagaatatacacaaatgtgcatgtatatcttcattttgtgtgagaaaggtaggggcattccaaaacacatatttaaatagtcatctattgtgaaagggaggaggcagggtggaggaatggaagctagacctctttgtaccttgttttatagttttggctttgaaaccaaaagcaatccgtaaaatgtgaagccattaataaccatgtattgagttgttggcataactgtatgtagaattaggtgactttaaagcattggtatagtttggatctatgtccccacccgaatctcatgttgaattgtaattcctaatgttggagatggggcctggtgggaagtgattggatcataagggcatatttctcatgaatagtttagtacagtcctcttggcactcacctcatgatagagagtgaattctcacgagacctggtcatttaaaagttctcttttgcttctgctttcaccatgattgtaagtttcatgaggccttcccagaagccaagtagattccagcatcatgcttcctgtacagcctgcagaactgtgaaacaataaaacccgttttctttataaattgcccagtctcaggcatttctttatagcaatgcaaaagtggactaatacaagcatagtatttaagtatatattgtaagatatggagatgggtagagaacacaaagaaatcttaaactttattgagtggacttgatgatagtgctaatatttattgtgatagataatgttgatgggattattaacatttagaacaagaaaataatatacaaacaaagataagtaaaaaccctgtgctctttagtttgaatcagatcagtgtatgcgtatgctcaaactcatcaaattgtacagattaaatatgtgcagtgtttggatttcaattatacccccccccaaaaaaaaatcaatatacactcaagatgcagttacttcattctaatatattttctagctagaaaattggcaaaggctactggtgttatgtcaaaagaacataagaaccaatgtgaaggaactcccattggtcacagataaggccatttgaacatcaagagtgaataatgatactccaaaaagcaaacgaacctcattgaccagccatgaagattgctaaggcactctttgttctagaaactaataaataaagagaaggaagcaattatcatatatgtcctgtaaagactgtatttcaggatatccaaatagttgttaaaggaaagttcttgtagaagaatcacaattaataaatgcatgaggaatgatagaattagaaaaatcactgttttgtaaactcaatatagtataataatatacctaggcaatgattatcaatgactgctaaaacctgtagttgaaaggcatcactcgaacctactgatcaatcttaaaattattataagtagaaaggcagacattataagtttccttgtgtgttgaaatagaaagtatacagcattgcctaggaagaattcttgccaaaataaaaaaataaaatgaacctaaatctaatcaagcctttagctttaactaccagcttacaggcatgagggggacaggaaagcatgctaagtgacatcatgaagatacaacgtgtaaaattctacaggacaaatgacccaattttatcaacaattaactggcacaggaaaaaaaatggaggaagcattattacagactaaaggagattttagagatatcaactgcaacatgctgaccttgttttgaacaaatgacatcttttttttttttttttttttttaagatggagtcctgctctgttgcccaggctggagtgcagtaatgtgatctgggctcattgcaacctccgcttcccgggttcaagtgattctcctgcctcagcctcccaagtagctgggattacagacgcaggccaccatgcccagctaatttttttcagctaatttttttgtatttttagtagaaacggggttttatcatgttggtcaggctggtctggaactcctgacctcaaatgatccgcccacctcagcctcccaaagtgctgggattacaggcattagccacagcacccagactgacatctttttttttttttaaagcaaaatccagaccgttttgagacaatcagagggaattgaacatttactggatgatagttgatataaggaattcatattaatagtgttgaatgagaaaattttaatttttaaaagatatctcagattttaaaaatagatgaaataagtagaacaaaatattaatgattaaatacatgatatatggggagttgtttctattatgtattttctattgtgtttaaaatttttcatagtaaattttttaaatgacagataaaggttaataataatatataggttaataataataacctacctgtacattgtttcttcctttacaacataactaccctccactatttctgaaaaggaggtcctataggattcagttcagtcctatatactttgttttataatgttttgaaaccagggactctaaaaatcacctgtttaaatttattacctttgattgatgtcttcccaggccagaggaagaaagagaaagaggtagtgtggctgagcaacactggcacagggcaaggtcaggaagaataaacatgtttacagagtcagcccctctccctctctcttccccttagttaaaaatttaaaaatgaaaatggcattattgagtaccatggagtggagggaatttataatcttacgacttagattgcctactttattatcaccaatctatgataaaattgttaatgctttttaacctctaaaatgtttctatctaggcagtctttagacgttgcagcatggagtctgctactaatttccacacatgaaacctttttgat

SEQ ID NO: 94876 - DNA, 14187 bp, Homo sapiens
catctattgtatccttgatgatgaccatgattcctttaataatcataaaactctattcccttcatcacggggtaaataacctatcacaatgctgtaagtctccatcagcaccccaggctgcccctgctcacttaccagatctgctacttcagccagatcaatcatcatgttaatgtcacacccacattcaataatggtgagtcggagctttttacctataagtgaaaagatgaaaattttactttaaaaagaccctgaaaaaactctaagcatcaactctaactttcattttttacctgtatccagtaaaacaccatatacgtttacaggagtgtacgagaagttcacatttaccggtaaaataaaataaattccatcctgtttttcttgctgtgttctaaatttaaataatatccaaagtctacccagatgaatacaagtgcttaaacagggaaaattctgactggacaggctccatgataaccatgatcctgctgttcagctgtaggccaatgtctttgcctctatcaaaacttcccatattcccactatcactaaaaacatcctcaaacattatccaacagaatattcataacgataatcatttctaaattaaggtaaaaagaaaacagtcaagaaaatatgggcagggcacagtggctcacgcctgtagtcccagcaccttgggaggccaaggcaggtggatcccttgagcccaggagttttgagaccagcctggccacatggggaaaccccatctctacaaaaacaaaaaagaaaggaaaaaaaaaagaaaaattagccaggcgtggtggcatccactactcaggaggctaaagtaggcggattgcttgagcctgggtggttgacgctacagtgagctgtaatcacgccagtgcattccagcctgtgccacagagtaagactgtctcaaaaaagaaaatatggatgctccaaagataaagaaaagcctcaatccaactatattattgcaataacaagagacttgagtgtacattggcattctaccactggaagtttgtttcatctttcctcaaacttggaaaggtcaccatctcccaaagcagacaaattctcacaggaaaaagagaaaacgcgcacttccactagcatgtggcttcataagggcaaggatgtgcatgcacctggcacataggaggtacgtgctgtctgttaaatgatatgttcacagtgaccaggcctgctacccccttccaaggaacatgcttggcaaagccatagagcactcaggataagatatgtatcacatccttatctctgggaacttacccttttctgaagttatagctaacttagtaaaagtataagagaggtaacatgatatgacaaaatttaacatgttccactcaagaaagcaacaaacacatgcatgtccctcagatgacaatagccacgccaactctgtgtctgtggcagcatctcctacctgacacgatcatcacagggcctctgatctcggtcaacttctgccgggtgaagttccgaatgaggcattgtatcaaagtgctctttccaactttggaggccccatcaccactaccactattggtgggggctctagtggagttcgatcaaccactggaatatgatgcttttttgtcttcaaatcctgagtcctattcattaaaaaaaagaaaaaagtaaactcactttcaaaatagagaaaaaggtatcaaccttataagtagaattttcttagtatacttatagatatgagtactttagtatattttatagagtacaacagacaatatataaatataatgaacttgtcaattattaacttaacttctcacccccatccaaataattgctgttggataaagatgtaacaagacgacttcaatagtatatagagttgaaaactgaacactccttaaatctgactgttttatgggtgatttgaatagttttttaaaaaccaaaaggtaaataccaaggcagtgcatcataatggataagagcagaggctctggagttaaatttggctctcctacttactggttatattattggaggtaacttgttttcttgacctcagttttcttgtccataaaatgagggcaagaatgattcctactctggtaaggctgctggaaggatttagttgaataacgtttaaagtacactgctaagaatatcacaaggactcactaaataaagctatgttagtaataaatattgtaatttttgtattttatattacaactttgtaaaacgtatccagagggaaaaagcacacttatcaccatagaaacagtttaaagtttaggaggaaacaaattctataaattcttgtatcttgggcaagaaacaccaaccagtgtgcagatgctggaggcaaggcagcttctatagcaaagcctctcatgttttggtaaaagccacacagcatgcatctccatgtcctttggagctggactagacttgtgaatccaaatgtcacctgtgagaggctcctactatttaaaaagaatcaatggaagaagcatcagactgtagctaaacatacctgtgaaaggatcgagccatccacacagcagactgaaatgcaaaagctttgggatttctcttccaggcatcttcttcgtctcctagctggagatcctgcagatgccgcttctttttctttgcagctttgggtccactatttttctttctttgtttcttctggtccttagtctccatagtggctatttaccaataacaagtaattctaatctacaaggaagaaggttggggtaaggaggtgggagaagcattttacaatccaggcaatacccagggcaaaaacattaaattttatttatttctttatgaagagatgatatatttgttcactgaacaagggtagaaactgcttaaccctccccaatttcatttatctctgttatgctataaattagatgagttacctctgctaagggtacattttatggttaagttactttttattcatcttaagtgtcaacatcagcagtatccatttctgcaaggatggaaacattctatatctgtacttttcagccatttagccattagccacatgtggttacttaaaatgtacttagagaaactgaaaaaatgaatttttaattaattttattccaactctaaatagtcacatgtggctaccatactggacagctcagacctagatatcaactggactaatgaagtggtttcctaacttaaactaaaacttaaattttaataaaaaatttaaaatgcttttatgaacttccaacatgatcacagtattacttttagtacctgttgactctgcaaaactcctaaattacaactcttctacatacatttgaaaaatagcaatatctagaggccgggcacggtggctcacgcctgtaatcccagcactttgggaggccgaggcgggtggatcacgaggtcaggagatcgagaccatcctggctaacacggtgaaaccccgtctctactaaaaatataaaaaaaaaattagctgggcgtagtggcgggcgcctgtagtcccagctactcgggaggctgaggcaggagactggcgtgaaccccggaggcggagcttgcagcgagccaagattgcgccactgcattccagcctgggcgacagagcgagactccgtctcaaaaaaaaaaaaaaaaaaaaaaaaaaaaaaaaaaaaaaaaagaaagaaaaatagcaatatctgtatgtgtgagacatgactagttctagatgatgcctggagaccccatggacttacagagacccttccagtgatttctgaggtacctgggaatctgtggccaataaattggtaatcactgaattagtgagttttttaaggatatccagctgcataaaatctgacagcttgattggaaaaaagcggggcagggtgccatttcattcaattaaggtcctgtattcattccgtttagtaaatgtttgtgtctgtctatgatgtgctagccactgtgccagtaaatggatatagctatgatctgacttgcagaggaaatccaaactagtatcttccgtgccatgcaataagggctacattgcaaggctgcacagggtgctactggggcacagaagtgagtcaraggcttcccacagacacacacacgagcggaaacagaaagtctttatatatcaccatatgtcaaggaacactggccgggagttaggagagctgggcactaggaacgctttgaaaccgaacagctgtgtgatttccgaggttatgttgcttctctactatattttagttccgaacttgtactaatgtttctctcccttttcttcttggtgggaaaagcacaatttggggtcaacagattcggctcaggtctaagtcgccggccgggaccacgtcgccaggaaacgacgtctccccgacaccttccctccccgtccgggctctctgcagcaattcatcccgtcactctcccaacgaccycgggcacacctccggcagatgcgaaatatgctgctcctcaggaggaaagatgacccggaggaccgcgggaggaccttcccactcgcgatcttcccagtgccccaaagccagggaccccactgccgcctaccccagcccgcggcaccgaacctgctcacaactgtgactcctcaggtcggattggacaccaccggaaacggaaattcaccgtcgcgccgactctccggagggaaacaaaaaggcagaaaaaagagaccggcgcctggacgactttcaggggagagctggaagaaagactgtcaacagctgagtgcgggcgccggcgccgtctacgcagtgcgttccaccgggtccgtatccctcccgattccgccccaccccgccctcggaactcgctgcctcaactcctgcggtgggactccggagcagcgtacaccgcccttgccttagtcctccccaaggccagggcagctgtgcggcctggcgcgggttacttggtgtggtgcaaaaagccagaaggagacacatttggtcctggccaccccggagtcacccaaaccaaaaggtaaaaggaacataaaaaagccttctggaaagtgtaaaaaaattcattgcacagtgatttttgtcttgtgaaatcatagttactgttattagcagttttttaaacgttttatattcattttttatggtgttctgacatatgagctgcttcaagtgtttttggacatagcttgggtgtaaaatgtaaaaagtggatattttcaatttgtagctttcttttttgaaacttactgaagtttgttctaaatatatccccttctttctcacctaccccaacacatttttaaaaaaaacaccaccaaatatccattacagcattgatgtgagtgtagatgaagtaaaaactttggcttccctgatgacatacaagtgtgcagtggttggtaagtgatcgcctttcttgctacctaatgagaactctggggaaatatgtttactcacatggttactgttaagatgctatagaaatataccttatcagaactgattttttttaagttgtcctctttaagacctgcatcatttttcaattagtctaaattaatatatagcctttttttatgtgagggattttttttataggagcttattgaattttaagtctagatctttgttttcaattcctcaacatattctataaataagaccaaattatagtagaaggatagtaaataagctattatcttttagaagttgtaaagagcactgattaactctatattagagaccccgcccctgccttggctgcgcgggcccccgccaaagggcccatggtcggcgcagccgagctggcgagggcagcgcgggtcccccggaacgccccccgaggcgagcgctaacgaggtccggcaccatgtgctaggtcactcccagtgcaaggccacacttgggccatccgagcaacccctcctcacgtcaggggtcaccctccccaccacccattgccccaccatggccggagaccggctcccgaggaagatgatggacgccaagaagctggccagcctgctgcggggcgggcctagggtgcctggtcatctacagccgctccttcctggagtacaacagctggcatgtgctcagctccgtcaacatctgctgctccaagctggtgaagtgccggctgcagaagggcaaggtgaccattgcagagttcatctggctggccacacgcagccaaatggaggccactgagccacaggatatggtggtctatgaccagagcacacgggacgccagtgtgctggccgcagaccgcttcctctccatcctgctgagcaagctggacagctgcttcgacagcgtggccatcctcacggggggcttcgccaccttctcctcctgcttccccagcctctgccagggcaagcctgctgccctgctacccatgagcctctcccagccctgcctgcccgtgcctagcgtgagcctgaccctcatcctgcctcacctctacctgggctcgcagaaagacgttctgaacaaggatctgacgacacagaatggaataagctacgtcctcaatgccagcaactcctgccccaagcctgacttcatctgcgagagccgcttcatgcrggtccccatcaacgacaactactgtgaaaagctgctgccctggctggacaagtctatggagttcrtctgtaaaggcaagstgtccagctgccaagtcatcgtccactrtctggtcggtatctcccactctgccaccatcgccatcgcctacatcatgaagaccatgggcatatcctccgacgacacctacaggttcatgaaggataggcgccagtccatctcgcccaacttcaacttcctgggccagctgctggagtaggagcgcagcctgaagctgctggccaccgtgcagggggatgcgggcaccccctcagggacgccggagcctccgcccagccctgcggctggggcccggctgccatggctgccaccacctacctcagaaagcgctgccaccgggagtgcagctgccagggagggcggcctgagcgcgggcggggagcccccactgccccccacgcccccagacacctgcgcgctgcagcagggcctgcgcggcctgtacctctcctctgaccgcctgcaggacaccaaccgcctcaagcgctccttctcgctgtacatcaaatcagcgaacacccccggccggcggcccaacggccccgggtcacccgaccccggcgaggtcccaaagctctgcaagctgcacggcccgtcggagccacgctgagcctaccttcgcccagccccgacagcccggatgccgcgcgcccacggccctgcgggcggcccaggcccccagccggctccccgctcccccgcgcacagcctcggcctctcggtccctgtcggcgcccaggctgcccggccctggccagccggccccggagtctgggcgccccgcttgactccccgggcacgccgtcgcccgacgggccctagtgcttcagcccccagggcgcgcaaggggcgggcgggtgctgttcgcgccctttggtcaggcgggcgcccccagacggggcggcggcagcgagctgcggcggccggaggcagcaagggctgagccccgggacgcgcggaccaactggcccgacgagccgccccggagacggagacgcagatcaagcgctgcagctgccagatggagttcgaggagggcatcctggaggggcgcactcgcggcgaggagctggccgccatgggcaagcaggcgagcttctcgggcagcgtggaggtcatcgagatgtcctgacccctccgctgcccttagctccgctgcccacagccagacccgttataaatatatattatatataatgcaaagaaaggtaaatggttttacttttatttttattgagaagtaaatatttctattttttatttatttaagctattcattctggcaatgatttggcaacagtgcaggtggtcctcgagctctatttttactgtctggtatttatactgaaacatacctttctaagcaatacgaggccaccttcagtcgcaaggtgggtgccaggcctggtgcccctcccagttcccccaccccaggaaacactgctgacacttgcaaagactgccgaacttttgtgcactttttacataagaaaaaggattaaaaaaggaaaaaaaaaaagcttatttgccacaaacagccgcggacccccccccccaccttcttcctcccttcaggctctgccccaaagccataggttgggggagcaggagctggtgtgccagagagatgcggccagccctccaccagctccaggcaccaaatcttggtggcagggagggcaccccgctgcccgttgccccagagctgttccttctcaagggaggacaggcattgggccccatggtgccaggacgttgagaggggctgaggaatagaacagagtgtgtaggggcttggggcagggggttctggagcgtcagatgaggtggagcccaggggaggatgggggtgttgttaatgtccccaactcctgccagagccccagtccagccactggtggctcagaaaggccattcccagagggctgcggccctcccttctcctttgaccctgcccccagaactacctgccaggcaggacggcaccagtgcaggagaggagcttggcctccgggggtgacgcaggagtggggcctggctagcctgtgctggctccactgggcggggagccctggaccgccaggtatgcggagggggtgggcttagggtcctgttccaggtccgtcccccacctagcaagtccccaggcaggacttggaaaccaggtgtgcaccagcaggctaaggggctccaagagcaggtgctgcttcgcacaggaagttcaggcgccagccaagtccctgtgcttctggggtaggcctgcttcacttagggagcgctgccctcaaggcagataaagccctctcctttgccccgacctgcatgggggcttctcaggagagaaactcccgtgtgcccctttcccagggcactctctctctagacagcatgccggcccccaaacacaggtggcttttgggcccaggtgggtcagcctgctgcccctggcccataccctctcaggccattgggacccctgcccttcagatgttctagggtctaggagtggaccagtcaccctgggaagaggccagggccttggcaggaggggtggcccaggcaggacccagtcctgagtcctggagcaaggccagggaggcgcccaccccaccccggccagctgccctctctgctgtttgttctatttgttcttcttttcacccatagccttgtgttcctgtcatccctcctttcagcaaaagtccttttcccattccctctgtccccaccaactgytgttccccaagaaaataagctatcattgtatttgcaatctatggattagaggttgaagtatttattattattggttaattattattaattatataaaatatatatattagaacttggctagccaattttattgaacaatttctgttcaataaaatgttgtttaaagtacagtttagaaaactatggtaggtttatttcttgaactttcagaaattcaagcttaaagcatcacacgtttttctaatattgtgtggcattttctgtcattttacttttttaacctttatatggaataacaaccatcagccttgtctttcagatgtgccatttgggggtgctaaagctggtgttaagatcaatcccaagaactatactgtaaatatgagagtgatacttgttttttgttgttgttgtttttgtttttctgagacagagtcttgctctgtcgcccaggctggagtgcaatggtgcaatctcggctcactgcaacttccgtctcccggattcaagcgattctccttgattcagtaactaggattacaggtgcatgccaccatgcccaactaatttttgtatttttagtaggggaggcggtatcagcatgttggccaggctggtcttgaactcctgacctcaggtgatctgcccgccttggcctcccagagtgctgggattacaggcatgagccaccgcacccggcctcaaagtgatatttgtgcacacagtgcatttatgaaggacttgaaattactgggcttctctgtatcccccatatcagtgagatcaatggtccccattgcttttcaaatggaatgaaaaaagtaaagaattaactcattgagtgttttgccatataaaggtcacctacttaatatctatatcctttatcattttgttttgtttggttttgtttttatgagtcttgtattatttttttgctttttgtattattattttcttacttattaaaaaggtaattaatattttcatattgttagacacttaaacccatatttaagaattactgtgatctaattaatcaggcgtagtggtgcgcacctgtaatcccagctacttgggaggctcaggcatgagaattgcttgaactcaggaggcagaggttgcagtaagccgagatttcactgctgtactccaccctcggcaacagagaaagactctgtctcaaaaagaaaaaaagtattactgtgatctgaagtttttaagtcaggatttcattctagacaaatatcttaactaagcctataaaaaccttactttttatcctgtcagttccaagcaaattcaaactggttgtcacaatgctttacataatactaaattatctgtatacaaacataaacgcgtatgatttttattctctttaaaattcaccatttacatggaatataattatatttcaattaatcttaattaagatttagtaggccaggcgtggtggctcacgcctgtaatcccagcactttgggaggccaaggcgggcagatcacgaggtcaggagatcgagaccatcctggctaacatggtgaaaccccgtctgtactaaaaaatacaaaaaaaaaaaagtacctgggtgtggtggcgggcacctgtagtcccagctgctcgggaggctgaggcaagagaatggcgtgaacccgggaggcggagcttgcagtgagccgagatcgcgccactgcactccagcctgggcgagagagcaagactccatctcaaaaaaaaaaaaaaaaaaaaagacttagtatatttttcagtggggaattaatagaatgggaatttgagtcctagttctactatcctgtttttataatctacttttttgatcccttatttcctcacctttaaaatggcaatgcctactttatgagttgttctaaggattacaagagaagacatatgagaatgtactataaatagaaaataagatgctagctataatctcaagcgatttttatatcttatttttattgttttcttattttacaggataatgaattggaaaagatcacaaggaggttcaccatggagctagcaaagaagggctttattgtgtggccacatagattttggtataaagtgggaacatctaaaaaaatcttttttttttttttttgagacagagtcttgctctgtcgccaagattggagtgtagtggtgcgatctcctccacctcccgggttcaagcaattctcttgtctaagcctcccgagtagctgagactataggcatgtgccaccatgcccagctaattttcgtatttttatagagatggggttttgccatgttgatcaggctggtcttgaactcttgacctcaggtgatccacccatctcagaatcccaaagtgctgggattacaggcgtgagccactatgcccggcctcctactatttgtaataggagatagggtcagataagggaataaaagcaggctgccccagccaggggcagcaaccagctcaggtccccttccacactgtggaggctttgtttttttgcgctttgcaataaatcttgctgctgctcactctttgggtccgcactgcctttatgagctctaacactcatcgcgaaggtctgcagcttcattcttgaagtcagtgagacgaagaacccaccaattccggacacagaagtgtcttcatttaaaaaaattttttaagtgcactgaaaaagcatcacatattctagcctcgtaataatgctccctttttggagatcccaggaatcagtgtgggctctgcccagagctcagagatctagtaaaaagacagatagttcctatataaataaaattggtctcctcatataatcctatgatagattttttttttttttttttttggagacagagttttcgctcttgctgcccaggctgggtgatcttggctcactgcaacctgcacctcccgggttcaagtgattctcctgccttagtctcctgagtagctaggactacaggcacccaccactgcaccaggctaatttttgtatttttagtagagacggggtttcaccatgttgggcaggatggtcttgatctcctgacctcataatctgcctgcctcagcctctcaaagtgctgggatttgggattacaggcatgagccaccgtgcctggctatcctatgatagatttctaaaatgttatgtttgatttggcatccttttttttgtgtttttttttttttttttgagatggagacacactctgtcactcagcctggagtgcagtggcacaatctcggctcactgaaacctctgcctcccaggttcaagcaattctctcacctcagcctcccaaatagccagaattacagacatgtgccaccacacctggctaacttttgtatttttagtagaaaagggttttcaccatgttggccaggctggttttgaacttctgacctcaggtgatccacctgcttccaccttctaaagtgctgggattacaagtttgagccactgcgcctggtgtggtatgtggttttactgcatgtgactagtttacatgcaactagccatgcaagttcagtaacccaaggcggtctataccctgttcaacaagaaccatctactgatgacacttctggaagtctgggcaatatcaacttgctgtaagagttcccaaatgctctcaattatcatgtgataacaaagttttcaaaccagtaaattttgagtagccctttactaggaataatcttgaataagttagtattgccctccacaaccacaatttaaaaaatatccgtattggttttctcttcaattcaagcatcatgtaaatatgtaatgtagaaaatgaggatttcccatattcccatagaatcacaaagatgatcactggtaatatgtgtgctacatatatgataccaggtttattcttttttttttttttgtctttttttttttttctgtcacccaggctaacatccagtggcacgaacttggctcattgtatcctctgcctcccgggttcaaacaattctcccacctcagcctcccaagtacctggaattacaggcacctgccaccatgcccacccagctaaatttttttgtattttcagtagagacgaagtttcactaagttgaccaagttggtctcgaactcctgacctctggtgattcacccaccttggcctccaaaaatgctgggattaaaagcatgagccactatgcctggccatttttttgtactcttatacaattatatacttgctttataaaaatgaacttattctacatatatatgttattacattattaggacatgttccctaatgacatattacattttcatcacttttttaaaatatttttttcctgagacagcatctcactctgttgcccagacgggagtgcagtggcctaatgacaggtcactgcagcctcaagctcctcggttcaagggatcctcccatcttggcctcctgactaacccagctaagtttaaaaaaaatttttttttttggcctggcgcagcagctcacacctataatctcagcactttggaaggccaaggcaggcagatcacttggggtcaggagtttgagaccatcctggccaacatggtaaaactccgtctctactaaaaatacaaaaattagctgggcatgatggcaggtgcctgtaatcccagttacttgagaggctgaggcaggagaatcacttgagcccaagaggtggagggtgcagtgagtcaagatcatgccactgaaatccagcctgggtgacagagcaaga

SEQ ID NO: 94877 - DNA, 26656 bp, Homo sapiens
tttacaaagaaggtcttattagaaggcatctattgacttaggcaggtctgaaaaaacttgtcaagattttttttatattgaatatttttagaatacagctaagtttcttataaacttgaatatattacccatcaacatggcataaatatgagaaaacattttaacctccattttgcaggtagaaaaataaaatcagagatttgtttctggtcatatgggcctgtatggccccagaaatagattctgtgacttatgattgaagtccaccagaacgtgacatctcttgataaaaggcaaatgccaaactgctgagtgagttggtattatttaacatttatcagaaagcaatagagatttttgctttgaggagtttgaggtcttagatttgtgtatcatttagcttattactgatacaaaaatcataaaatgtcttggttttattttgggaaggcagacatagaatctttaaaacatgacagaaaattcccctgacatagtaaagcatgactatttagaaatttgtttgtacatctgttttgaaaataatcatttagctaagtggtcacatcttgataaaagactcccagtgtccatctaataaatgagactggatgtaaaaatagattcaaatttcatgccttatattttgtccttggaagacaccctaatgctttcctgtctaccacctcttagaaaagcataaggattcacttaatctgacaaaaaaattagtcttcaaaattgaaatggaaacagaacaataatttataaattattgtgttccaccagtggctctgttgtgttgtttatgtaatgttatgtagtaacttatcctgaaccattattttaagagtaccacgagcttaaaaaggttttgagagattattttattagccttcttccctaccttgtgagtccactgataacattttcataacctcccttggtaacacactcattatacaatcatcctcattgcaggtattttatcctcttaccaaacagaaatttttcatgctacagttcattctattagcttcctcatttccactgaggttagaatagaatatctagtttattttctttgagccttacttagtgtactgattcttgagggaggaggtgtggcatcctttgctctcattgggaacaaactacaccattacctctgaaatggcatgagtcagcatgtttcttagtatattttgtcatgcttggtgttcacattttcagcatatgagggaggtgatggataagtgactttttaaaaaagctgctgtaaagccatttataaagaatgacctattttattttaaaacttaatatcatccggtggtttcctacgagccgaggaatgaaacaaagtaaaggaaatgttgttccagagatgatgactttttttgaccattttcctttgtttcttttggtctactgcattgggtcaagtatttagggagaaagaagagattgagtcacagtttcagaaaagaaagggtgagttcaatttcctcattttcagctttttatttatttatttatttatttttggtcatgaatgaattcaccatgtataactttacaaagtcttcttctcaattcccctaccacccctcttcccacagcatcccaaactctgggtgtctctagaggctgataaactgttctcaaaaccaaataagagtcaaggcacctggagaggtttgggcagtggggagaggggattggctatcaatgtggatccagactaggccaatcctaagtgaagtatattgttgtctcctaacagctgttctgtggcctctgtgaaatgcggtggtggctttcatccagataccggacagctgttgcctcacaaagagcatcgccacaattagcattaactggctctttgttggtggcctccactggcaactcattgaatcttttctttccctgcctatctcctaccatctttatctccctttttctcttcatttttgctttccctctcctttttatttcctttgtctttttctccccctctgtcttaccagtaggtagcctggaaaaaaaagagaagcaacagttcctgagggaagaatgcattaacaactcggatgggtgctgtctgccagcactgcagaggaacctacggagagggctgctgggagagaatgctcatacctcccaaggcgtcagcctgccctcccgcccccaagttgctttgctcaaggtgtgtcagagtttactctgggattgtgtattttatccattgagcttctcctttcatcacaaggcagagaacacggctgtgtttgtggaatggatgggcccacagggaattttgagtgattcagtagttgtggtgtaagccgttcgtcataactccctgtcaggcagagtcactggaggcagtaggttatacagtttgtgattccttgctctgataagagcggcgctgttttaggcgttatgtatggcaaccatattctcaaatccaaaatcagcatgcctgctgtttccagacatttttggatttataatgtgtttatttgacatgtttttaagaaagtaaaaatgaaatgccattttttaaattatgcacttgacaaatcactggaattagaaagaataaaattccacgaaacaaaggcagcttgaaagtccatggtatgagttgttaacatgacagaactgtctggatgctcttctgctctttcaaataagaataaggaaatagtaatggcaactgttgtgcttaaaatttccaagtctgctttcagattatccaactttattttctcaatctcaattttagagtcaagaagaggactaaagaaagtcttgtgactcatatgcttgttattttccaaccagaaagaggcaacagtaggacatgatgctcttttactatgggaatataaaaaagttaaacaattttgcaaaggttttttcataaaaagcccaaagcattttgccctaggctgcttctctttggaatttaaaacccgtgtggaatatcgtatggggaaatgcaaccgacatgcccctcgttggtttgcatttaactcattacatgttgattgctaagaacacatacatgaccaagaagatagccaagccctttgaaagaacatatgaaatctaaacaaggagcctgagtcgggacagtcttaaacagatgtgaagtcctcacagcctttgccattttgaagattaaattactagcaaaccactttcaacaagggttttggttctcatagtaatgaccaggacccataacagacattaaagaaaaaaagtgaggcttatttagagttagggaaaatatcccaacacccgcttggactccctaattttggtaatctgctttctctcatctatatgatgggaaaagtcatactctgtcaccttaggattattctgttacttaatgagtataaaattacttgaaaatcaatgtggtaaatattcttaataactggaatgagcaattgtgcaccatgcataaaaaaagaaatagctttggagaaatgtaatttcttggatggacagattgtctatctgctagaggaatggccctcagttttgtgatgtgtttatcgttcatttagaaaaatgattgaagaaatctgagaaatgacataaccagattggctgtgtatctttttgttctcctatttaaaaaaaaattcccttcaaacacttctaacctcaataaataaataaataaaaagaaacaaaagcccccaacagagtcctaattctaacttataaccacttaaagtctggatatgctttgaacttcacatttaaaagaaaggtttttctgattttctatcaatccctctccttagcttgccatttacaaacatactttcctccttcagagcaaaagcaagtgagagagaattggtttaaagctgctgaagtctccactgcaggggagcactggtttaattcaatcaaggtagaatgaaggtctgagaaggggagagattctaaggcctgggcaattgagtggaagcagcatttcctgagtctacacctccttctgccattgttggtgggaactatggcaatatagctttcacatctccaccagttaaaatactgtgctatcaactccctgcctttgttctttcttttttcccataaggacattgagtagtttgagaagatacatgcagtaaatgtacattgcatatattagtaatattattttgctaacattgtatgctagtcatagggaaggtgtaatttttctatgtggtttatattatttttctaagctttgaagtcttttaacaatttcgtccatgagatgcaaattcaaaactcattaggagccaaactaatgaaaaaaatgaaagaatttgtagggaatgctgagggttgtgtcacaagagagggcattgcacaaggccaccacgttttacaattccagggcacccccattcacatcatattgtatgtgaatggtgccccctagtgtagagcaatgcagaggccctctacatgccctgttcattcattcattcaggacgtcctcaatgagccaactgtgcgccaagcatggttctaggtgttggggaggtagcagtgaacaaagtggacaagaatccctgctctcacggaacctaaaggcattcttttttgattattgtttttttaaaggcaaaaaagcaacctgccaaccaaacaaaatgcattaatatgcagaattcagctaacaggacgacaaattaatgactcttgtctaggcttttaaattatttctgtgatcatgaaggttttagccacatggaaaaaatacgcaatacgctaaccacaagcttgcacctactgcttagcttatgcctaagctctggctacatagaaaactcagctatctattacccagtatctaaaactcagtatctatcactgagaaaactcagtgatctattaggtaacacaggatgaaaaagtagaataaagtgggggtcatgccattctgccaaagcattgtctgcctaaatacctgtcctaaagactcatgggagaggcaagccaatgaacaatggtcaatgtggcaccttgaaccaattcagtcggctcttaacttcccatacatttaattaaaatttttttcaaacaaaaaggaagattccttaaagtatcaggtctcttaggggttatgctaacagaagcaggtgaaacaccaaatttaaagagctttcattaataatttctcagccttatggcttcttaatgctattcaatggaaagttttaattttatctgcaaaatgaagctaaaagaatgtcgcctagctccttccctgtctggaggaacttggattttttttttttttttcattagaagcttgggtaaaactaaaaagaaacctgtattcaagtttctgcaagaagctttaaagaaatgctgggatggtactcaaatagtttacaagttttccacctacaactcattttgcattttcttaaataagataatgactcaaaaaaatttaaaggacctaggtcacagatcttacaaagggttggagtcatggtataaaggtataaagattgtatataaatgttcatattttccaagaaacagagcaaagaccgcctgtgataactcttccttttttctacctgccttccaggatcctttctttccaaaacccctcataaattaatgataatgataatcagaagagagagtgttggccatatcaatctgcacattatattaaattacttttcccaaagtttggaagcatttcctgaaggctgtcaagggtattagtttttttctctctttaaatcacaaagcaaaattccactgtctctccccaaccccttctaaaaaaaaaaagttgtcgagttttgcttttctattcactgcaatcctggccaaagtaaagccctctttctcaatgacgtcaagatctttaccaagattaggctttcacttctctattgcagcaattagccagggaatgtataaaaggcgtcagggagactcactgggctgcagagagaggcactttgcaccacagacagatagcaagaagggaaagacagagagtgagaaaaaagaggagtcagtcgctcctggggaagggagagagtgagactgggagaaagagaagcacagaaagtgtgtgtaaaacggagtaaagaaagaaaaaaaaaaaactacccttaaagcacatttaaaaaaaaaaaaaactctggcaattcaaraaaraaacaggctacgtttaaagagcatagagacaatgaaaggctaaagaaaattttaaaatytctgccacagtctcataggtgcttggaaatgaaagtagaactgcctgtctttaacggactctgacaraggtaactggattagggacgagtacgccagcytttttttttttttttttttttttttttaacatcttaaatcctgaaaaaaaaaaaaaaaaaaaaaaaaaggcagcagctccgaattgaatgaattgatgggcacactccaactgctgggctggagagactggacttagtcttgccatttctgcttctttgaaagaggagacaacttgggcttccttttaatttagttttttttccccttctcccccaacccccaaccttcccccttacctcccccaccccctttatcaccaccccccttttaaataagagggtgaaggggaaccagagcgcacaagggaactgactcaggaggcagagaagatgggcatcctcagcgtagacttgctgatcacactgcaaattctgccagtttttttctccaactgcctcttcctggctctctatgactcggtcattctgctcaagcacgtggtgctgctgttgagccgctccaagtccactcgcggagagtggcggcgcatgctgacctcagagggactgcgctgcgtctggaagagcttcctcctcgatgcctacaaacaggtgagctgagctgagaagggcttctccctaggtctacaggggcaggggctcatatgctggggaccagaggccattgggagcattggggggagagctgtgaagccctatttgtggggttgccaagtgagcctctaagtttactttccacacctgttgcacaggttagcttgggagggtgacagctattaagccataatgactctgtgtgacctaataaggaatctttctactaagggttattaatatcttgctgtgatttgggagtagaaggcattgtgctggtacgataacttgggaaaagtcagaaaatgatggagaagaggagactgctgcatttattctgctcttgccataaactggaattttgattttttgcttgatgggaggctgaggtacactgaggaagtatgttcgaggggtgggtactgaaaagcaagaaatgagaaatgctactcagaactctcagagagttgacaagataagaaagtggtcatagaaattgtgattgggcatcatagctgcttggtttctggtagaggtaagagttaatgaaagcaagcagctgtgtgccacctcctctacattgattcaaatttgaaccctttggaagcgattttcaggcagtgatcctgagttactagatatcaacttgcgaaagaaaagtctgaaaactagctgtcagaaatccagcatttgtaagggaagcctcctttactttgtttctcaaaaataaaatacgttgccctagaaagagatgatgggtctgtgattcattaaatctcagagctgttatgagcattagagcagtggtctcccttacctgctcaggtagtgcccaggggctgctctctcaaaatcagaggtagtgatcttagtttctaagtgaaaaatactgtgttccaggctttttgctggtgagagatgttagtagagcattttcaactaagatcttcaggggcacagaggatgattttcgccctggtcttttgtcagttttcccccacctgctatgcccatatgacttctaaaggtcccctccaccccctcaaccaggcttgagaagaatgaactattttggcaaaagtagttatcaaaatagacaatcttggtttccctaaaagtgttgtgggaccttgcccaagatgccagaaaaagcaactgtacatctgtattttagaggaatatagaagccaggtgttcagtgaagtggtgtgttttaggcaggcagcaccttagaaccagagacggggaactcgaaataatagagacgcaagggaatgcatcctccataaataaacactagaaaactaaaaccatgcgccaagaaaagagaagaagtaacttgtaaaattacaaagaattcaggacaggattgttcttctgaaaatcagatgttcaagaagaaaatatctgttgtgaactagggaaattttaccacaatgcacgtctttattattgatagtaacccaaagagggtttgtgtttattgttgttaaaaatgtgaatagtaagagctcttattagtagatggaaattcttttatgagaatatgaattggtgctcaaagttctaacagtaaaaactcatttatattgtgcatgtcagtgaggacgggagatctagaaaagtagatattgaattgattatttcatttccacaaaagtatacattgaatgggaagtttttaatggtttgttttagtggaaggcaatttggaggcaggtggaggagtacacaagtatatcagacatattattaattaggaagttccctcttcaacatcatattttatacgtgttagcagataccatggaaatatcagtgatttgatctcagtatattaaactcttactttttggaaggacaattgccttttgcctataaagtaaaaaaaaaaaaacttattggaagaattttacttatatacatatatttcttatataaatgtcatgtttcattaagaaaaacatgaaaaacagtcatctctcatataaacaatgggggctgtaatgttacccacaaatattaagtgaggttgtttctcccattaagcagcttattgaacataaaatggaaaagcaaacaaatacgtcttcaataaagtttattgtttttttcaccaatgtatagtgttccattatgttgcaatatgttgttattcctattctaggaaattgggaaggatgagtgatttgttttttctttttgcatatggtttgtatattcctattctgtatttctttgtccctgcctactgatttgattagtgaccaagttcacgactgatgttattatgtttgcttttgatgatttatgtaatagctaccatgtgcagaagcaaccccaggacccacatatccagaaacaagactggactgggtgtgtgataaatggaaacattatgaacacagctgcaactgaatgatggtctcttttctgtcttcaagtatggcaagggtggtggtttctgtggtggcatttgagggtcactcagaatctctcaaccaggttgaatcacttctctgaatgctcttgtcatttgtgccactgtctttgggtgtagtcatttccagagacgttgtaagaggttctgtttgagatggcatcacactatttcataamcctgacttgcattattttgaggctacccatccccagaagtgaagttttccaggatgagaggggtgtgtgctcatgtgatacaactacacatgtgatttactgttattaattctccttgttgctgcatgtcagatgcctggaaagatatgtagagaaagtggagtaaaagtattatccctgtgttttgcctccacaaggggcaacacagaaataaagaaagaacaaaatattttcttttcttttttttttaaataaaccctttcttaaaaggttgaaagggatttgaattaactttatggagaagcctttaaagataatgtgagtttagtaagagatggattctgtgtacaattttgattgaaaggaaagtctatagacactggtgagagaccctgaggtgaataaaaggtgtttgttatttaagtttctttagtcagcgtcattgcatctgaacagtatatccttgtgctggcgctcagagactaaaaacatgcaaccaataagcaaattgctctgtctgggagcctggctcttacctaaatgaagtgtaaaagtaaacacacagtatagatgctgacaggcagtttagcttctgcacggttaatattgcagaggtacagaaaacatattcatttgaacatataattttggttttgaaagggtctctttaacattctcctcctcctcttcattcacctcaagcctttgacactagtttccacaatggaaaatggcccttttaagagagaaacagtcccaaaagaacacaaagcaggccacagccagagcttgtccatcacttggataaaacattggggaatgatagagcttagagctacattttcaaggtrcaaattaaaaagagaatagctaaaagggaattgagctcagaggaaggagtacgtagcctattcttcaactctgatttatttggccaatctgaatataaatggttaaatctcttcttaatgatagtttggccatgtttctaaggacattgatgtagcctggtcattatgtcaaagaatttgaaacttcctgatagttaataaagccattttcagggctttggatagcaagtagtatgtgtgaaaattctgctaccacacacccacccttcatttttataatttgctttagtttctgttatgagattaygtgatatattgtccacaaggctttctcaggctgtggaaaagaaaaagaaataaaatcccaaaacaagaaacaaggttagtagtatatgctgtattttctgcttctacttgatgaatggttcttttctcccccttgccctgyatttcacagtccacatgctaaagcagcatttcctttttccccatgcactgaacactgaacatcatcaagggaatcaaatttttatatatgctatatgtttatgttcatgttcatatttataaagatttccattccaacatttgaacttggcccggagatgtcttctgttgtaaaaatgcaaatcctttatttacctcctttgttggtgttgtgttgatgttgcttgcaaaaacataagagaggaccactgtaatagtgcagatgagagagataaaagtcagcgatgacaatatcacattttacgtatgtcctttctgatccttgcaaaataaagggaccctttgggaacatcggaacttcaagaccaattagtggaaatgatgcttcttgtgtttgggcattaaatactgggcagggttctctttagagcrgctaatgctggcagggaaagaggtaccgacctaattactcttccgcaagagtaaaaaatgccttttgaatgcctctttggcaaatatgtctcattaaggacaaaaaccaaacacaaaccctctaagaaggagaaattaagatgataggtaacttgtggccagactttctgtgccactgtgggaaattaaaacaaagtttgggagtaccaggggataacttgtttttgttgagcttctttcctgcagcctaaatgttattatgggaccaactttattttcttcatcattttggctctgtgtcaaggaatgctttgctcgtggggagagcaaagaatcttccatcatcgaagacaatggtgattctcccagcctgtctcagcagggtgcataacccagcaaaccaagaagttctccatttgaaactctggtctattaggaatttaatttttatggtgaccaaatggggagatgagaatgaacagtaatatccttttagaatattttcttttaggttaaaggaaacttccatatctaaaaaaagttttttttctttattttagctaaattgtcctccatcaggttttagcaaagatggacacattttatgactagtatatgaagcttataaaagcagactactggtctactcacatttggatttatggatggtgggtgtgtgtttttccttcttagttttattaataatattaattttatctatgcattttctcttgcctaggcaccttcatgaataagcatatccatttatgacattataacattcagtaagggaccctggctcctcaacaaaataaaaataataggccacatttgttttgtgcactgaccagatgagactgtcaaggacagatcaataacattgagtgctgattttggtagtactctatgagagggccccaggattcatatttctaaatttatctgcctcagtgagcttatccrtcacccaaatatgattatgttcattgcaggtcagggttatcattaagtgtaaaattcttcactgacctagrattataacaactagcattcattcaataaaataaatacttcccagtctaaccctaatcctaacaaaatgctaaatcccccccataaagagcattacgaatttggtaactttcctaatttttttattttagactgacagtgttgtacttactctaaatttcccaaggcaaattagtctgtgttttggaaagaattctgcagctgaactatacattgtttctaagaaggagaaggtgccttaactttccaagaaaatttactgcaggtaataagagagtcccctgtgactaaagcaacagattagattattcagttgaataatcagacataatgaaaggatcaacaggtctgctcggatgaatcagggggttagaggcgcatttgtcaaggccacataattgttcatgggtttcaaaaatgattccaaaatgcagatgaatgtttttacctatcaagaacctacaagtgtacaggttgcttacttaacaggaagtccctacaacggactaatctgaatgcatttaggtcttcttatcacggtacgttgaggcacacagtacacatgatattgttaaaacaccccttctagaatcattactattatttcaaatgggaaagatctaaagagaagagactgctacccactacctagatctataaaaaaaaaagaagtacaaaaagaactcacggcttaaaaggttaataataccttcaacatatctttaaatttgatgtatattttcatgccttaaagactagggtagttcatatgaaagaatccagctaaatgtgcttattagatttctccatctagtgtcatttgcaaattaatcaagaaagttagtataagtaaaataattttctctgtggtggtgactaaaaaacaaatgtacttacttaaatcacaccagcagcttcctttctgagaaggaagattattacagtaagatttctcttagaacactaataatgcttatttcaaaccttccctgctaggatttttcagaagggagagaaagaactttaattctttctctacagttaaaatgagttatgcattaacattagatagaagcttctgaataaaagcccttgagtgggttatatcagtttggattgttacatctttaacaattcacttcgaagtgacttcaattaacagtagcattatgtgtggctgtatgtatatgagggaaataagtcaacccagttggaagtatattgtaatattaaggatagtatataaaaatcaattgtactgtccctaaattgtccctaatgttattggctttgattaaaccattctaaggaagatccaatcgtattaattcaaactgaagtaattggctcttttattgttgcctgctttttatgatcaatttacagattcaaaggctgcaaactttccttcattctgttctcaactatttaaaccatgtgcaaagggagcacatgaaacaatttttatctctacytcttctgccccaatattttataattcagaggagcttgttaacaaattgtggggtagaaaagtactttttaatgtgacttcctagataaaaagaaggaaacaagcacacatggaaaatgagaaattgacttaaagtagaattctggagtaaccatttttgtttttttgtctgtttttattttttttttaaatggaaattgtaagattggagtggtaagaaccaccttgtaagcagtggcagtagaagcctccagggaggatgccatattgaggagagtgcaaagctttgctcagggcatttaaaaaaacaaaaacaaacacagaattgcccaagaatgatgatgttctgtttcacatggtggggtagcatctgataaggacaacacacacccatagagttacagtgcacaaagagctctttttctcatgttgtcctccagttgccatatgtggaagacaggcattattatttccattttacaggtgggaaagctgaatcactaaagaggttaagtggaagtaacacttcttataagtggtagacctcaggttttctagatctggccaagaatagagcccactggtatcactggccattggttgagattaaatgacttagtatcatgcaagaaaatgaaggtcctgcctggtgtttcagaattcagaaagagggaccatgtcccaagaccctgataatttgtcttaaagtagaccatttgcttctaatttttaaaatgaagtcaattaatcatttgttatagaatgcatgttaagaattgacagcaaaataaggatagtaaagaatamcagccttggcttaattttaaaaagagttaactccagtgccttcagtgatgaaaataattatcttcagtgactatacagaatgaaaaagacttttattgtcttttgggccattctttacattacctgccatcatgcctctttactcaaatcaataaatgtttaccaaatgctctgaaggaaataccacactctattagagccaattgtaactatttaatgtgaattcaagtggcaatgtgtttaatgtgatattctcaccttcttcttcttcttctttttttttttttttaccgtcaggtgaaattgggtgmggatgmccccaattccagtgtggtgcatgtctccagtrcagaaggaggtgacaacagtggcaatggtacccaggagaagatagctgagggagccacatgccaccttcttgactttgccagccctgagcgcccactagtggtcaactttggctcagccacttgacctcctttcacgagccagctgccagccttccgcaaactggtggaagagttctcctcagtggctgacttcctgctggtctacattgatgaggctcatccatcagatggctgggcgataccgggggactcctctttgtcttttgaggtgaagaagcaccagaaccaggaagatcgatgtgcagcagcccagcagcttctggagcgtttctccttgccgccccagtgccgagttgtggctgaccgcatggacaataacgccaacatagcttacggggtagcctttgaacgtgtgtgcattgtgcagagacagaaaattgcttatctgggaggaaagggccccttctcctacaaccttcaagaagtccggcattggctggagaagaatttcagcaagagatgaaagaaaactagattagctggttaaaggtatgattataagagagcttattgttttaaaaagttatataaaggcaaggaaattaagaactgaatccatatttcaacagagccctattggcttactgaaagacaggagtttatctatcggaagaacatgaatctctaacagctccatacttctttcactactcaaatggcattgggctgagtaagtaaccatatcacctctcttcttagtaaaaagccctatgtgaaaagatcccaagatggagaggaagaaacgctaattcagcatgtgttcattctgcattgagaaggaactgatacatctgatgcatgctttgagaccagaagaaaagacttacctgaataattactacattagggaagctactgtctacgttaagataaagggtattgccttggctctatttggcatggatggagcccagttggaaaattcccaaatattacaacaagtccttgaacccaggccatgtggttagacgttggtgttaaggttagaccttatgttagagtcatttctgatgttccagcttctagccatgtagtgctctcagtcttcataccccagaaattattggtatatttgtagataccgagaatgatccctcagtctgagaggttagaatgatcatctgtaatctgagggttaatttctaggcaggtggagagagtggtaaaaaagaaatgaaattgacaagctaggaaagaggaggcagaaagatttggaaaattcacagagtttcacccttaagctgtagagagtgggtcacatttgttagccacggaaacatagaaacatacacaaggccagaaaaagaagaaggagctcaactaaaagtggcatagagaatacacatataaaaacaatatatttgtcatatgctcctagagaggagaaaggggtgattgaaagaaaaaaaaatacttaaatatttgtaattgtgaggggtttcttttggaaataattacttttgaaccatgtatgtggtatgtatattttcagtgggttaattataccccatgatacctattaaaggaaaaccagtgggtctggtggtgctggtcttttcctccccattcctacaatttctatgtggcccaagtcattcctaatcttggtctctatagcagtgttctctctgaatgctgagctgaagaaattatacgtacatacacacatacatacatacatacaaatatatgtatatatattctcagctgctgcgggaggtaggtaccatggccattcagcacagccttgatttcctcccaaagtaggtgagctatagtgaagaataggtgcaaacaaacaagcttacttccattgcaaaatagaagaagaggaagttagagataattctgatcaatcattttggaggctttgttataaggcaacccccggtatatcatggaatttccattgacatttgaatttggacttggatcttccyttggtcccattagctgaggtttagtaatctaaagtccctatagtatatgattataatgctattttaaaawatatatatataaaatatttttttctttttaaaatagacactatagttttacccataagtaatatttaaagattatagctcccaaaagaatggaccaaccactttcgtatcataatttctttttggtaaatatgagactattatgaaatcatagtatatgattgtatttaaaggtacaatcaaaggatcttttgtccattccattaataactgaataaaaaataaataaaatggatagaaaaaaactaaagttgaaaatacattcttaaactagttgtctgaawtgagaaaagagtgagaactaggtgtgcaagaaccaaacgtattttattttattttttaaatgggagcaacatatcagtcgtgtcaccagctggtatattgtgtaaatattaaagctccattgggactgatttttcatggcaacatcagctttctaatgttctaaattctataaaaaccacccacaaagaaacaaagcaaatttcattatctaatgagttgctggaaaatcatattgagaataattatttcagattcctcagttgttaacttctacattcaaggcttatctctgcccccattgatttttaacctcaaaatggtgttgagatttacgtggaaccctaaagcagtaaaataaaaaacctggttgcagcacattcacactgttgtccttaaaattccccttttttctctatgtacgataaagtaacagtatgtcagataagccggtggggggatgagattaggctgaggcagtgctagtcaactggggaaaaggatgatggaaaaatcacccagttgtgctatatttttaaagaaggaggtcgtttatgtgtgcagacaattctccctgaggttagcccaatggagaaatgaagcagaggaaggaaacatagaaagacatgggctatcagggaggaagatgttcaatagaacatgcaagaatttctggaagaaaggctgtggaagggccaatggagaaaatgaatggacaaagctcaggaatcctacgctatgtagaatgtcttggtgttatcagggttaagcctgtaattatgtaacctatttatcgcaacatgaatttttatgatttcttgtgatgtattcttttatgaaattaacaagaactcattattttgaggtagaggaaaatcaatgctttatctgatatgctgagaaattattagattgccaatactcatgtgcgtttcatgtgttttataaggtttgttcctttgaagaattgtagttcttagtcccacagggaaatgtgtatctatttatatatcatagtataaatctatgatatatttatatcatatataaaagtctgagttctctttcttagtccctaatcatgtttctcccataggctgtgtttacatggagctatcggtttagccttttaagcttcattagcttgtctattattgaaatagtttccaagaaattttagatattatcataacatctgggtctactcaaacacttattgtttgaaagacttatgtcttggacctatcaaaaactgactttatttattgcttagtgaaaatactagtgggatcaacaatgattttcttgaatgggcatgaatggagatgcccgcacagtaatgtagaaatgtttcatacagctattaaaatgtaactgacctccttagaggcagattagtaactgttcctactttgtatagctaagtgacagtcacttaacttacatgactttcttttttcacattgggtctctggtcctgtgtcttcacctcatttatagcacgtctccttgatttttggtagtatcaacttcccagtgatctgttcagttaagttcttctcccgttaaccaggaagtgcttattctctcatcacagtgggaagaatagcctattgtctttcattttgcctgagtgtattttactatttgggctctgaaataaaaattatgaaatatggtgaggtcacatgttggtgctgccttgctgcataaaattctagagggcaggttagagacagtatgtatgccttcgggaaaattcaaaggtggattacaaggtgtcctcagcatgccctatggcctatgtgcgaagcaagaagaattgactgatttacaggacttctctttatgtcaatcttaagaggatggatgaatctggacatttgttccacccgacctctgactgatggtttggaaaataactttaattaggatcatatgaccattgaaaaaggaaaaatgtagactctgacttccgtcccactgaaggattaatgaaaacctttactagcatttagagcttttcagaacatccccactgtcatgtgtctcagcagtggagactgcaagtaaggcttttaattttaggaggtttttttttttttttttttyyycctaaatggtatggccaaaagtcagagttaaaatatatatagttagattccaacttcctccttcactctaaaaataraatccaaacccactcttcatatatgcttccaraatggggcttaagtaccaatctctgctttgcaatgggcacaatcttggtcatgtcctgaggctctctaaraaaagagaggatctaggatgggagagctagaaagttgctaactgggaagaacaaggccctgagggsttggtctaccaatctgggaagatttgaaaacaaacttctcgcaactgaaggaaggctgaaggctgctgcaagtcattgagtgactttaggatgagcaaaacattgggccacttcctaatgccctatgtgtatagtaccagaagcaaggtctcagacttaacagacccagctctgttccaaggtgagtctgaaccaatagaaagcaaacatgtgcagatatccaaacaagactgctcatgcaagtcggggctggctacccgtcttaggcagcaacagcagagctccagggagcttattcaatatttactgagacttcgaagacccagcagatgtttaatgaagtcactattttggctcaaaccctccacttctccccctcccctcaaaaagccaacaggtaaacacataaatgaaagaaacccacagaaggggatgggaaataaagaaaattctctcaagacttctccaggcccatgtcactggtcagcgtggtttttatgtgtattaggattgggggatgtgaagaaataagtatccagtactttataaccaaagcaattaaatgatattgggtagggaatgttggccagttttgtttagttttgcatcacattgtcaccagactcactagcccaagtaatcgggcgcccgaagagggagacagagatgtgcagagttgaccagtgtgcggatgataactactgacgaaagagtcatcgactcagttagtggttggatgtagtcacattrgtttgcctctccccatctttgtctccctggcaaggagaatatgcgggacatgatgctaagagycctgggtaaatgtggtgagaatgcacgcgtgcatatgctacacatatgtgcttytcagttgcagaaaatgaactgctttgggagattatcagtagaaagrgtgttatcatattggtgctgagtgctatgtgtgcttatacaatttgttcttgtattttaataaactttgaataaaagaataaagctactctttggttctatttgtttattttaacatttctccctagaacttgccccaggctgggacatattcatggctgacaagggaaagagaatccatcattctaatatttattccttggtatttgtgggcaaagtagccagcaatgccagattattttaatctcatgctgtgtgccagggtcttcaaggaaatcaagacaagtaaaaagaaaatcttcagatactttccatatttatgaacaagttacacacagaattcatagaaaggggcctgtttaagagactgtggagccaacttttacttcgttagatttacatctcaggctttctaagtgcaattaatatactttccaagaaattggttaaaatgacacacacacacacacacacacacatacacacatgtactatatacacacacttctatattatttatgattggcagtgtattaatatgtgatacatttgaacacatttatatcaagcacttttcactatgaggaggtataaaggatatgttctgtggaggcaatggactgttaatgaaaaggaatatgttcataacatggttaaatatgtgcattttttggaaaacaggcaacttaaagtaggagcatctcttgagactctgaacttgctcatgatttcctacacaaaataattttattaatattagcatcttacatactattccagaatttcaaaaggaaatttaaaaaatcattactttgacaactatttgttgagtttctattctttgcagggctctgtgctaggtacaatgtaatgtgtaaaaacaatataaccaaactcataaaaacatcacttcatgccatggtttgaatgccccctctaaaactcatgttgaaatttaattgctgatataatagtactgggaagtggggcctttaaggggcgattaggttatgagggctctcccttcttgaatagattattgccattgtggagggagtgggttagttaatgggagagtgggcttctaataaaaggatgaggttcggcccccgtttctctgttttgtgcactctcgccctctctcaccatgtaatgccttctgccacgttctgacacacagcaagaggctttcaccagatgtggccctgagatcttagacttcccagcttccagaaatgtgaaccaaacaaatttctattgtttaaaaattgcccagtctgtggtattctgttatagcaacagaaaataaactaagacactcccttaaggagcctgttgtggattcattaagaccctgcaagtgaccaagtcaatctaaaaaaaaacaaaaacaaaaacaaaagtggaacttattggctgaaataaccaaactctgcaaatgattgggataaaacttgccttagtaagaactggattcaggaacatagaagccttcagttcttgccaggtcttttgtcttcattcttttttgggtgccagctttttcacccagaccagcttctctgtatgttgggtgatctggctaggggaagcctctgacttacaatttcattataaagtggttcagatgcagtttgaccttattcccagggaagaacttggattggaccaatttgcctaacatgcccactttgttgaatgggggtaggatctgttactagaaaaaggagagcaagaagggctcgaatatatagagacaccagatgttaactcagtggcttttttttttttttttttttaagaaagagactttttattttttaagagcagttttaggttcccagcaactttcagaagaaggtatggagattttccatatacctcctgctccacacaggaataaccctcccctattatcaacatctctcagcagagtgatatatttatcacagttgatgaacctatattgacacatcattatcacccaaagtccatagcttacattaggactgttttatactttctatgagtttggacaaatgtataatgacatgttacccatcattataaaatgaaacaaggtatttttattttcattgccctaaaaatcctctgtgctctgcctcttcctcccttgccactcccagcccctggcaaccactgatctttctattgtctccagggttttatctttccagaatgtcatataggaattgtacagtacctagcctttcagattgacttctttcacttagtaatatgcatttagggattctctgtgccttttcatggcttgatagctcatttccttttagtgctgaataatattccattatctggatataccagattttatttatccatttacctactgaaagacatcttggttgcttccaagttttggtcattatgaataaaactgctattaacatctgtgtgcaggtttctatatagacataggttttcaactcctttgggtaaatattgaagagcatggttacttaattgtatggtaagagcattttaaggttttgtaagacattgccaaactgtcttccaaagtagctgtaccattttgcattcccactggcaatggatcagaattcctgatgttccacatcctcactaacacttggtgttgtcaatgttctggattttggacactctgataggtatgaggtggtatcttttttttttttaattatttcacagtccattccttgtctgtatttgttcttatattcggtttggtttagtcttcatgtctgaaatgatttttactttttttaaaaagataaaatttttattttagaacaatttgagatgtacagagaaattaagaagatagtacagagagttcttataagccccataccaattttcccctattattaatgtattatgttaatttatacacttactatagctaatgggccaataatgatatggtattattatcaactaaagtccataatctatattctaatgtgctttttctgttccagaatccattccaggataccatattacaattaatttgcatttccttgataacatatgatatggagcatcttttcatatgttattttccacttatacatcttctctggtgaggtgtctgttaagatctttggctcatttttgaaactgattgtttgttatcttatcttctgttgagttttaaagagtttgttgtatgttttggataacagtccctaattatatgtgtcttttgaaaatattttctcccaatctgtggcttgtcttctcatttttttgacattgtctttcacagaatagaagtttttcattttaatgaaatctagcttttcaattatttccttcatggatgaggattttggtaacacatctgaaaagttatcaccatacccacgatcatctaggttttctcttatgttatcttctaaaagctttatggttttgtattttacatttagatctataatctactttgagtcaatttttatgaaggctgtaaggtctgtattacagagtgatttgttgacaagattgtattgcctttgctccattgtcaaaggctactagactatatttttgtggatctatttttaggctctctattctgttctattatctttttgtatattccttcatcaatatcacactgtcttgactactgtagctttatggttaagtcttgaggttaggtagtgtcaattctctcagtctgtacttctccctcagtattgtgttggctgttgtgtgtcttttgccctcttataactgttgaatgagtttgttgatatccacaaaataacttgctgggatttttatttgcattgaattgaatctacagatcacattgggaagaactgatatcttgacaatattgagtattcctacccataaacacggaatatctcatttagttattctttgatatttttgtcaaattttatcattttctacatatggaacttatatatatataagttctaaataatttgatgcattttgttttcaatttcaaattccccttgtttatttctggtatatagggaaatgattgacttttgtatatgaaccttctttcctgcaccctttctattaatgtaattgcttgttagtcccggaaggtttttttcaaaaaaagtattattttgtattttctacaaagaccaatcatgtaatatgcatccaaagacagctttattttttccttccaaatctgtataccttttatattcttttttgtcttactgtattagctaggacttctagtacactgttaaaaagaagtggtgagaggggacatttttaccttgtttctgatcattgtaggaaagctttgagtttctcatcaagtatgacgttagctgtagtatttttgtagattctctttaacagattgacaaagttaccttccctcctagtgtactgagtgtttttatcatgacgtggtattggattttgtcaaatgccttttctgtatttattgatatgatcatgtgatttttttagcttgttgatgtgatgaattacatgaattaatttttgaattttggaccagattttagcattgcatacatggaataaactccactcagaatggtgtataattctgcttttacacatggaattcaatttggtaatattttgttgaggatttttgcatctgtgtttatgagagatatggatctgtagtttctttttcttctgatgcctttagtttggtagggtaatgttggcctcataaaatgagttgcaaagtattccctgtacttctatcttctgcaagagattgtagagaattggtataatttcttcttcaaatatttggtagaattcaccagcaaacccatctgaaactggtgctgtcttttttggaagattatttaattgttgactcaatttctttgatagatgtaggaccattcacacagtctattttccttgagttttggcagatggtgtctttcaagaaattggcccatgccatctaggttgtcaaatttgtggtcatatagttatttatactattcctttattatcctgttaatgttcatgtgctctgtagtgatgcccctatctcatttctgattatttgtaatttgtgtcctctctgtttttttcttggttagcctggctagaggcttatcaattttatagatctttttaaaaaaccagcttttcattttattgattttctcttgatttcctgttttcaattttattgatttcttcttcttttcctctccttactctggatttaatttattctttttctagttttgtgaggtgaaaatttattgatttaagatctttgttcttttctaatatatgtattcaatgctataagcacctctctctaagcaccagtttcacatcccacaaattttgataagatgtgttttcactttcatttagttccaaatattttaaaatttctactgaggttttttatttgactcatgttgtttagaagtgagtttaatagccacatattttggcattttctagtcgtctttctgttatttatttcgagtttgattccattgtggtctgagagcagacattgtatgatttctatttttttttttaatgttaaggtgtattttctgaccccagatgtggtctatttggtaaatatttcttggagcttgagacgaatgtatattttgctgttgtttgatgaaggagtctgtagatgtcaattataccagttgaatgatggtgttcctgaattcacctatgccccactgattttctgtctactgaatctgtccacttatgataaagggggtttgaagtgttcagctatgatagtggattcacctatttctccttgcagtttttttgttttgttttgttttttgtttgtttgaaacggagtttcactgttgtcacccaggccggagtgcaatggcactatctcggctcagtgtgacctctgcctcccaggttcaagcgattctcctgcctcagtctcccaagtttctgggattacaggcacccgcgaccacacccagctagtttttgtatttttagtagagacggggtttcaccatgttggccaggctggtctggaactcctgacctcaaatg

SEQ ID NO: 94878 - DNA, 47615 bp, Homo sapiens
aaccaggatttccaactagagtacaatgaatggaacaaaaaaatattttttttgtcatattttattttgttttaccaacatcaaagccgccttttatttaaatctaagatctattctttgcaggtcctattttatttatggaccaataaaaatctattcatttttttgcaaggaactttttatttaaatgctcttgaaaaaattgaagttttcaaacttacagaaaatatttcatgtccataatacatgtgcccaacttttctattcaactatataaaattccattgcatcagtgacttaatatctaatcaatcccagtgatgaacatttaagtttcttcttcttacttgacattaaataatgctgctttggaatattcttgaccacacatttctgtaggataaattcttagaaaagtaaccgctagatcaaagcaaatataaattcttaactttggtattttgccaactacacaacagaactgaaggtaccagttgaacttctcaacaacttgagtgccagattccctacaccttcaccggcactatatataactaatctgttagtctttgggagtcaagtaacattaaaccaagaattaagaatttaagttcctttatgttgttattttaccacagcccttacagtgctgcaaggaaaaaagggtttcagtgaagtgtgtgtgaactctatgtactcacatcacaccctaaaaaagcccacagaaaaatacagcccaggataaatttataggctgatttctaaaccctcacaagaaagcaaaggaaatgtaattaatataaaaatattgttttattagttataaatctaaaaaagaaaatggtactcaatgaagataaaacttaaaatatcctctgccaattattagaaatctcaagtccttattagaatactgtagtaggcagaattctaagatgggccccatgatctccatgcattccccatgttacaccctatataatctcctcccctccttgggtgtaggagaaacctgacttgcttctaaccaaaagaatacagcaaaagtaatgggatgtcactcctgtgattatgttctgtataagatgccatcttaagcagactggagaagcccttgctggctttaaagaagcaagctgccatattgtaagacagcctacagataaactaggtaacaaggaactgcagggagttcctaggtgagagcagctcccaactcagagccaaaggtcaacaagaaaacagacctcagtcctacaattaaagatgaattatggccgggcatgaaggctcacacctgtaatcccagcattttgggaagcccaggcgggcgggtcacttgaggtcaggagttcgagaccagcctggccaacatagcgaaactccatctctactaaaaatacaaaaaattagccgagcgtagtggcgggcgcctgtagtcccagctactcaggaggctgaggcaggagaatggcgtgaacccaggaggcagagcttgtggtgagccgagatcgcgccactgcactccagcctaggccacagagtgagactccgtctcaaaaaaaaaaaaaaaaaaattagccggtcgtggtggcgcatgcctgtagtcccagctactcaggaggctgaggcaggagaatggcttgaacccaggaggcagaggttgcagtaagctgagactgcaccactgcaactccagcttaggcaagggagaaagactccatctcaaaaaaaaaaaaaaaaggaattttgccaaccacatgagggagcttgcaagtcagtctttttccccagttgaccctttgatgagacacaccacagccccagctgacacctggaatatatagctatgtgagatcctaaggagaggacccagctaaactgtgctcagctgtgagagatgtgttgtttttgagccattatgcttgtggtattttgttatacaacaataaaaaaactaacacaaatacctatgataaagctttttcactttttaatcaagtatcactcaaaatgtaatcaataaagactgtaggccgggcacagtggctcacgcctgtaatcccagcactttgggaggccaatgcaggaggattgcttgaagccaggagttcaagatcagcctgggcaacatggcaagacccccatctccacaaaaataagccagcacagtggctcacacctgtaatctcaacattttgggaggccgaggtgtgcggatagcttgagcccaggagttcgacgagaccagcataagcaacatggcgaaaccccatctctacaaaaaatacaaaaattacccaggtgtggtggtgcatgcctgtagtcccagctactcaggaggctgaggtgggaggatcacctaagcctgggaggcagaggttgcagtgagccatgactgcatcactgcactccacctggggtgacagaacaagaccctgtctcttaaagaaaatgaaaattaaaaaaattttccagtctggacagtatggcgaaaccctgtctccactaaaaaataccaaaaaagttagctgggcatggtggcacatgtctatagtcccagctactcaggaggccaaggcaggaagatcacttaagcctgggaggcagaggctgcagtgagatcaggccactgcacccctgcagggggacagagcgagaccctgttgcaagataagaattttttaaaacactttaagcttttttttcaacaatttttgtgagtgtatagtaggtgtatatatttatttgggtatatatttatatatatttatatattattaggtgtatatatttatatatttatatatataaatatgtatatttattatggagtacatgagatgttttgatataggcatgcaatgtaaattaagcacatcatggagcatggggtatctatcccctcaagcatttatcctttgacttatggggtatccatcccctcaggcatttatcctttgagttacaaataatccaattacactctgagttattttaaaatgtacaattattattgaccatagtcaccctgttgtactatcaaataggtcttattcattctattttttttgtacccattagccatccccacctcccacctacttttccttaatacttacaaaaggtaaaatgcaccttctgacatggccgaactgtgcaaagtgttctttcagctgacctgtgtggcagaagaaaacattaaaagtagttactatattttggattctctatcttagactgtagaaagacagggtcaccagatttcttgtggacaggaactactttgcatttccttaaaggcttaagatttaggaagcagctatggtactgactataaagccataatgtaccagacttggtggtgagatggacagagaagttgttgagttggctgcagtctccatcctcagcaaatatcgagtgttttcataccagttactgtgctatgtggactatgatccctgtgagcagatcacaatgaagaaaaagacaaattacaatccagtgygtttcccggtatactgaagatttccaaataaaatcccaacttactggtctttcacaatttagtaaaatgtgttgagttgccctcacctacccttcctgccttatttcccactgctagcccctagttactctctagtacaactaattgaattatctttatctgtcctgcgggttaccctctttgcatatgttgttctctcccctccatatgttggtaatcctatctccccctggctaacttgtaacactataactatccttcaagacccaaaccaagtacatccactgagtattactttattgggctcctatcacagtacaagacaatgtaccagccctgtgagacttcaaagatttagagtatataatcttaaagactaaaaactacacgatctgtttctcttctgaactacagtgcttgtacttcactgatttactttttataatatctatttagttctcctagttcaccaaaacctcactggttcaacaattgcctatatttgttctaagtctcttcatccccaccactaattgtaagctccctcagcatataaaccactatgtttacagtgaccaataaacagcagggcctcaatattggctaaatgaataagtaaaagtccactaatccttccaacaatccacagagactaaattttgaagggctctaatggttaagtcaaaccaactggcaagatcaaggtctcacagaatatgatactggagaacaaaataatgttaaacatatgttttataccagataattaaagtcctagaagacactgatttcaaaacaaaccagctctggaaggtaaccctcttcctaaattgcctaaaatggtgaaggaaaaacagctgcaagcaccaagaacaatgcctaccacagaatagatactcaaataaatatttgctgaatcaatggaacaacaaagagaaactgtttcgaagctgtacataatgctgactctttttaagggttttaaactagccctttattgtctggaaacttgcatccgcaagatgctaatgaaactcctcagcctttccataaagtttcacagggactacgggagactttactgggcttggtcttcaccaaccacatgtttaaaacatggggcacaaaccaacctatttcccattctactactcacatctgagccactaaaaacttagaagaaactaaatcttgctccattttgtttccaggggttgacctgaaacatgaatatctacaaaaagagtgaccacgaatgtttacatgttggtaagcaaatataaaaacctcatctcaaaactgcagctgacaaaaattgaaggtggtgaaagatttcagaactaattattccaacctttatctgtagactaggcctctcccgtaagtttcaattttagttaccgtgaaaataactatcatttgctgagtacttacactgtatctaacacaagtctaagaagtttgcatataaactcaatcctctcaacaatcctatgagttgggtattattgactccattttatcgatgagtaaactgaggcccagttgtgagcccttttcccatactaacttcagttattcaagtgataacaacgattaaatggccaagttggaattctaaccccaacggtctagcttcggagtccacttctcagccacaatgatatacaacctttgtccaattgcctgacggaaacctcacaagtttctcaaagtcaacacattcaaactttactcatcttctcttggcctgctcctaacttctaaacaaacaattcaccaatgctaaaaacccagaaatcatttctccctttcctttattccgtacacttctcccacttaagccatcacgaaacggcatctaatttgcttttaaaacattaatgcatctgaccaccatccttctaccatcgccctaattcaggtcctcacgttttaagtaaattaatgaaattgccttttagctcctctgcacgcctacaatcttgccaccttgaatccatcctccacactacagtcaaaattatcccttctaaattgtaaatcttggttaccaagtaataaatctttacaccaaatcactcctaaaggcaagagccggtgcattcgtgaccccaaaagctcaagggacatccctaaacggttaactgcaaacaaaatttctttctgctcacttgcatgctcaggagcagtctcctaattcagccaccacgctgacttaagtaccctgcaaaaagcagaagctttgaggatcacttggacctaaaaattccactactcccacatctccatcactcactcgacgccgcagtccaaggaattcttctcacaaaagcaaccggctgattgatacttctacgcagcgccgcagcacctcgcgctgctgaggccgccatcttcagactaaagcaccttctcgagccgaggtcgcggccccggaaaaaatttccggatccggaacacgagagaatctgcttccggatcagagggtataggccgcgagatggggaagatggcagcggccgtgggctctgtggcgactctggcgactgagcccggggaggacgcctttcggaaacttttccgcttctaccgtcagagccggcccgggaccgcagacctggaaggggtcatcgacttctcggcggcccacgcagcccgtggcaagggtcctggtgcccaaaaggtacagagagaggagtggcgcgcgtctctccatcgctttgccccgcgtcttggagggacttasgtgtcttcttcgcctcttttcacctccagaccgattgttattgaacgattcctgacctcctttggctgcagagtcgaactccccactaaccgtcacacttagcaataaarcgttgagatgcctgtttctttaggcggccattcctggcgggggcgctcagtcaaaagagcctgggaatccgtgtttatttcttactgtaactgtctcctcacatttctgtttgggtttttgtaaaaccccatagaacgtctttgtagacggtagggtagacttctgcagcttaaaaaaaaccactcccgaggaatcccagaactgacaggsatgcggcgctgtttgttaagccactgtgcgtaaaactagtccctgtcttctcctctggctcttttagaaggaggtcattgaaggattctgagaatccctccgtgttgaaaataaatggcaaacaagtatatatggaatacaggcaccgttctctctctcaacttttccccatggagattaagaaggggaacacagtccgggagcggtggctcaagcctgtaatcccgcacttcggaggccgaggcgggtggatcgcttgaacccaggggttcgagaccagcctggggcatggcaagacccccgtttccgccaaaaatacaaaaaattagccagtctcataacctgttctcaagtaaatagattttttaaaaattatttttttaagggaacataacaggcaagagggaaaacggggaaccaaaactgtagtccaatttatattttctttctttacaatccactttaacgttgaggatatgcagtcccttaatttgctcttggtgttgtccacagatgtctagatgaggcattctttccaagcttcctaacagctctgataaaattgggatgctacagtattaagtgttaatgattgcatacttgagctcagcttttcagcaccttcatttgttagggaaaaaaagtggtcttagagttgtcaaaatacagaaagtccacaccccaataataatatactttttctctccagagcgcttcagactctcattcagctccttttacctacattttaccgtaatatgtacatgctttttagaatgtcagccatcagggaatgagccattatgtgtctagtacaggacctaaaacagtactaagtacagtatgtgttgagtacatgaaagcttgggtgtttagttcctcagctcaaagcagattaaagtagtaattaagagaagttactattacaagccagctgatgagactggtggggaaagtggtggttaacagtctggcaagggaggaaagagaaaaccttttataaaagctcagtggtgtcgttcagtttagcatatgatagaataggtccactaacatcacctctgagagtgtgttgaattatagtgcagtattaagtatggcctatkaaagaaatcatgacaaaatgcttaaaagtgttttaccagtgcctaggtacctggaaaactcagctgatagtactgtcagagggtttcatatagcccttttattatagagactggttatacatcagcaaacttttggtattttgtccaggaatctccacacttggagaagttgataagataaaagatcattctctttcaaagagaatgtttcatatatatatatatrwgtgtgtgtatatatgtgtgtgtatatataatatatatacttttttttactgagacagcgtctcactgtgtcacccaggctgaagtgcagtggcgtgatcttggctcactgcaacctccatctcctaggttcaaatgattcttctgcttcagcctcccaagtagctgggactacaggcacgcgccaccatgcctggctaatttttgtatttttagtagagacggggtttcgccatgttggccagtctggacccaaactcctgacctcaggtgatctacctgccttggcttcccaaagtgttggaattacaggtgtgagccaccgctcggcctgtttcatatattttaaggcaaggcagaccctaggtttactattcagggaagaataaaggttttttcctttaatgttttgacttcaatgactgcatagtgggtctcttaaccaatgtaatgagccatccattagatactcacatacaaagaaaacttcagcccctgaaatactaaattcatttctaagtaattaacagaagcagaagttgtagcgtcagttggacatttcatctagaagagggcaaacaggattttttagcttttacttttagcagacaggattcccagtgtctcactgcaacattttttctgtctgtttacagcactctcttttcattctctttttttttttttttttttcttagacggagtcttgctctgttcctaggctggagtacagtggcacaatctcagctcactgcaactttcacctcccaggttgaagcaattctggtgccccagcctctcgtagctgggatttcaggcgcccgccactacacccaactaatttttgtatttttagtagagacggggtttcaccatgttggccaggttggtctcggactcctgacctcgtgatccgcctgcctcagcctcccaaagtgctgggattacaggcgtgagccactgcgaccggccttctcttttcattttctcaccctgtccagcttggtgttccttatagctctgtttaaataccaactctatacaagtgtctcaaaagcattactgttagccctaactgaagtaaatagctttgtgactcaagatatttcagtacaccaagcacctttcatgattcagccccataagaagttggaaaggtatgatgtcataggaaaaagtagttttgaaagccaaaattagcctgcttaagttttcttattaccattttgccttaattttgggtgactctactgttactatatagatgagaaactgaggctctaagacattaaatgactcatctaaaatgcccagatcaagtaagcagtacagctaagattaaccccagagttaatactccttgctttggccaggcacagtggcatatacctctaatcccattgctttgggaggccaacacaggaggatcacttgagttcaggagcttgaggctgcagtgaactatgatcatgcctctgcactcgcctgagcaatagagcaaggttctgtatcttaaacaagaatcctagctttgcctcatacaagaaatgtctttggaggtttgaggttcccggggttgacctgcaaaatagatttagtcctttaacttctgtttccttcctgccaggtgatcaaatctcagctaaatgtgtcttctgtcagtgagcagaatgcatatagagcaggtcttcagcccgtcagcaagtggcaagcctatggactcaaaggctatcctggtgagtgtaactgacctcagagaaggcaatatcactcaatcatttatgtcttcatgtcttcaaagaaggtactgtgtgtgagcaagtaaatagacaaaggatacacataataaacagataaatgtttcatttccaaacccattctagactgtaccttgtctaagacgtccgttttgaaaggatagaacaggagtcagcagtgcctgcaaatgtggctgaaagtggcatgaccattgaaaaaataaggacattgcctctgggctccctgccacaactctgaacatctgatttggcagaagtgctgtgaagaataatttatcattatcattgtaataaatgtcataatagttatgaataattcataattgtccctctagtcacattctcaaatggcataacaacttaaaacttgttgctatcaaggctgaacatatttaataaagaattacaattaatgacatcaaaagtcctcgccaggcgtggtggctcatgcctgtaatcccagaactttgagatgccaaggtgggtggatcacctgaggtcaggaggtcaagacgagcctggccaacatggtgaaatcccgtctctactaaaaatacaaaaattagctgggcatggtggtgcgtgcctgtaatcccagctacttgggaggctgagacaggagaatcgcttgaacccaggaggtggaggtttcagtgagccaagatcgcgccattgcactccagcctaggcaataagggggaaactctgtctcaaaaaaaaaaaaaaaaaaaaagctggacgcagtagctcacgcctgtaatcccaacactttgggaggccgaggcgggcggatcacgaggtcaggagattgagaccatcctggctaacaaggtgaaaccccatctctactgaaaatacaaaaacaaaattagccgggcatggtggcgggcccctgtagtcccagctactcggcaggctgaggtgggagaatggcatgatcccgggaggcagagcttgttgagccgagattgtgccactgcactccagcctgggcaatagagcaagactccatctcaaaaaaaaaaaaaagaaagtcctaatagggaccaggcgaggtgtctcacacctataatcccaacactttagaaggccaaggtgggaggatcatttgagcccaggaatttgcgaccagcccgggtaacatagtaagaccctgtctctacaaaacaaaatttttttttcccagacagtctcactctgtcgcccaggctggagtacagtggcacaatctcagctcactgcaacctccgcctgccaggttcaagtgattcttctgcctcccgagtagctgagactacaggtatatgccaccacgcccagctaatttttgtatttttagtagagacagggtttcatgttggccaagctggtttcgaactcctgacatcaagtgatccacccgcctcggtctcccagagtgctaggattacaggcgtgagacacctcacctggccaaaaaaaatgtttttaattagccaagtgtggtggcatgcctctgtagtctcagctactcaggagactgaggtaggaggattgcttggggtgcagtgagccgagatcgtgccactgcactccagcctgggtgacaaaatgagacccatctcattttgcagaatagattcgtctgcaattttaaatttagtaatgttaggtagctgcttttacagagaatgaaattaagaaaataatgaagaataggtaatgttattaaccttttttctaggctcctggggccattgtaaaagttaacattgcacttgtgatttcaaatatgggttaaaagtaagagaaatctttaaaaagaaatgttagttttcattgtgccaatggccaggactctatggtacagctcttaatacgttatgaccaccgaaatacttgttaatagcttgggaagatataacagcctggctcctcttgagtttgggtaaatgtagagcatgcatcaccaatagtcttgttcttggaggccgctcctcacctttcaactctagcacttatttttatttatttatttatttattttgagacagagtcttgctctgtcgcctaggctggagtgcagtggtgtgatctccgctcactgcagcctctgcctcccaggttcaagcaattctcctctctcagcctcccaagtagctgggactacaggcacccgccaccacgcccagctaacttttttgtgtttttagtagagatggggtttcaccatgttggtcaggctggtcttgaactcctgacctcaggtgatccacctgccttgacctcccagagtgctgggattacaggcgtgagccaccacgcccggcctctagtacctatttttaaggccatgattctctgttgctctaggctttctccccttaacagattgttcatgccacaaacttaaccccacttgagttttaaattgtctaaactgctgtacttgctttctgaggctttctaggatttactgcttaattaagccacatcttttgggtgggtgtcccattatatccttggagagtttattctgtctctcttgccattataagctgtgtttattttatttatttattttttacttactttcccctataagctgtatttaatagaaatataatgtccaaaatacaggagagaacagtctcttcttactctgagttgatcaaaaggattgtgtttacttctggatctgacttaatctgaaggaagctgagtatactacaacctgtcctcacacttgtgtgaggacacatcctcttgaacaagaggataataggcctggaaaccagaaacagaatctagggaagaaaagacttatgggggaacttgacagcattaaacattgaaaaattgtcctgcacaagaagtggtgggaagcagtgcacaccagtggttaaggcgtaggttctggtgccaggttacctgggttcatatcctggctctgccatctactaactgtaagactttgggcaagtttttaaattctcttgccctcagtttcatcatatgtaaaatgtatataaaaatagtacctacttcataaggttcttatgaggattaaatgttaatgtatatgttaactgcttagatcagtgcatttatcaagcacttaaaaatgatttggggttgctctaggtgtcagaacccaagaccaatgactgaaaattatagagaggcagattttttttttaatctggagaacatgtagatgcaagatgggcagagtttggttttgtttgttttcttgagacagggtctcattctgtcacccagtggggtgcagtagcacaatcacgcttcactgcagccctgacctcccaggcttaaaggttcctcccacctcagcctgcctagtagctgggaccattggcttgcaccaccatgtccagctaattttttttttatttattttttgtagagatggggtcccactatgttgctcaggctagtctggaactcctggactcaagtgatccccctgcctcggcctcccagagtgctgggattacagacctgaaccactgtgcctggctaggaggcagattttaacccactaaaaagaagacaacagttgtctaaaatggactgcctaaagagatgttaaatttcctgtcaccattcaagcttggactaaaccagaagtattattcctttagtctaatatgtttgggaatattataatattctttatttcgtgaaattgtggtgatagcaggtggtaggttgtyggggggtttcctatctttttccataatattgatgatcctatcattctcccaaactatttggagaattttactgataaatgaaacataaaatccaaatgtattttggagctactttagaagacatatgaaaaatcagattactggtaaactttgtctgtatgaggtttccttgatgccaaaagctcattgactttggtcattaggtttactttggagtatatgctattgataatattaaatggtggaacaggattaatcaactgcaatgaggaacctgtccacattgaatatctctaagctatctagtttttttctatatctgcaagaatctagacatagaattttaagtgcttttagtaagatttagtacagtagaggaatcttcaggttatttcctgtgtatttctacgatggcataacctcctttcagctgaaccatatgtggttttaaatctctttgaaattctgatagtggaccattgatgatattgttcagagatttgtttggttagagcctagtatttatttatttatttttatttatttatttattttttgagacagagtcttgcttgtcgcccaggctggagtgcagtggtgtgatctctgctcactgcaagctccacctcccgggttcatgccattctcctgcctcagcctcccaagtagctgagactacaggcgcccgccaccacgcccggctaattttttgtattttttagtagagacggggtttcattgtgttagccaggatggtcttgatctcctgacctcgtgatccgccctccttgcctcccaaagtgctgggattacaggcatgagccaccgcgcccagccagaacctaatatttataatgcaaagagcataggtttgttgcttatgtgggcttactggttttgcttgttccatggccacaaatccaactctgtttgtcgtatcccagattgtttgtttgtcttatctcaaatgtgtgctagccttgtgatgggccaggagagagggatgaatcagtgaagccatgttacccctctgaaattctgttctcttatctgcaaaactggattaataacttcctcatagagttactgaagattaatgagatagcataaggttgctggcacagtgtctgacacttgtaggcatctagttatttttagcagctactataattaatgacttaggaataaacttacttattgttaattgctgttattaaactttatcattattccattaatttatgactaaattatatgccaaagagaaaagaggaaaagtagttaagtaataacaaagttgtttctgttttaggctctcggctcagtgtctttactgtctgctttccatagtaattctccctaaggatatttccataaaatgtgtcgttattgctaatagtctacgccaggacttggcaaactgcagttttattgtaaatacattttattggaatacagccacacctttttgtttacttactatgtatggctgctttctggctacagtgacagaattgagtgctaaagagaccgaataagggcaagcgcagtggctcaggcctgtaatcccagcactttgggaggccgaggcgggcagatcagttgaggccaggagttcaagaccagcctggccaacatggcaaaatgccgtctctactaaaaaataaaaatagaaaataaattaaaatacaaaaattagccaggcatggtagtccaagcctgtaatctcatctactcaggaggctgaggcagaagaatcgcttgaaccagggaggtggaggtggcagtgagccaagattgtgcctgggtgacagagcaagactctgtctcaaaaaaataaaaataaagagaccaaataactgtcgaagcctagtctttactatctagttcttgacagaaaacatttgctgacctctggtctagactagatctggagttcaaccaggaactgaagaagaccttcaaattattgccagcatttaattcagaaatccttaagctttagtctgttcatctgtttttaaaatycttttgcaaggggaacattacactaatatatgatgcttggcttttatatcattgcttggattccttcttgttcctcaggacctgtccaaccatgctcacttttgttgagatgaccttgctatttatcttattgggaaaactgagtccctcaggcacaaaccctttgagccttcaatgcccccaacacttataagcaaatgttctcatttccaccatccagtcgtagaggaggagttcctttagttcaaagccagtctctctaccctcttgatccatctcaccttcttaaacctcttccagctttcaagaccttgctctatttctttcctctcttctgtttccaagtggctcttccctgttggctctttcttcacaatctgtaagcatacttaggtcttgccagtccttaaaaaccaaaaactaccctcttaactctatttttctgtgactatgcctaagctttwattttctttcatagctggtcttacaaaaaggagtttaacttgtctttattgccccctctccagacaaggttttttatcactttatctctaattctttttttttcttttgaggcagtctgtttttgtcacccaggctggagtacagtggtgcagtcttggctcactgcaacctgtgcctcctgggttcaagcgatcctcccaccttagcctcccaaatagctgggactacctgcgtatgccaccacgcctggctaatttttgtattttttgtagagacagggtttcaccatgctgcccaggctggtctcgaattcctgagctcaagtgatctgcctgccttggcctttcaagtgctaggattacaggcatcggccaggccaccatgcccggcttctaattctttttttttttttttttttttattacagcaaatgattttatttgtaatttctaccccactcagtgcctcctcccaaaaaacctgcacatgaatttacaaacctattaacgtataaataatgagaaacatcctggccagagtctcccggttgtctttgctggagattaagactggaggggacgctatcttcatacacacttccagtgacatygagagtcacttggtggctgttctgggcccacagctggctttttcaacacctccaagttcaaccaccagtctgtctgctgtgtccaaggtagagcccagggactgcgagcatgtgcagctccattgcccrtcattgctccagctgaggtcatgctggaaggggtgcttcctctcctgacagtgcttcatggtggccagcccgctcctgctggcactcagagcctcagtactgggccacctggcagcacccacagattttgaactcctggagctacttctcaatcactgtgcaggaagggtaatgctgctatagtaggtgtaagaattcaactcttccaccacgtctccattggtgttacagtaccaggtcacagttaggacaggtcactgctcttctttggggtccatgggaagctgctgaattgcaarccagtacaagctttgctacctcttctggaggtctctttggctttgggccaccagccccacagcaccagctacaggttgtccaggcaattgtctcagtcagggcattgagacgtaccgcctggaacccaggggtcatgcctcttctgtgctcccacagcaactcatgaaggagtcttcccaatcctcttcctcagtgcttgtcaaaagcatacctgaatatcttagtaccatttctatctgcatctacttccatttggacctcagaggagtatccctccaccagcaggatatctttgctcatctrtcagcgtatttggtctttatctgactgcatactgcctatactactctctcctaccagaagctacagccactggtgacaggaacagagctctcatgagggtaaagtccctggctagtacagctacacaggtagctccctcgcagccaatgagctgagccatgtgatgtccaatttgaagtcagtcacagccaggcctatgctctcagccagcagtgccactcccatgggagacaggggtgctggggcaaggccagggctagggtcaggccaggcaggccccaggtaggacaagaccaggcccggctcaccttgttcatgccagacctcccaggcactgacctctaattcttaagaaagtgcctagtacagaccagcctggccaatatggtgaaaccccgtctctactgaaaataaaaaaaattagctgggtacagtggcaggcacctgtaatcacagctacttgggagactgaggcaggagaatcacttgaacccgggaggcagaggttgcagagaagcaggatcacaccactgttctccagcctgggcaacaggatgagagagacccccatctcaaaaaaagaaagaaagaaagtgcctggcacatattgtgtgtttgatgaatgaatgaatctttaccatgcgtaggattccagttaaatattattatttatcttttgtttttgagacagagtctggctctgtcgcccaggctggagtgcagtgacgtgatcttggctcactacaacctccacctcctgggttcaagtgattctcctgcctcagcctcctgagtagctgggattacaggtgcgtgccaccacgcccaactaatttttgtattttagtacagacggtttcaccatgttggcgaggctggtctcaaactcctgacctcatgtgatccgcccacctcagcctcccaaagtgctgggattacaggcgagagccaccacgcccggcctattattaatcttttacagagaaaaatgaggttaggttgctgtcaaggtcacaaagatctttaacacacatgctgtaattgtttacaaacactgagataatacagagacactaactgcaggaatttgcaaacactgagatattacagagacagtaactgcaggaagcaactgtcacccctgcagctgagaagaacaacaaaagagcttgggattactacattgagaagcttggaaaagggactacatggaactggggcttagacttctgaggagaggacataatgaggctgattctagtgatgtggaaaagctacattagaaccaacttccgccctccagtcttccattagtgacccttataggcacaggttagcagacagccagctggcaaataagaaatgtagctggcagggtctcagccccatattatgaagctaagtatagaagagtggatttgaaactgagagaaaatagaccaataatgagcacgccattcattagacgatgactttcaaatctatgttttagctaaaattcattataagatttcgtgtaatcatgcctgtaataaatgaaatagggaggtaaagaagtctcggatgactctaagtgtcaagacctgataaaaattagaggtgtacttttaccrcttccaattctaaagtttgctttgggataacagttgttgtggaatatttatttctcttgagaatacccagaaagccagacacatttgcataggggtagatgtctaatgttcatcaaaacctacctgttcattaasttgaagcatgaccaaaaaaayatggggagtaaataacaaaatagtgagtataaagatgtcaaaattatttgaataactgatggagaatttccccctcttctttttttcccacccatcttttgtatagggtttatttttatcccaaaccccttcctcccaggttaccagtggcactgggtgaaacagtgccttaagttatattcccagaaacctaatgtatgtaacctggacaaacacatgtctaaagaagagacccaagatctgtgggaacagagcaaagagttcctgaggtaagtcttgtcaatcagaatgaagtgttaatactcagctcagatcatcacaggtctttgaaggaactgttctataacaatgcagtaaamgtgactggctgggtttttttttcccttcattgtttccaagcaaaaacagcacaattgtattctttccccaggaacatttggacagatgctttgacagttatagtaaattgagatccattttaaagacttgcttatcatagcttagataattgagttcatcctcattaatcatcacatgatccatttccattagcttcagccatttttttctacttaaagtgagttcctttgaaggcttttggtatcctaggaaaggtaacatcgaaagctctttgcttctaccctcctagatggattcagtggtactagccgttttatgataggtcagttgttcctgatgagaataactaatattttcaccttcatgcttcaacattcattcattcattccacaaatacttaatgagggtcagtagtgtgtcaggcatgatgctaggcattggacacagaaagataaaggcaccctccctgcactcagtagtgcatagtctctggcaagaatgcattacctatgagaataattactgtagagctcagaaagtgttatgatgcggtttagaaaaatactgtgggagcatagaggaggaaataattattccaggcagggtagaagtgtgaacgaagaaaaaatgattttttgtttgtttgttttttgttttttgagacagagtctcactctgtcacccaggctggagtgcagtggcgcgatctcagctcactgcaacctctgcctcctggattaaaacgattctcctgcctcagtctcctgagtagctgggattacaggcatccaccaccacgccccaccaatttttgtatttttagtagagatggggtttcgccatgttggccaggctggtctcaattcctgacctcaagtgatccccctgcctcagattcccaaagtgctgagactacaggcgtgagccaccaagcccggcctgaaaaaatgatttttttattgggttatcctcctttcactgtccatttgaactaatcttcaaaaatgagtaggggtttaccagtcagaaaagtaaaaagtctctactgagtagagaaagcagcctgagcaaagatacaatatttaagacagaataaatcgtcctgcgagacaagagcataggatgtgtactttcttacgtttattcagttgttatctattgagtttctgctatgtgtcagacactgtgctttagtgttagagattcaaaggcagataaaaaacagttcctgtcttcaagaaatttgtactttagttatgttcaaaaacctacaaacagataattagatacaatttgggtctgggcttggtggctcatgcctgtaatctcaacactttgggaggccaaggtgagaagaacacttgaggcctggagttaccagcctgggcaacatagcaagaccccatctctatgaaaaaaaaatttttttttttttttttgagacggagtttcgctcttgttgcccaggctggagtgcaatggcatgatcttggcccactgcaacctccacctccygggttcaagcaattctcctgcctcagcctccagagtagctgggattacaggcaagcgccaccacacccggctaattttgtatttttagtagaggtaggggtttctccatgttgttcaggctggtcttgaactcccgacctcaggtgatctgcccacctcggcctcccaaagtgctgggattacaggtgtaaggcacttcccggccccaaaaaaatttttttttttaattagctgggcatagtggtgtgtgcctgtagtcctagctactcggcaggctgaggagagactgtctctaaaaataaataaattaaataaataaataaataaataaatwcaatttggtaggtgcagggacagacattataagatataatgggaatggtcacttaagtagctaggctggaggtagattatagaaaatgcttcctggaagccatgagtaggtggaattggtaaaacatgaaggaggagaggtggatttgggccagatggtaaaggttttagtgatgtagagcaggggggtccccaatcatggggcagcagacctagacagccaagcattaccacctgagcttcgccccctgtcagatcagcagcagcattagattctcataggagcgcgaaccctgttgtgaactgtacatgcaagggatctaggttgcgcactccttattgagaatctaatgcctgttcatctgagatggaacagttttcatccccaaaccaccccccatccccactccayccatggacaaattctcttccatgaaactggtccccagtgccaaaaaggttgggaaccactaatgtagagcactagttctggagtcagactgactgtgttcagatcccagctccaccacttaatagctgtgtaaccttgagcaagttccttcacctttctgtgtctcataacagttctttccttattgaatagtatgaggattaaacaagataatacgtgagaagtcctttaaagtgcctgttaaaaccattttaccaactttgtgtcccgtttggtgttacgtggccttaattttgtagttttcagaaactgtcatgccgattctaacagagtaaagagaagattttcttaaggggaaaggaaaagtaaaattcagtggttttttttaaaccttggtctataggttatggtatcaacaggagcagtgaggaaaatcctgtccatgagcttttagtagtgtcttcttcgcaactgagagcaggggaaaggaagatcgtggttaagtaaaattagtccaagagaacctactgctattaaaccagcctgtgttttcaagtaattttttttccttctgatatatgactctgcagaaatcccagctgtcttttaagatagctcagatgaatctctgtaataaatcatcctgtaaacaatggtgagataccttttttttggtctaataaattagcagaaataaaaaatttgatggtcgtaccttatgttgtcaagggttggaagaaattgatatgctcaagacattgtactggcagcactgaaaatcgattaaggccaagttttcattgtatcactatgtgatacgtgcttcagtttcctcatgtaagaaatgaaggtattggactggataagccattcaaggtaattgaatcatgggcagtcagggtcatgtggacagtacctggcagctctcccaactttgycagagtctctcagaacaggagagagtctgttgagttcaaaacagttcccctggagattttgattaggtatcataacatcctctgacattgagaaccactgaagtaaaggacctctaagatccttttggttttaattttctagaattctatagtcagggaagaaaaaactttaaataggaaatgaagaagaaatacttgaacttaagcaaaaacaaaaattattyaaaaaaaaatacttgaacttaaggactgttcaaaaaattagagtacctcaattctgttcttttttttccaaagtgaatggcgtagctagagattgttgtaaaagtgtacaagagttatgtgcaggccgggcacggtggctcatgcctgtaatcccagcactttgggaggccgagttggacagatcatctgaggtcaggrgttcgagaccagcctgaccaacatggtgaaaccccgtctctactaaaaatacaaaattagccgggcatggtggcgcatgcctataatcccagctactcaggaggcagaggccggagaatcacttgaacccgggaggcggaggttgcggtgagccgagatcacgccattgcactccagcctgggcaacaagagtgaaactccgtctcaaaaaaaaaaaagagttatgtgtaaacatcttcattgtgacattgtttgtaacagaaaaaaaaaatgcaaaacagcctaagagttcatcaacaggcgaccaggtaaatctaacgtgacatatcccagacatagaatgcagctgctgtgcaaggattaaaaaaactttaaatgcaaccctctagtatatattccagacttcaaagccagaataaattcagtcatttctcaccatctccatcacaactgccttggtctaagctgccatcatttcttatctagagcactgcagtagcctcctaaccagcctcccttcatagcacaaactcaggtgtggttccaagggcccaccttgattaacagtgacactttatcactcaggaaatttcaagggtttagaagttccctgccaggagccagggacaaagaccagtcaaattctttgttgcataacatcatcacatttagaaaaaatccagaattcttaaccatggctgtaaggccaatatgacctggcccacagctacctctctactctcatttcctaccattcctacctcatttccttttcatttgttcttttctgccacattgacctccagtgctatccttaaacacactaggcatgctcaagatttttttttttgtacaggctgttctacctaggaagctcttcccttagatcaacagtgtcttgcttcttgtaagtctttgttctaatatcatcttagaagaaagtcttcacttatcattcagtcaacaagaatctcctacttcccctcattctttatcttcttgctttggtttgtttgtttattgccacttttttttagagatggtgtcttgctatgttgcccaggctgccttgaacttctgggctgaagcagttgccccacctcagccccctgaatagccggaactacaattttctgtctattttttgttttctaaattttttgcttgattttttttttaattaagtgcaacatagttgccaaataacaacttagctttatttgttctgtaaattagcttatgaaatactctatttttatgtatatgaaagcttttttcccactgttaccctcattgtggaagcagaattaatcctctcctctttctacttgactgtttataatgctagtatagcattttttctagtgaattgagttatctacccctgtctccttccattgccttcctctcccatcttgaaaattttgtagccttgattcttaccacagttctttgtatatattagaaggtgctcagtaaatattatttcaattaaattcatattccctctttattagtccaataagaacaatgctaaatttgagaaggatcatttagagactatatagcttttcttcttattttcactaatttattaaataatgtacatttgtgtcttagaaaatatgtgatgctaggatagctatgaagaagaataaaagccagtgagggagggactgttaaaggaggaacccaggtacttaaataaggaatttacaataccaaagcatgtatacttgaatagaagttgcaaggtgctttgggggcacgatataggaaatggctgggagaaagacttcccagaagaagtgagtgtaaactgtatgaaaaaacaaattggaaaaatctgctaggctgagagtggagtagagcatttcagtagagaaaattgtatagtcagaggcacggccatgaaaaacatgagaatagcataccttgtgggaaatgcttggagatgagactagaaaggttagttagagccagaatataaatggctctgcatgtcatctaagagtgtggactttgtcctattaacagtgggtatttatcaggattaataacagatttttcacttcagaaaaataactctggtagtggaggaaattgactgaaaatgcagtggttgcaaaaagcacaattaagaatttagttcaggccaggcgcggtggctcacacctataatcccagcactttgggaggtcaaggtggggggatcacctgaggtcgggagttcaagaccagcctggccaacatggtgaaaccccgtctctactaaaaatacaaaaaatagctgggcatggtggcaggcgcctgtaatcccagctactagggaagctgaggtgagagaatcgcttgaacgtgggagaatcgcttgaacccggcaggtggaggttgcagtgagccaagatcgcaccactctactccagcctgcgcgacagaatgagactctgtctcaaaaaaaaaaaaaaaaaggctgggtgcagtggctcacacctgtaatcccagcactctgggaggctgaggtggacggatcacgaggtcaagagatcaagaccatcctggccaacatggtgaaactctgtctctactaaatctacaaaaattatccggacatggcagcacgcacctctagtcctagctactcaggaggctgaggcagaagaatcccttgaacctgggaggagaggttgcagtgagctgagatcacgccactgcactccagcctggcgacagagcaaaagcagagcaattgagactctgtctcaaaaaaaaaaaaaaaatttagtttaatccatgcaaaagatgataaaggcctcaaaaagatgttgtctacagaacttagttaccaagcaattataaaaagtgagagaaaagaaagttaacaattatctactgatttctacatggcagtgagggtaatactgaggcttgtaatggaaataagtattgaaagaagaaaagaatgagcagagactatccttagtgtagttggggccatactgttttttgaaatgcctgtagggtatccaggtggagatgtccagcatgattttggaaatacagaactgagcttaggagtaactaagggtgagagggacacgaagagaaagagatgagatgaggagttacacgtaaaggccatagtaaagcgctgaaaatagatgtggttttctttcttctcttcttttcacttttctttctcatctatagaaaagaaggctgttggccccaggaagcmtcagcacaggatgaagaaaatagagcaggaaaagacatcaagcagccagaaggatatgaggaaaaacagaagaaatgctgttagaggctaagacaggaaaatgtttcaagaagagaagggccagccatgtcaaataggtctaggatttgacaattaattggtgtaatgaaaactaagaaactagattcagtagtggtgtaaacaaaagtcagattatggtgaggggagagagtgaggaaggcaaatgctgaattttttaaaagtttaattataaagggaaggaaagatagggggtagaaggaggtgaggtataagcagggtagcttgcataagtgacaaagaaaatgtttttattgtctattcttaagtatgtaggagtattaaacatgtttgaaggccaagaggaaaaaacaagttcagaagaggacttgaaagtatgagaagaaacattctattaatggagaaaggcctcagaggctgtgtcagggaaataggatatagtataggtagagaattagctttggaagaaagaagtaggaccacttctgaaaccaggaggatcaggtgaaaatttagagaagtttagtggtgtgggggaggaaagttgaaattgttcactggatcatttgagcaggcttctgttttctcactgacatagaaggaaataagaacaaaactaaggacttgagatgaatggtgaaggtttagaacagaagacggttagataagactgaatatttgcaggatagcaagaggatgttagcagttacagtggcattggatgtccatttgcagtgagtgactgggagtgtcaagttgagaagggagagagaaaactggaagcactcaaacactgaaagaatrgggtggccaggcacagtggcttacgcctgtaatcccagcactttgggaggcaaaggcgggtggatcacaaggtcaagaaatcgagaccatcctggccaatgtggtgaaaccccatctctactaaaaatacaaaaattaactgggcatggcggcacacatttgtagtcccagctacttgcgaggctgaggcaggagaatcacttgaacccaggaggcggaggttgcagtgagccgagatcacgccactgcactccagcctggcgacaaaacgagactctgtctcaaaaaagaaaaaaacaattgctaagagaaatgccaacgcttacataaggcgcttacccatgacataaaccaagcaaactgctgtatgagcacattcaccaggggagaaggtggccaacccacccatccatcatccttctgctagtgcctggagaaggcagcagggagcatagcatgtttcttttttagtgagacccaataattagggtcatgtttgcttgaacacattcttttggataattggataaagatgtattaggtgccaacgtatttcctgcattcttcaaggtgagagttgtattggtactgatccttcttgacctccttttggacaagtcaggtttaaaaagagaacaacccacccccttcagtgattctctcagtattttatgcttaaaaatgatccggaagcatgttaaatggttttggtcttactattcacagtgttcaagaacaaatcttggaatttttgttactcaggaggcccatgattaaccagaagggtccttaaatagtactaagacaagaaatgtttggtgctggccagtcctgctctcaacatattgaaggcagatattaagagttgttgctactttcctttcagaaaatacaaaggcaagaattgaaatcaggttttcagaagagaatataaaatgagggtctaatgcacttacatgggtctaatacgttacaaaaatatrtatgtcattgcccccaaaatggcatagacactcaaagatcacaatttttctttttgttatgaggactgaacttaatgcttttcaatgtaagactcgactctggcttgttttacatccctggaccagtcatcctctataatataacgcaaaaactcaaagcctttttttcccccccgagacagggtctcactctattgcccaggctggagtgcagtggcacaatcttggtctactgcaaccttctcctcccaggctcctgcctcagcctcccgagtagctgggactacaggcgtgcaccaccatgcctggctaattttttgtatttttagtagagacgaggtttcaccatgttgcccaggctggttctccaacttctgagctaaggcaatctgcccacctcggcctcccgaagtgctaggattacaagcgtgagccaccacgcccagctcaaagcctttcttttaatcatacagttagagtccttgtttttttttgtgtttttttttaagacggagtctcactctgtcgcccaggctggagtgcagtggcatgatcttggcccactgcaaccttctgggttcaagcgattcttgtacctcagcttcctgagtagctggaattacaggcacccaccaccatgcctggctagtttttggttttttagtagagacagtgttccaccatgttggccaggctggtcttgaactcctagccttaagagatccgcccatctcagcctcccaaagtgctgggattgcaggcgtgagccaccgctcccagtgagagatgttattttggcttcttaggaaaggaactaaattagaaaaggtatattacaggatgattctattcatgctgtcactataattttgataatttttattgttaataacataaacctgtgtttataaaatgtattctctgttcttgaatattagactaaatcttttggtggaaaagcagtttgttgcggccatatcaaatgtctaaaatactgtcaccttttgaattatttccaaagcagcattattgttatgtttattgtttcagatcagtctgacattgatataatagtatggattcttcataaaatgaggctgggcatggtggctcatgtctgtagtaccgatactttgggaggccaacgcagaaggattgattgaagctagaagttcaagacccacctgggcaacatagagagaccccgtctctacaaaaaaattaaaaattagccaggcatggtagcacacacctgtagttctagctactcaagaggctgaggtggggaggattacttgagcctgcagcaagctgtgactgttaggaggctgaggcaggtggatcacctgaggtccagaattcgaaaccagcctggccaacatggtgaaaccycatctctactaaaaatacaaaattagccgggcgtggtggtgcatgcctgtaatccaagctccttgggaggctgaggcaggagaatcacatgaacctgggaggcggaggttgcagtgagccaagatcgcaccattgcactccagcttgggcaacaaaagcaaaactccgtctaaaaaaaaaagaaaaagaataaagcaatctgttattgagctagaaagaaacagamggtattgtgttttgttttttagtttgggctagaatagtggttttcaaagtgtaattcctggaccagcagcataagtatcatttgggaacttactagaaatgcagttcttaggcccccaccctagacctgctgaataagaatttataggcctggacccagccatgtgagtttcaacaagccttctagatgattctgatgtacactaaagtttgagaaacactcggcaaaaattaagtgggttctgtaattaagacaggttctgtaaaggctttcagtagagctcttaagactgcgcttttcagctggaactgccatcttccagtaatttgcgaaaatgacgaagacaaagggaaagaggagaagtacctgatagatgttttctaggccttttagaaaacggagtttttcctttggccatgtatatgcgcatctgtaagagggatgatattgtcagctggacgcagtggcacatgcctgtaatcccagcactttgggaggctgaggcgtttggatcacctgaggtcagcagttcaagaccagcttgggcaacatggggaaaccctgtctctactaaaaatacaaaaattagccaggcgtggtggtgcatgcctgtaattctagctacttgggaggctgaggcaggagaatcgctggaacttgggaggtggaggctgcggtgagccgagattgcaccactgcactccagcctaggtgacagagcaagactgcatctcaaaaaaaaaggaggatgatgttgtcgacattaagggaatgggaatgggtactgttcaaaaaggaatggcccataaatgtkgccatggcaaaactggaagagtctacagtgttccccagcatgctgttagcattgttgtgaacaagtaagttaagggcaagactcttgccaagagaattaatgtgcgcattgagcacattaagcactctaagagccgagatagcttcctgaaacgtgtagtaaaatgatcagaaaaagaacccaaagagaaaggtacctgagttcaactgaagtgccagcctgccccacccagagaagcacactttgtgagaacaaatgggaaggagcctgagctgctggaacctattctctatggattcatagcataataggtgttaaaatacccctggactgtttgtaaaaaaaaaaaaaaaaaaaaaagactttrcagcttggtgtgatgcctcacttagcactctgggaggtcagggcggaaggattgcttgaggtaaggagttcaagatcatcctggacaacatggtgagactacatctctatatttttcttttttgttttaattaaacaataaaaataggccaggtgcagtggttcacgcctgtaatcccagcactttgggaggccgaggcgggtggaccacctgaggtcaggagttcaagatgagtctagccaacatggtgaaaccccatctctacaaaaaatacaaaaattagccaggcgtggtggtgcattctgtaatcacagctacttgggtggctgaggcaggagaatcacttcaacctgggaggcggaggttgcagtgagccaagatcgtgccattgccctccagcctgggtgacaaaaygagacacagtctccaaaaaataaaatttttgagaagactctttgccatttagatactcagggtgccatctattttgagttctagattccagtcttagatgaccaacttctttcatcttttactaccacttctaccatctctcttttccccctcctcaaaaacgcatagcttcaatattcataagatcatcatcatcatccttttcttcaacagcattttcttgtatcctagagattaccttaaaataaggaattggctacaaagtaataccttggaaagagaaatagaatggatcacctctataaggtgcttatgtaactctggaactacgtttatatttccattaaccacaaagtccacatgagtcatacttatttttctgtctcaggctactaaaatagaacatgttctctagaggagaacatcaaggagttcttttatttgtacctttagctgaataaacattggtagacctcaagttgtgttaataactacattacatttttttcatatttcagtttttatgcacaaaaataatgtgtggttgttatccatattgtaattgttcaaatcagctagttgctgtcagtggccaagccttatatttttccctaaattattagttrtctgtctcctgttgtgtcagggagtccccaaaaccacacccaaatttgatgattcgccaggaagactcaggactcagcagatggttgcacttacagatttatcacagtgaaagcatacaaagcaagatcagcaaagggaaaaggcacctggagcaaagtccaggaaaaaccaggtgcatgcctccaaaagtcctctcccaaggaagtcacaccggatatgrcaatgggttgtgacaaaatctgtgaaatgtttaccaaagaaactcagtgcctaggtttttactaggagcttgtcatgtaggcagcctctgcctgacacatgccaaaatcacagactcccagaagcaaagcaggtgttgaccataaaccatattgtttgcacagtttaggtgcagtaagccactcttaacacttccagagaattgtgtgaaccttgccaaggaccatctttgtaagcagaccatcagtcaagtctgctatgtctcttctgcacacctgtcctaaataaatcagtgtgtgttcatttctttttatctgctggtcttgatgtatgtatgtgtcatgatgtctttcttagaatgtaaactctgtgaggasagatagcatctattctgtaaactcttcgtcaaacatcaagatgagtgccactgaacagtgtgggtctcaataaatcctttgcttttgcttgtgctgtgtgcccatattgcctactgcatcactccctatttaaatgctgcccattcttcagtgccrtgctcaactcccaactctgccaagaagccccaactgattcgacagctgactttgagctctcctttttcttaattctcrtgcccctcaaagtctgctgtttactttagtactagactttatactgcgttcagtttccctctaatttctccttagactttctattacatttgccatttcctgtcacaatcagattccttaaaggaatctgattttttcttttttacacagccatagttttggacaaaaaaatttttgattgatcartgatgtaaataacagagaaaaattaaatcattagacctaccattctcatatttttagatatttggaggtgagccaaacaaacaagcttcctttttagaaaaagagtagtgggccagttgtggtggctyacgcctgtaatcccagcattttgggaggccgaggcaggcggatcacctgaggtcaggagttcgagaccagcctcaatatggagaaactccgtctctactaaaaatacaaaattagctgggcgtagtggtgcatgcctgtaatcccagctacttgggaggctgaggcaggagaattgcttgaacctgggaggcggaggctgtggtgagccaagatcgcgccattgcactccagcctgggcaacaagagcgaaactctgtctcaaaaaaaaaaaaaaaaagagagtagttaatcacatagatttgatcagatgagatgtaattgcagaaagagcacgtctcggttgtacagaaacctcctgtggtttgaacaagggtatgtcagaaaccaaatcagttacagtggtgccttaattgttagctaagcctcagttatctaagctatgttatacagagttaaagaagtcatgttaaaccagttattttttattgtactatacactatattttgctaaactttttttttccccaacctgcaattctgggaagccaccctcattatagacatagaaatcattgtgattaactgtaccctgcttttagcaaaccaaactgaaaatgttctgtaagtcaaatttttgattgcccatagtgctcttggtaccatttcccatggacaggtaaagacatttctcttgtcattgttgtcattcttattttatcattaccaaggatgctggaggcttgtgatttaaagttgaccccattcagcagaggatttagaacaaaggattataaattagaagtgctaacatgtttttctctgttaatgtatctgtggtctactcatttatctcttctaatttctcctactgagtcttggctaacggcttataccatgtaatactaaattttaactccagagtccatacaaacggctattgcygccattttacatgaataattcctcttttgtcaccaatctttgcaggtataaagaagcgactaaacggagaccccgaagtttactggagaaactgcgttgggtgaccgtaggctaccattataactgggacagtaaggtattcaggttttcttaattcttttgttttctgtttataggcttctttagcccacatagttgtatttcttcctaaccacgcttaagatatcaagattatacatttgtgggaggatccctttcttttatttccttaaaaaatctcaactgggccaggtgccgtggctcacatctgtaatcccagcactttgggaggctgaggtgggcggatcacttaaggtcaggagtttgctgccagcctgggcaacgtggcacaaccctgtctttacaaaaaatacaaaagtttgccgggcctggtggcacatgcctgcagtcccagctactcaagaggctgaggtgagaggattacttggacccaggaggtggaggttgcagtgagccaagatcgcaccactgcactccagcctgggtgacagagcaagactctgtctcagaaaagaaaaaaaaaatctctcctcaggtatctcaagaggaatgaattttattatatcagaagtcaccagtgctttctcacagtaggttccaggaatatagaactcttttcaagagcagttctcaccatctttatttccattattagtgagagtttgttgagcatatatttttctttttctttttcttttttttaatttttattgtgcaacaaaagccacattcaagagcacttatttttctatgtaatatctgcctggagtaaaagaagctccatgtatttcaattgttcattcgtcaactcacaaaagaactttcaacatatggataccgatcacacgcggtggctcactcctgtaatccaagcactttgggtggctgaggtgggaagatcgcttgagctcaggagttccagagcagcctggggcaacatagtgaaaccccatctctacaaaaaatagaaaaattagccagatgtggtggtgcatgcctgtggttccagctactcaggaggctggggagggaggatcgcttgagcctgggaggcagaggttgcagtgagccaagatcgcaccactgcagtccaactgggtgatagaacaagatcttgtctcaaaaaaaaaagatatttgcctgctctataatgactaggaaggagggasgtgggaaagaatttcctacagttgacagtttcgtgttttcttgagctacgatttcttctttcctatcctctatgctttagaagatgccttgtaactagcagtgcagtgcctcttgtctcaattagacatttgccaccaagggagtatactgattataagaataaaatgaaaaaaaaatattggtatagaccattttctttgcctactaaccagttactttgtctgttttttttttttttttgtaatggtcttacactgtcacctaggctggagtgcagtggcacaatcactatagcctcgacctccccagactcaggtgatcctcacacctcagcctcacagtaactagttactttctaaaagctccayagtttcagccaacccaacttagatacattaactgctccaaatgatgacagatttgttttaaaaatatttgtgatataattctgactttcagcaatacagactcagtaggaaactagatattttttgaggggaaatgccatgtgattttctttggattagacagcctgagtttgaatccttcctcyggtaatgatagtgcctacctcataaggcagttgtgaaaattaagtgatcagtgcctgtaaagtgatctcaatggtgtctggctattctaagcagttaaatgcattatcacaataaatgttagcttttttttttttttttttttttttggtgataatatttttactgttgatattgttattccccaagacctcaaagttaacctcattgactaagaaaaatagggagtaaaaatgaccaaaaactgaatgagtagtcagagaaaagtgaaagagaactttaaaagaaaaagtagtgagtaatgcagagacagtttggacagggttgaaagcccaaaagggtgattatttcattatagcagaggctatctacagctagaatgacagccttgactgtttgattatctgagggactaaagcttaaaatgatagaggaaaacttaaagttctttaatcacactttgagttttgagaaattgaataggaactcttctaatttacagttcagtaaaaggagaaaaaatgaaaaacagaaaagttccaactgaagagaccaggccattcatcaagagtcttccttacacctgaagttaaaggtcgcttctggccaaagtaaatacttgctgtccagacctatgactgctgcttcagctagaatatattcagaygctagtagagatatgagacaaaagtagattttctgatcagatttgaggttaatttagcaaagaaagaagtgagagcagaggagcatcaagacaaaagaagagtctgtcaggtacatrtagcccaaatagccctcagattcatccatataggaacctgtaagtgaaagtcttaatcataactgcagccatgtcactcatgcagaaagatgttatagagagtattatggccaggccaggcatggtggctcacacctgtactcccagcactttgggaggccgaggcaggcagttcacttgaggtcagaagttcaagaccaccctggccaacatggtgaaaccctgttcctactaaaaatacaaaaattagccaggcatggtggcaggcacctgtaatcctagctgctcaggaggctgaggcaagagaatcacttgaatctgggaggcagaggttgcagtgagcagagatcgtaccactgcactccagcctgggtgacagaacgagactcagtctcaaaaaaaaaaaagagtattatggcctttgatatatttttttttaactggaaaaagatatttgtgatccttaggtgtaaaaaacagagacagcccagggaagtaagttcaggaaattacttccaatttaaaggcctatcttggccatgctataaatgagagttagttccgatgttttgagcatgtcatcccatcagattgaccagtcaaattgccactaagccatgttgcaagctgagaggtccaaaaccaaactggctatagtatttgagttgcctttttataaattaactttttagtttaggatagttttagatttgcagaaaagttgagaagatagtacagagagagctcgtgctctccccctattattaacattttaccttagtatggtacctttgtctcaaatagttaaccaatagtaatacattactgtaayagcatttgtacttcatttagatttccttagtttttaactaatatctttgttcttatatctaattttctaatatccaggatcttatccaggatactacattatatttagtccttgtgtttccttgggcacctgttggcaatgacggttttgagttgcatttttaccctaatagaactgtctcatttacagatagagtatactaactagagggtggtggagtaattgcttcatgtatagactcaatgcagtatatagcacagtgcctgttatataacaggtacttgggtttttgaatgattcattattagatcattagataccccaagaatggatggatagaccgggcacagtggctcatgtctgtaatcacaacgctttgggagactgaggcaggaggatcatttgagaccagtctaggcaacatagtgagaccccatctctgccaaaaaaaaaaaaattagccaggcatggtggcacgcacctgtggtcctacctacttgggagactaaggtaggaggatcactgagcccaggaggtctaggctacagtgagccatgatcacaccactggactttagcctgggcaacagattgaggccctgtctttaaaaaaaaaaaaaaagaaaagaaaagaatggatagataatgctgtgttaatatgttaatatgactttgtaagtaagattattttaaagtggtaattaatcttatagtttcctgtattcctgagatcattgtttatttttcttattctctctacatttaccaaagaaatactcagcagatcattacacacctttcccttctgacctgggtttcctctcagagcaagtagccgctgcctgtggatttgaggatttccgagctgaagcagggatcctgaattactaccgcctggactccacactgggaatccacgtagacagatctgagctagatcactccaaacccttgctgtcattcaggtgagttagttccagggatttgggattactttttatcatttaattcttttttctaagacattttactctaaaataaatacaggtatttaactttaaaaaagtggttggactctataatcttccacttctgggaattttaayaaattatagttagtatctctgtttaagacacatggagcctaccttttattttatttttattttttattattgtttttttttgaaacagagtctcgctctgtcacccaggctggaatacagtggcttgatctcagctcacttcaacctccgcctcccagtttcaagtgattctcctgccttagcctcctgagtagctggaactacaggtgcacaccgccacacccagctaattttttttttttttagtagagatggggtttcatcgtgttgcccaggctggtcatgaactcctgagctcaggcaatccgcccacttcggcctcccgaagtgctgagattacaggcatgagccactgcacctggccgtaacctaccttttataatgaaaggtattgtcagtgctctgtggaatagacaagtggaaagccataaaagcaaagcgagtgacctttggtatagaagagcaaactatagagcaaagcacaaaagcctgagtagtttactctccttgtctccctaaaagtaagtttaaatttgtgccaagttttgcacctgyatctcgggaaagtgccttttattaattgccttatctttaaaatgaggaaaggtaaacatagtaaagaactcaaatgattttattgaaagactcaaagacacatcaataggctgggcatgatggcttacacctataatcccagtactttgggaggccgaggccagtggatcacttgagttcaggagtttgagaccagcctggccaacacggtaaaaccccatctctactaagatacaaaaattagtcgggtgtggtggcacacrcctgtaatccctgctactctggaggctgaggcacaagaatcacttgaacccaggaggctgaggttgcagtgagccgagatcgcgccgctgcactccagccactccagcctgggtgacgaaataaggctctgtctttaaaaaaaaaaccatcaataaaacttaaatggataacattaaagctaagttctccatttgcttatttaactgcatccaattttattttgcagcagttctgtgggctgtcataactataggtagaaggtcatgagttggtcactcatagacacaaaccagaagagaaggatcttagcacagtttaaaaaggaggatttgggagcaataaatatcaacctgaaattacaaaataacacagttggcagtaactttcccagtcatagttaataaacaaaatttatacttttttattgttgtgtgtttttacttattttttgtagctttggacagtccgccatcttyctcctgggtggtcttcaaagggatgaggcccccacggccatgtttatgcacagtggtgacatcatgataatgtcgggtttcagccgcctcttgaaccacgcagtccctcgtgtccttccaaatccagaaggggaaggcctgcctcactgcctagaggcacctctccctgctgtcctcccgagagattcaatggtagagccttgttctwtggaggactggcaggtgtgtgccagytacttgaagaccgctcgtrttaacatgactgtccgacaggtcctggccacagaccagaatttccctctagaayccatcgaggatgaaaaaagagacatcagtacagaaggtttctgccatctggatgaccagaatagcgaagtaaaacgggccaggataaaccctgacagctgagacttggagatcccatcctttttactcaggcacctgcttaccgtaaatgatcatgttattgtgtattgccgtggacttcagcacccagacaagccaaaaacagagacagggaagaactcattgttgatcacactgttgccttggaacccacgcagaagtaaactcakccactttgctcagagaagtgtttgacatggtctgttcctagttacatgttggctgtaatgtatgttgagaagtcagtccaaggaggtatgttcttccacaacagccttctcagcctctgctatttcctttgaggaaggtagaagtgagtttccatgtttgcagagtatttaaatacctcagattttattaatgagaaatacagtacccctccctccactccatctggtaatttatggtaaaattgtggttctgtgaaccagctattagtctcatcttcttaactccctcaggcatcatcaaattctttgatcttctcttccacctctctggctctcatggaagaatcctttacacatgaaaacaatggaactggaaaatcttgtcttttagaaaagaaattaatcacaactatctctcttgcctaaaagataaatataggtaaacccaaggaaaggggaatttagtttctctacatgtcatttcggtctccaaactccctgttggctttttaatgcaattttaattgttggaataaaaaagtcccaagggtgttttgttactgttttctccatgaataaactcacttgattttaaattaaagatctatatctgtctttggggtttagtctatctgggattaaggtttttttttctgtttttctttgctgtattgttcatgctattgaagccctctagctgtttctgccctacaccattctgctgtgccctaagtattctttgtggctgtctcacagaagagagaacatttcttaatattccagtcactgctgttattgtctgagggtaggcagcttggaaaaatgtaggcaacaccaagttttaatctttatacccccaacaatttgactgactatatcatggtccaggttactttacatttctctggacctcggtttcctcatcataaaatgaagatactgtagactaccatcttcctaaarggatattggtatttgaaagagaattaagtgctcctttctacaaacatgatgtgccaaaattgttttattataagggctctttgaaacatcctaacttccttgtgtggaggactggctggaagcccatttggtacctactgtttgcaatgcatgttattaagtttacatgtctcctctgtcctgctctgccccttttttaaattactggcattgaatattgagttcatatggtaatagcagggtttttaaatgaataaaaattatggatttatctcttatgtgtaagctaggttctttgttttttgttttttgttttttttgagtcagagtttcacacttgttgcccaggctggagtgcaatggcacaagctcagctcactgcaacctccacctcccgggttcaagcgattctcctgcctcagcctcctgagtagctggcattacaggcatgcgccaccatgcctggctaattttgtatttttagtagagatggggtttctccatgttggtcaggctggtcttgaactcctgatctcaggtgatcggcccgccttggcctcccaaagtgctgggattacaggcatgagccactgcacccagcttaggtcctaaaattaatacataggaaatctttatataattaaataataccactggataagattaccactgttaaccttaaattttctacaatgtatgttaaatgtgacctacagaaaccaacgtactgtcatttagtaaatccaacagagacagtctagcattaagacagattattctttcttcacttgtgtgtcagataaaggcattggtttgtgtatgggaaccatgttgtacaaaaaacacataactaaattgtagactcactccatgaagtgagatgtttatgctatgagaagcaggtagaaacaggccagccaagagaatagcacattcctgtctcctgggatggtgaacagatcattcgtacaattaaatattcacgctctctctctccccgaccccatctcctccctctagccctccccactttctctggctcgctctctacttttatttatatatttttatgaagcacatataattgaagatgtatataatgtaactcagtcgggcgtggtggcaggtgcctgtagtcccagctactcaggaggctgaggcaggagaatggcgtgaacccggaggcagagcttgcagtgagccgagatcgcgccactgcactccagcctgggcgacagagcgagactccgtctcaaaaaaaaaaaaaaaaaaaaagagtaggccaggcacagtggctcatgtttgtaatcccagcactttggcaggctaaaacgggaggatcacttgagcccagaagttcaaggttacagtgagttacgattgtgctactgcactccagcctgggcaacagcaaaaacctgcctctaaaaacagggctgggcgctgtggctcatgcctgtaatcccagcactttaggaggccaaggcaggtggatcacctgaggtcaggagttcgagtccggcctgaccaacatggtgaaacccagtctctactaaaaatacaaaattggccgggcgtggggtggctcacacctgtaatcccagcactttgggaggccgaagtgggtggatcacttgaggtcaggagtttgagaccagcctggccaacatggtaaaaccccatctctactaaaaatacaaaaattagccaggcatggtggcaggcgcctgcaatcccagttactcaggaggctggcgcaatagaatcgcttgaacctgggaggcagaggttgcagtgaactgagatcgtgccattgcactccagcctgggtgacaacagcaagacttcatctcaaaaaaaaaaaaatacataatatttagctgggcgtggtggcgggcgcctgtagtccctgctacttgggaggctgaggcaggggaatcatttgaacctgagaggcggaggttgcagtgagccaagtcgtgccattgcattccagcctgggcaacaagagcaaaactccgtctcaaaaaaaaaaaaaaaacaaaaagtaaagtcacagacgttaggccctgagaaattggttttctaataatctgttagtagggatgtaaattgctatagcccctaaggcacaatttggcatcatgtaatgtgtgactttttatcctactttgaccagggtagtcctggatctccttttccaccgagaagtggtctttcattcaatgataatttatgtggtcatcctaataatgttttcaaatgtataccctttgtcccagtaaatttcacttctaggaattgagtctgtggaaagtaatcagagctgtgcagaaagatttttgtgtgagaatattcatagtagagaaaatatgaaatatactcaaaatccagcaacagggagttaaattcatgtacttttcagcacgtgactactgagcactgttctttggctgcacaagtactttcctttgtggagcttgtatactggatatgccataaccctatgtagcctttaaaggccatgttttacaagaatagttagagataaggggaaatgtttatactatatttaggtgagaaatccaattatgaaactgtccatagtaacctaattttgtatagaatgttgacatttttattttatgtttttttgttcagacctctcagagatgaaatgtttacatatttttttaaactggaatgatgtgaataccaaaacatgaatgatggtggaattacagttgatacttatttgtgcttttctgtatttctgatttttaatttttttttctctttctgcgcacccccctctccccctgccccatctactgggcaccagagttatttgatttttttgtttgttttgtttttttgagacagggtctggctctgttgcccaggctggagtgcagtggtgcaatcatagctcactgcagcctcaatctcctgggctcaaacaaccttcccacctcagcctcccaagtacctgggactacaggcaccaccatgcctggctaacttttctaatatttttgtaatgacaggatttcaccatgtttcccaggctggtcttgaactcctgagctcaagtgatccacctgcctgagcctcccaaagctctgggattacaggcatgagccaccgtgcctggcttgtctgatatttttgacattaaaaatctttttaaaacatttttttaagaccgggcacagtggctcatgcctgtaatcctagcactttgggaggccgaggtgggcagattgcctgagctcaggagttcaagaccagcctggccaacatggtgaaaccccacctctactagaatacaaaataattagccagtcatcatggcacgtgcctgtagtcccagctactcgggaggctgaggcaggagaatcacttgaacctgggaggtggaggttgcagtgagcagagatcacgcccctgcagtccactccagcttgggtgacagagcgaggctacgtctcaaaaaaaaaacttttttttttttgaggcagagttttgctcttgtcgcccaggctggagtgcaatagcacaatctctgcacactgcatcctctgcctcccgggttcaagcaattcttctgcctcagtctccctagtagctgggactacaggcgcccgccagcacacctggctaatttttgtatttttagtagagacagggtttcaccatgttgggcaggctggtcttgaactcctgaccttgtgatccacccacctcggcctctcaaagtgctgggattacaggcgtgagccactgcgcccagccaaaaaaaaaaaaaaaacttttttttttttgagacggagtgcactccaggctggagtgcagtggcgcaatctcggctcactgcaacctccgcttcccgggttcaagtgattctcctgcctcagcctcctgagtagctgggactacaggcacgtgccatgatgcctggctaattattttgttttctagtagagatggggtttcaccacgttggccaggctggaagaggaattttctctgcacttcctcttattttaaaatatgtctggctaaggtggatccactcactactctctgcttattattttggtagagcctcttgcctgttgctctttttttgcaccccatgtctggtttttcctggaagggtgccaaggcctcagacatagatgtcctgctgaacaggacagactcagygagacttggctttccagtgttctcrttttttcagttcyttggtcactaagataagctggtcttaccccatttctcttttcccttaatctaaaatattggtttattagagtaaaaaaaaaaaaaaaaagaccctaccctaggtggatccaataaggcaaattagaatggtaatgaggcagaagggagcccttggggtgacttgatctcaacgtgattgacaggaggacctagaaagaaagacacctcacctgttttctgtttccaaggtcacagtagaagcaatgcaaatctaatgccttaggctgaatggtaaatttctactgattttgatcagctacctatacaaattcgagccctcctggagataggtttgttggctctaattttattggtaagacagacttctggccaggcacagtggctcatgcctgtaatctcagcaccttggaagttcaaagcaggtggatcacgaggtcaggagttcaagaccagtgtggccaagatggtgaaaccccgtctacactgaaaatacaaaaattagccaggcatggtggcacacgcctgtaatcccagctactcgggaggctgaggcaggagaatcgcttgaacccgggaggcagagattgcagtgagccgagatcgggccactgcactccagcctgggcaacaagagcgaaactctgtcttaaaaaaaaaaaaaagacaaacttcttattaagataagatggtacagtagatggaaaataacattgagtggttaccagaaaagctaattctagtaaaaattccaacacttagctgtgtgaccttgactaaatcttcagctgagcctcagtgaacctttttgggccccagttatctcatctataaggagcttgccaagtaattcttgtgttgcctaccacttctgcaatactatatttctaaaatgagaagttaatcttacagaggttggataaacagcaaacaaaagttaccccatgagcagcaagatttttggtaaggaaatgaagtgttaaccaagtaaaactaaaggagaacaaagcaaaactgaaacttctctgaagaaaacaatacaaatagccaataaacatctaaaaagatgctaacctcactagcagatagaaatgcaaattaaagcaatagatgtgtatttgtacccatttatttggcaaaattaattacattatctcttgactgtctttcactcacattattctacttttttttttttttttgactcccgttctgtcacccagactcgagtgcagtggcactatctctgctcacggcatcctccgccttttgggttcaagcgattctcctgcctccacctcaaatagctgggattacaggcgtgtgccaccacacccagctaatttttgtatttttagtacagatggagtttcaccatgatggccaggctggtcttgaactcctgacctcaagtgatccacccaccttggcctcccaaagtgctgggattacaggtgtgagccattgtgcccggcccactcaatcctacttctaataccacaggaaatgttggctctacctttcaagtatccagagtctaaccacttgtgtttacctcactgttactgtcctggcccaagccactatcatctctcaactgggttattacaatagtgtcctaatagctcctccttccgtgctttgcccccttctcttcccccatattttatcctcaagatagcagccagagtgaggctattaacacctgagacaggtcatgtcactcttgtgctcaaaactcttatgttgctcctcactctgagtacaagccaaagtcctgtcaattggctacaaaccccaacccatctggtccctcatttcctcttggtcctctcacccactctgtctcagccacactggtctccttgttttacttctgaagatgcaaagcacatccctgccttgagactttcacactgaactgtttcctttgcctggaatgctcttctcccagagatctgcaccctcactgccttccagtctttgctcaaatatcactttggtgagatcttccttgactaccctcattga

SEQ ID NO: 94879 - DNA, 24817 bp, Homo sapiens
agacagagtcttgctccgtcacccatgctagagtgcaatggccccatctcggctcactgcaacctccgcctcctgagttcaagcaattctcctgcctcagtctcccgaggagctgaggttacaggcacccaccaccatgcccagataatttttgtttttttagtgggagacggggtttccccatgttggccaggctgatcttgaactcctgatctcagggatccacgcacctcagcaccctctttggaagttcctagcaagttctctgcctgagttcagacccacagggcctcttaggggacgggggagggtcagggcccagctctagctgaactcccccggggggaggggggaggggggaggctcaggacccagctctaggggggattgaggaggatcagggcccaactctagctgaactcccctgggggtagggaggagggtcagggcccagctccagctgaactcccctgggtggggtggggaaagagggtcaggctggggaggggagcacagaatggcggggtgccaggcctgggggagaggcggatggggtggggaaggatgggtctgggcagataacgctgtggccttttcctgttggcctgagggcccagggtgggggtggggagaggctggtctccctgaggtctgggcatagggaggtgtcctgggatgagaagactcttgagaagtgactttgataattcgggggcagatccttgggcccaccaccccttgcagggacaggggtccttcttggggtgggggatgaacagagactggagagggtgggggagaaaggagtygaggggctaatttacaggacctctcaggccgggtgtggcagctcacacctgtcatcccagcacactgggcagctgaggcaggaggaccccttgagcccaggagtttgagaccagcctgggtaacacggtgagattctgtgtctacaaaacattttttaaaatgagccaggcgtggtggaactacttgcttatagccccagctaccgagaggctgaggcgggaggatcacctgagctggggaggttggggctgtggggagccgagactgtgcctctgcactccagcctgggcaacagagtgagaccctgcctcaaaaaaataaataaacaaaaaataaataaagcccccattccctttaggatctctacttcctataccaacccactgtcccagcttggaggggcgggaccagcctcgagccgcagttgattcccagagcacagagcacaggacggaagtggttctgcatggggtatagtgaggccagggaatagcaatgcattcctgtccgtgagtcctggccatcaggccttggggtggcctcaccgaacccccactccaagctccgttcaacagaaatccaggaaatgggccggagaggctgggagaccacccaggagaccagcccgaggccgcgccctggatccctgagccctcacttttgtaattaagataataaacctgtgctggctgtgcgggcacacacctgtcatcccagcactttgggagaccaaggcgggcagatcacctgaggtcaggagttcgagaccagcctggccaacacagtgaaaccccatctctactaaaaatacaaaaattaggctgggtgtggtggctcacaggtggattacagggtggcctgtaatcccagcactttgggaggccaaggagggcagatcacaaggtcaagagatcgagaccatcctggccaacatgctgaaaccccgtctctattaaaagtataaaaattagctgggcatggtggtgggcgcctgtagtcccagctactcgggaggctgaggcaggagactcgcttgaacccaggaggcggaggttgcagtgagctgagatcacgccattgcactccagcctgggcgacagagcgagacgccgtctcagaaaaagaaaaaaataaatcaaataaaaaaataagaataaaaatacaaaaattagctaggcgtggtggcaggcacctgtaatcccaactactcaggaggctgacgcagaagaatcacttgaacccgggaggcagaggttgcagtgagccaagattgcgccactgtactccagcctgggcaatagagtgaggttccatcccccccaaaaaaaaaacaaaaaaaaaggaaaaggaaaaataaatctatggaactgctcatggggaggagggacggcctggccctgccactcatgttgacgaagaagtaaactgaggcacggcccttccctcccccatcagaactgaaaggtgtctgaggccccagcaggccctctgcatgagattcggtggctctgagggcctcagatgtcctcactcccccccccgtttctcctgccaggctcagagtatcattttcaaaatggtaaccagcaaaccaacgtgattctcgcacaaaggcaaggtgagcctgttcctcgctcaccctgaatcattcatgaaggaggcagctggcctgcgggctgggatgggagacaggagaggagaaaagacagaggctgggccctgctcgctaaataaatcaggtgcccacgggagcccctgggcgtcttcccgcgctggcgttctgcatatgacagctgacctgtaaattgctgggccctcagccatggttactgtcaggccagcccaggaaggacactggtttcaggtgacctgggtgaggtggaggcggtggggggggttcctgggaccaggccgccattgcaaaaacaaacggcctgcttgtacctgctatcgccctctaagcttcaggtggtgggtggggctgaggggctgagaggtggccccaaagaaagacaaccacatcctaaaccctggaacccgtgaacaaggcttcatttggaacaccagtctttgaaggtaccattaagtgtcttgagatgagatcatcctggagtctgcaggtagaccctaaattccgcgacatacattttattttttatttttacttttttttttgagatagcgtgtcactctgttgcccaggctggagtacagtggcgtaatctaggctcactgcaacctccgcctcccgcgttcaagtgattctcccgcctcagtctcccgagtagctgggattacaggagcaaaccaccacgcccggcaaatttttgtatttttagtggaaacgggctttcaccatgttggccaggatagtctcaggctcttcaccttgtgatccgcctgcctcggccttccaaagtgctgggatgacaggtgtttattttcgtttttgttttttagagacagagtttcactcctgttgcccaggctggagtgcaatggcgcaatctcggctcactgcaacctccgcctcccgggttcaagtgattctcttgcctcagcctcccaaggagctgggattatagggcatgcaccaccacgcctggctaatttttgtatttttggtggagaggaggtttctccatgttggccaggctggtctcgaactctgacctcaggtgatccactcacctcggcctgccagagtgctgggattacaggtgtgagccattgcacccggccagacactgtcttaaaaaaataaaaataaaaaaaggtactggacaggtggctggtcatgtggggcttgcggggtaagggatggccttgggtttatactttgagcaagacaggaggcctggcggggccacgatcagaagtgggttttaacacgattccgaagggttagactggtgcttggaacctggtggtctctactgctgccagctgccactcagacccccggccgcccctgcctgtctgctttcagggcggggcccatcccaggcactccgcgaacagacagaagcggctggttctggtggtgtgaggatgggggtctccaggggagcaaatccacagtaacacactgggcttctcccagatccaccggacattcctgatgagtgaccctggctgcagatggctcttggtgagtctccgttgaccgggtggttcgggccaaaggaccttgccgtgcgatgcctccatggagctcggcggccacccctaatccgggctggaatcctctggcaccrgacgcccggcggggctccaaggctcctgggcccacgccaggccccggcctgaaacgcagcactgctggaataaaacacgccagagaagcagggcgctaggctcgcctggatttggggaaacgagaattgtcatgtcttctccctccgtaggttggtgttaatgaaaaacccccttttcagcatggactaaatcccgctaattctatttagggagcagtgtctactccgggccgggaactgctccggtttccaaccgcagcctcccgtgagggtcccagtgtggagggccggggtcatcccctcactctgggatggctcccaacccgctgacctggcctccccgtcaggcaccctcacagctctgtcagactcttcatgtgatcagcgctcctgggaacattagtttagggtgttttctgctgctgggatggtggcccgggagggaccctcctggtgaccctgctgggcctggccctcagtttccccagccgtaggctggcagcctcgaactgtacgagctccaggccacagtttccccagctgtaggtcagtgggccagggactgtagggggctcgggcctcagtttccccagctgtaggcgggtggcttgggcctcagtttccccacctgtaggcgggcggccttggattgtatggagcccgggcctcagtttctccagctgtaggcggatggccgtggactgtgtgtggcctgggcctcagtttcccccgctgtaggcagatggccgtggactgtgtgtggctttggcctcagtttccccagctgtaggcggatggccgtggactgtgtgtggcccggacctcagcttccccagctttaggcggttggccgcggactgtgcaaagtccaggcctcagtttccccagctgtaagcgggcggccgcccactgtacaaggtccaggcctcagtttccccagctgtaggtgagaggccgcggactgtacaaggtccaggcctcagtttccccagctgtaggcgggcggccaaggactgcaaggtccaggcctcagtttccccacctgtaggcgggcggccgcggactgtacaaggtccaggcctcagtttccccagctgtaggtgagaggccgcggactgtacaaggtccaggcctcagtttccccagctgtaggcgggcggccgcctactgtataaggtccaggcctcagtttccccagctgtaggcgggcggccgcggactgtacaaggtccaggcctcagttttcccagctgtaggcagccggccgcggactgtgcggggcccggacctcagtttccctatctccgcagtcgggattcgctgttccggggcgaacaaagaacggtcgggggtgaccccggatcatggcgcgcccgcagtatctgtggccactgtggaaacagccctggcgtgtccgggacgcgacgcggcctttccctccccgcgcgatcacccagatgtgagcgctcagtttgaatcggactttttggccatgtgcccacaaccaacatggagccctgagggtttcctgcccgactccaagatggcgatgcgactccctttgccctcacggcccaggcgggcgggtcctgcccacttgcaagatggcggcagcctgggcmaagcacgcttcccgccgcctgactcgccacgtacccactctcaagatggcgtctcccgcaaagccacgcgccagctgactggctcagacgccgtcacgtgatcccattttctccccctcccccgactacacaagccgtttccgccttcggccttgaggaataaccgcctcccccaataggcgcctgcgatttctctgggtcccgcccccgggcggccttctggccagtgggaggtgctggcgggggcccgcggggctctccccgccccctggctgcagcgggagccaatgggcagcgcgcgcgggggacgtgtgcgggcgtctccgccattttgtgagtctataactcggagccgttgggtcggttcctgctattccggcgcctccactccgtcccccgcgggtctgctctgtgtgccatggacgggtgagtcgcacgtcgccccgcgccccaccgccctccccgcgccgcagccctgcccccgccgccgcgccggcctccccggggccgatctcgccccctctcgggcgggagggggcggcgggctctccccttcctctccgcgtggcgggcgcgggtgcggggcgggtcaggggcttcccgggggtctggccgcgtccccatcccccgtccggcccgcttccggcccccgcgcgccccgtccctagcgcacgcggcctcccgcgcccctccccctccgcgcgcgtccccgcacttcgcctttgccccgcctcggcggcgcgcggcccttcccgcttcccgtccggccctcgcgcgcccggatggcccttcccgcctcccgtccgctcccctcgtgcgcctgcgtagcccgtcgcgcgtccccgttggccccagcgcgcgtgcgcggccgccatcgggggcgcgcgcctttcccgccgcccggactctgcccccggcgcagccccggaagcgcaggcggggctggggcggccgccgggagggaaagctggcgccggggcctcgccgcgggcccgagtctctgcgctccccgccctacccctgccccccgtgcgccccgggccgcggccaaggggtttcggtgatctcgggagagaagcggccgccccgagggtctgtcctccgccccggggccggaggggcctctccagggacccccgcgggcgccgtcatggggaggggccttcccggctctcgggccggggcagcctttccgggcggctttgctgggcgggcttcccttgggagaggtgggagccccctccagaaaggccgtgtcccgccgagcgcttcctgcgcgaggccctccctgggaataggaagcgggagaggctggagatgtttcgcattctttccgttttcctgagaagtttttcttgggttcagtcacttttaaaagtctgttaaacgtggtccgtgcagtctgtggtgtcagaagaggcgcagccctagagtgggtctggaccccttagcatgcgtgcgggcaggtgggtcctgcagacggcgagacgagggctccccgctctcggacccagcaccgcgggctcgggggccgcgcactcgcctcccggagtgaggcaggagrcccggaggctgcccttccgacggacgctccgagtcacttagggcctcgccgggagttgcagtggccgggagaagccgtggggagctcactgttgggtcaggacctggccggggctgaagggagggcctcggacagtccggctttctatccaccttccccccggggtgtcccgaggagggagagtcgggtcgggcggggctcgggttgatcagtaactgaggctgtgttctggtcggtctgttaatttttattgayggtttccacggccgcctcctgctctcctcggtggatcgggctccactctgctgagaggcaccctcttgggggcccacccctacccgggtggaagctctggcccaggcctgtgagtttgccagtttcagcctctccgaggcgtttccaacttactggaaagcacacagcagcccttgaaccctctcagcggcatctagcattcctcggggcttccgatgggggtgtctttgtcttggaacgtgtggggcctggtccagaggtggggcctggggtcctgctgggagggaggggcgccaaaggacaatggkggccccttttcaagttgcagtcaagtggacggctcacttccctgcccttctgagctttctctagcggggcctcgtgcagccagagggagccctgcggaggtggcagctgcagggacctacgggctctcctggcccsgggacagctgggtgctcctgctgctgagtggccaccaggctaacgttgtctcctttctttctctctacagcattgtcccagatatagccgttggtacaaaggtaggcacttctcactttgcttctcygtgacgctcctctgaccttgtgccgaccccgggggccaccccccagcgctgttgcrttggctagagggcgcttttccattcctaaggggcactacccttggtctggaatctggagttgggcggtagggtttgaaccccgggctccagtgcccgtgagttttgggggcttgggtttgctggccgcccctcaggtctggaatctgagctgctsytcggttcttgctgtcagcagcgagggytctgtgtgccccaggcctgcctttggaacttctgcctctagaggctggaatcgtgccgttcagtgggaaacctcatgttgtggctgcctgggagactcttggttttgataggaaaagagccacctggctgtggaggggacctggatagaatccagcctatttgagtggctaggatgggcatttactggttgattttgacgttaagtttttttgtttttgtttttgttttttatttttgagatggagtcttgctttgtcaccaggctggagtgcagtggtgtgatcttggctcactgcaacctccacctctcaggttcaagcgattctcctgcctcaacctcctgagtagccgggattacaggtgcccaccaccatgcccagctaatttttgtatttttttttttttttttggtaaagatggggtttcgaacattgttggccaggctggtctggaacacaggtgatgcaccccccttggcctcccacagtgctgggattacagttgtgagccgccagacccggctgacattaagtatctttgatggcatctggttagaacagcagcaaactgtcaaaggtggtgtttggggcaagagaaaaatgaatgtgccacgtctctggggtgtgcgaatcttgcagccccatggagggtgaggccagggctcagcatgtgaggaaagggggtcagaacctggagaagaagaaggtcctggggaggcgattctcgagggagctgtagtcctcgcttagctggggtagttggttaatgattctgctggtcattgtgggttgagggggctcccgacttcagggcttgtgccccgagagcctcccgcagggcgagcccacagtggtggcgtcctgagccagcagccagttggtttctggtcagtcagcagtggtgcctgggccaggtttcggtttttcccaagtggactgctgtctttacgcgctgcctgccccgatcttcctggagataaaacctgtttgttcagtgtgggaggagggagaggtactttcatctgaagcatttgcaacaatccctagatgtgtctggcttgcaggcagtcgtctcttccctgcttctgtgggcctgctttccagctggagtggccctcagcttccatcgggtggtccttgagccctcctctgcagttcctagggggctcctgggctgggacgttgaagcccagccaggacttgaagcctgcgggagggattttgccacagggcagggttagggctcctgctgggtgcaggccctggtaggaggacggggtagtaccctgacccagatgataccccccctcccccccaccaccagggagccctcagctgacctgggcccacacctggctacgctgtcctttagcccaggacagagcaagctcttgttcagtgtggggttaaagacacctaggaactgtgctgtagggccccagctgcagactggaagtcctggggcgtttcctgtcaatctgtgtgcttcaggacaggtgccctgaagggaccctcctggggtacctggcagctgctgtgaaggcagtggaggcgctaggcccagctcgtgtctcctggttgctgccctgtggagcctcggagcctccaggtgtcccttccgttctgctggggcgccgttgagctgagccaagccggcctgtgccgcctgggyaggcatggagtttgctgccgcagacagttgtgggcaatgccaggccacttgcccatgggaatgagattagggcttcaggcaggcggccaagaggaccgctcagaggaagcggccccgcccaccactccagtcaaagacagggtccaagatgccctttttaaggtttgtgcagccagcacatgggagccgcatgggcgcttggccactctccagcttgggggaggaccagccctggtgtcctggacggggtcggctcctgggctcccccagcctctgagctggaggrgagagcagacaggaagcgacttcctgtgggaggcgaaggttggaggccctgcgtctcaggtgcacccatcctcccttcctcccgtcctcccttcctccggtcctggcactgctgtgttttctgatcgcgtggtttccacctgaggcggctggytctgacccctttcccctgggcctgcgcagccccgccttgtgctcatagggggccccagactctgaaagcgagaggactcgagggtctgttttcagtatttggcttcatctgtgtccggccggaacctcagggccgccgtgacactggacactgttcattctctgaccctaaagtcttggggactgaacaggtgccatttgggtgggcgccgggcctgtggaccctgagtgattcctggttccggcccttgtggctgctcgattgcttgtttggtgacgccctgagtgcttgtgggattggtgggagactcagggctgcagttagaggtctcattggcaagggccagtccctgttccccatcctccttgagcaggtgccggagtctcccraggctcttgccgtccgcgtcgggaggaggcagctktggggctttggaggctcgggcagtcttccttccaggaagctcttgagccagggccagggcaggagtggagctgaacgtgggtggaggggaggcggccttaagagaagaccaagcgcaggctcggggaggccagygttggtgggggctctttggccaggtgtgggggcagctccttgaccaggcatgggggtgtgtggagctgggggttgtctgaggggggacagggtgtgatatccactggttctttctgatgcgatggccctgggcccttcagcaggtgggggcaggctcttggcctcaatcctgatacgggagatggaggctcctttgttccctgggatggccctgtcctggggggcctgggcgttgctgccctcagcgcctgcagaggctcgctttgcagaccaagcgcctgtgctccaaggtcctcagayccgagctttgttttctgtgtaactaagggccgtaaccaacgtctcctccaatttcactctttgaataaacgtgtgtcttcaatccttgcagcgggggggatgtctgccgtcctgagcctaggatcagtctagtgcaattcttagaagttgatccaattacatagaaataaccagtgaatagattgtttctggagagaaaatggacaggtcagaagtgatggagccgctgtggagctcccccggccctagtcacggccgcgataccagcggatcactgggcgggaggccgtgtctctagtcctcagtctcgcgtgtgcagagacggaggtcgggtttcttttccgggctggaaaacaggagaggaggggctcctgcgagagtgagggaggcagcgctataatttggttytcttgcgaggccaccagaagtgaggacggctgcctgggccctgccgtgtgctgctgggggggctggctccatggagggggtcctctgccctgctggctggtggctgaggccccagrcctgtgcccagggccgcyggcagcacagtgaggccacgtccacagcagagttggccgtggagatagtgtacgtggtgccctccgtagctgagagcctcccagccccacactggctgagtacccagggcttccagaatttggaaaaaggagcagtgttttggtcgtggagctgtggggtgccgtgcgcgtccatgggctgggtctgcgctcaggctgccctgccgtggaagtgtgggtgtgggtatgggttgggggtctgggaccccaggcagcccaagtgggagcagggccggccggtggggaagggaggctctggcctggtgggaagtgcagctccgcgttgtcccttctcttgcagcggggatctgacgagcttttctctacttgtgtcactaacggaccgtttatcatgagcagcaactcggcttctgcaggtaaggccgggactcggcccagggcaagacccgtgggtgtctttccctsraacaacgttaygttcttgttctgggactctactttccatctccaactgcaggggcccatggtccacgctacagacccaggtccaagttctcgctgcagagaatttccagggaggcgctggatggatggtccaggctggcacttggacctgtgggcgggttgtcaggagctgtcgggagcaggggtcctgactgtgcargtcttggcctctsgcgctgctggttcacatgcaccctcctggggctcagggttggtctccgtagcaggcagggctctagggggatagcagggaccttcctctgtgggctcctgcgagttggtgcctgcrtctcatggcacccccttttcagcaaacggaaatgacagcaagaagttcaaaggtgacagccgaagygcaggcgtcccctctagagtgatccacatccggaagctccccatcgacgtcacggagggggaagtcatctccctggggctgccctttgggaaggtcaccaacctcctgatgctgaaggggaaaaaccaggtacctgagccgcgtttctccggggtgctcacaccgtgcaggcggggacgaggagggcccagcgctcactgcctccccaacaggccttcatcgagatgaacacggaggaggctgccaayaccatggtgaactactacacctcggtgacccctgtgctgcgcggccagcccatctacatccagttctcyaaccacaaggagctgaagaccgacagctctcccaaccaggcggtgcgtggccccgcggcrgaccccagcagcccggggacctcgggggtgggcccagccgcaggggccggggactcacggctgtgcctcccacagcgggcccaggcggccctgcaggcggtgaactcggtccagtcggggaacctggccttggctgcctcggcggcggccgtggaygcagggatggcgatggccgggcagagcccygtgctcaggatcatcgtggagaacctcttctaccctgtgaccctggatgtgctgcaccaggtgaggtggtcccatcaccgccagggcaggtcggctgctattgctgtgggcacaggcacacgggaggggcctggcagggctggtgggcaccgggcaggagctcatgctgtggcccgggacctgcagattttctccaagttcggcacagtgttgaagatcatcaccttcaccaagaacaaccagttccaggccctgctgcagtatgcggaccccgtgagcgcccagcacgccaagctggtgagtggggctcccgggayggcgcccgccctggccctggcccggcgacgtctcacggtccctctcccctcagtcgctggacgggcagaacatctacaacgcctgctgcacgctgcgcatcgacttttccaagctcaccagcctcaacgtcaagtacaacaatgacaagagcygtgactacacacgcccagacctgccttccggggacagccagccctcgctggaccagaccatggccgcggccttcggtaagaggctgcccgacgcggcgccagtgtgcagagtggtctattagggccgctcagtccggakccccggcggcacgggcccggccctgcaccagggtgatgcacctgctgctctctgcacggccagcacagcacggtccagtgtcccccacgtcgggaccacgkccccccctggagcagcggatctgcccgcgaaggctctgccggggcygcccgccggccgggttggggcccatcccgcagcacagcgcccsctcgcggtggaggttgtgggtgcgatgattagtgtctcatttatttctaggtgcacctggtataatctcagcctctccgtatgcaggagctggtttccctcccacctttgccattcctcaagctgcaggtattcaaacgcttggtcttggttccccagcgactgcatgcccacaccaccttcccaggcagctccgcatccacggcggcagcctgggcggactgggcactcgagtgccaggtcaggggcccttcccgggagaggggwcgccacgtccacagagcaggcttggccagggcagtggtaggacagggctgtggaggcccacgtgtggacggcgccagccagaagccgctaatcgcacagtctttgtggtctggttcccttcaagcacctccgggcgagcgcgaggaccgccagtggttggagggatgtctctagtagttgaatttgagtggcctggtaagcgcgcggcccgaggctgagcagcatgaccggcggcgggacgtgtgtgcgtggccgtcctcccgcttcccttctgggaccggggcccggccgccccagtgctggccgtggacggagcagcgcgtgccgcccggcggccgcctcgtctgcatggaggcatgggcgcgcatgcgcggtggtcccgggacgggccctgcttgccgagggccccgtgtctgtgctggcggagccggagcttttctgtgctgtgggcggggcgcatgcagatgagcccaggcccggcccggcccgtgctgtgaggagaggcgggcgctggtgcaggagccggcgggtggctgtgcgggggtcggrcgaccccacaggcacccagggtagggccagagccagggccgcctcccgcgcggctcggctcctcggtgcatgaggacggggagcgtcggcctctcccactctgcggtggagtcgggggcgccgccgctcatctcacctcctgcttttccaggcctttccgttccgaacgtccacggcgccctggcccccctggccatcccctcggcggcggcggcagctgcggcggcaggtcggatcgccatcccgggcctggcgggggcaggaaattctgtattgctggtcagcaacctcaacccagaggtacgtgggcttttcctccgcgccgccgttcctcccggaagagcgagcaggggatgttgtgctcgggctcgggtccckgagcagcgccgcccctcgctgtgtctgcgcctctgcccyggcagcccctctgctgcakcgctgagaccctccttttccaagatggcttgagttttcctcttttcctgaattcacatcttggttcgcgttttctcttgcatgatacgcagaatgaattattttttggttacccaaaggcaatctaaaaattacttggagctgagcagggcgcgcagttcagagccccagcaggccgccctgctggtcagcgggacacacagggttagcgcggcggggtgtgggcagcccctgtggctcgagagcctgtcacttaactggtggatccgttatttcccagaatggwtaaattcccctcggggagagcttgggtgaaacaagaggcccaaaatatgtaactcttgatggatgggatcctcctggaatcagcatttcaggctgttctgtttcccggcaactcctgtgacttcctcaaggcggtgcccagcctggccctccctcgcgggggcccaggacgcactccctgcctgtgcctcttaccacgagccgggtgctgtccctccagctcctcctgagcgaggccgtgcactaacagactcgatctcccttcacgcctgtaatcgtccttagagactgacttgtgccacagctgcgggagacagcgctgctgcagggcttggctgaggtggccgcgagcggagctgcacgcgcgctcctggggggcgtggttgggatcggcttctgggagcccctccagcagcgctgtctctgccggcatgtgagtgaaggtgcttctcttaccgtgtgcccstcgaggtaaacctgtaactggaatgtgtgtggagtgtgactgatagaacactacctgattcttatgtatttactgacctgtgtttttttgctactttttttcttttctccccttcccctttccctattttttttcttgccctgatccggaatttctttgccaactgactgcacggtacttctgcttcctgttgttgcttgaaacaaaacaaaaacataaacaaataaaaaacaaaaattccccctcaaaccctgctctccggaaaccaacctgcccttgaatattaacatcctgacaacttcatcatccatcaaccactgcacgcctgcggggactgtcttcctcgtgtggacgattggcaactcgccccccttgacctctccctctcccctgtccctccgctgccttgctctgctgtctctaaagagagtcacaccccaaagcctctttattcttttcggtatgttatcgttcacacttttattaccttgttttcattaattgagatgattttgatgccctgagacgtattatgagtttgcrgtttggcactctgatgctccgtggcatccgcctcgttttatggtttgctttcggtttgcgaattttatttggtcccgtagatacgtacgcatggtttatcgccctgcatgcttttcagagttagacctgtcggtggcatatgccaccgtggccacccgctggcagcttacctgtcctggatgctatgactttgctgaacggagctgctcctgttagcgcgccctgtggctgcgagacgcagctccgcagtggccgataaagcaaacccggccgggctgagccgggccttgtgggggtgcgcggggccggggctgacggggagatgggcggggcaggcagcaggagactcaggccccatccctgggcttttgaaggcgtctacggtgacgtgcagcgcgtgaagatcctgttcaataagaaggagaacgccctagtgcagatggcggacggcaaccaggcccagctgggtaagaggccggggcggccccggggtggagggggcaggggcgggggctgcgttccctctcgggcgcctggtcacgcgggtgctgctcccccagccatgagccacctgaacgggcacaagctgcacgggaagccsatccgcatcacgctctcgaagcaccagaacgtgcagctgccccgygagggccaggaggaccagggcctgaccaaggactacggcaactcacccctgcaccgcttcaagaagccgggctccaagaacttccagaacatattcccgccctcggccackctgcacctctccaacatcccgtgagtgctgggccggggggctcatggggccgggggcgggcaagggctctgcttggctgtcctaccgcgtcggtgtgtggacttctggcgtttccagagtgcaggtcgggcacctcttaccccaaacctgaagtactgcaaggcctggagcttgagccgagggctgctcaagggagggggtcgttggacactttggaggttttggctcaggggatgctccctgtgagaatgtataatgcacacatttatttatttatattttttgaggcgaartcttgctttgtcacccaggctggagtacagtggaacgatctcggttcactgcaacctccgcctcttgggttcaagtgattgtgccacctcagcttcccgagtagctgggactgtaggcacccacaaccacacctggctaatttttgtatttttagtagagacggggtttcaccatattggccaggctgatcttgatctcctgaccttgtgatccgcctgcttcggcctcccaaagtgctgggatacaggcgtgagccaccgcgcctagccacatttatttatttatttatttattttacttattttgagatggagtcacgctctgtcgcccaggctggagtgcagtggcgggatctctgcaagttctgcctcctgggttcatgccactctgctgcctcagcctcccgagtagctgggagggactataggtgcccgccagcacgcccggctaattttttgtatttttagtggaaacggggtttcactgtgttagccaggatggtgtcgatctcctgactttgtgatcaacccgcctcggcctcccaaagtgctgggataacaggtgggagccaccacgcctggcctaatgcacacctttataatcccagtactgtggggggccgggcaggggattgcttgaacccaagagttaagaccagcctgagcaataaagtgagacctctgtctctacaggaamaattggttaaaattagctaggagtggtggtgtgcacgtcaggtcccagctcttccggattgggaggttgaggtgggaggttcacttcgcgctcaggaggttgaggttgcagtgagctgtgattgcactgccagactccaggctgggcggcagagtaagaccctgtctgtaaaaattacataatgcaagtatttggaaatgcaggtacatctggccccaagcatgtcaaccagtagtaagccctttgatatttaacacgttacttgtgaaatgttatcagaaaatcaacaaggggcctggcagagtggctcacgcctatcatcccagcactttaggaggccgaggcaggcagatcacctgaggtcaggagttcaagaccaacctggccaacctggtgaaaccccgtctctactaaaaataaaaaaattagcctggcatggtgttgcgtgcctgtaatcccagctacttgggagactgaggcaggagaatcacttgaacctgcaggcggaggttgtggtgagctgagatcacgccactgtgctcccgcctgggcgacagagcaagattccatctggaaaaaaaaaagtggaggagcgtggtactctgtttctgcaaacttgtagatgcctggtttcgttagaagctgcttcagaccattgtggacatgatttgataccccatttctgggctcctaaaaggccctacgccttccccggctactctgaaaactagtctggggaaagcctcgcggacctgactgggcgcccccacccccacgcggccccaggctcacgcctttctcctcccacaggccctcagtctccgaggaggatctcaaggtmctgttttccagcaatgggggcgtcgtcaaaggattcaagttcttccagtgagtatgaggcgggctgtccctggctctccccaggctgccctgcggccggccctgaccccctgtcttgcaggaaggaccgcaagatggcactgatccagatgggctccgtggaggaggcggtccaggccctcattgacctgcacaaccacgacctcggggagaaccaccacctgcgggtctccttctccaagtccaccatctaggggcacaggcccccacggccgggccccctggcgacaacttccatcattccagagaaaagccactttaaaaacagctgaagtgaccttagcagaccagagattttattttttwaaagagaaatcagtttacctgtttttaaaaaaattaaatctagttcaccttgctcaccctgcggtgacagggacagctcaggctcttggtgactgtggcagcgggagttcccggccctccacacccggggccagaccctcggggccatgccttggtggggcctgtgtcgggcgtggggcctgcaggtgggcgccccgaccacgacttggcttccttgtgccttaaaaaacctgccttcctgcagccacacacccacccggggtgtcctggggacccaaggggtgrgggggtyacaccagagagaggcagggggcctggccggctcctgcaggatcatgcagctggggcgcggcggccgcggctgcgacaccccaaccccagccctctaatcaagtcacgtgattctcccttcaccccgcccccagggccttcccttctgcccccaggcgggctccccgctgctccagctgcggagctggtcgacataatctctgtattatatactttgcagttgcagacgtctgtgcctagcaatatttccagttgaccaaatattctaatcttttttcatttatatgcaaaagaaatagttttaagtaactttttatagcaagatgatacaatggtatgagtgtaatctaaacttccttgtggtattaccttgtatgctgttacttttattttattccttgtaattaagtcacaggcaggacccagtttccagagagcaggcggggccgcccagtgggtcaggcacagggagccccggtcctatcttagagcccctgagcttcagggaaggggcgggcgtgtcgccgcctctggcatcgcctccggttgccttacaccacgccttcacctgcagtcgcctagaaaacttgctctcaaacttcagggttttttyttccttcaaattttggaccaaagtctcatttctgtgttttgcctgcctctgatgctgggacccggaargcgggcgctcctcctgtcttctctgtgctctttctaccgcccccgcgtcctgtcccgggggctctcctaggatcccctttccgtaaaagcgtgtaacaagggtgtaaatatttataattttttatacctgttgtgagacccgaggggcggcggcgcggttttttatggtgacacaaatgtatattttgctaacagcaattccaggctcagtattgtgaccgcggagccacaggggaccccacgcacattccgttgccttacycgatggcttgtgacgcggagagaaccgattaaaaccktttgagaaactcctcccttgtctagccctgtgttcgctgtggacgctgtagaggcaggttggccagtctgtacctggacttcgaataaatcttctgtatcctcgctccgttccgccttcgttgctggcttcctctttctgtgccgcgggcggccccgactcccgcccgggtgtccgccgaagcgccaggtggggccacgggcggggtgggcccggccctgagagtgggggtccctgcgtggggcgtgcgggccagagcgaatgaccaagagccggacctcggtttctgccgctttattgagcatccgcgcggccgcccgcgccctcggcccgccccccgcccgcccccggccccgccgcgctagtcggggaagcggcgcgcctgcatcttgcggaagtagccctcggcctccgcctccgcctcgcgctccgccagccccaggccgcccgcgtggcgccgcagcgtggactcccggctgcccgggcccagcgccccatcggccgcgcccagcgggggcagcccctcgcccgtggccaggttgacggtggccacggccccgaaccgcggctcctcctggtccacgtcgctgaccgacgagccgggggacacgcccgggggcttggccccgccgcggaagccgcgcgccaggtcccccagctcgtagccgccgtcggcctccgccttggccccgccgcccgccgccttccactcccagggcgcgccgccggccgacaggtgcaccacggggtggtgcggcgcgtgcgcgtcgatggtcacgatgctggcggagtcgcggtccgacggcgaccggtactgcgaggagtcggagctggcgctggacgacgacgccgtctcggccgccttggggcccggcgcgcccggagccttggacatggcgatgacctgcagcagccgcggagggttggccactgccgccccgctcttctcggccatcatgagccacttggcgcgcaccccggcgccgcttttgggggacaggccggcccccgtctgcgcgccctcctccgggatgtgcaccagcggcggcggccccgcgcgcggtgggaggatgacccgaggccccagccccggccgcgcctgcacggtggggtagagcgagggcggggccgggccctcgtcctcctcctcttcctcctcctcctcttcctcttcgtcctcctcctcttcctcctcctccgccatgggttcggcgggcgcgcgcaggtgcccggggctggcgtcgtcgggcagccccaggccgcggccctccaggctcttctgcttccactcgctgatgagctgcttggagcgcgaggcgtccagcggcacgtggatggtcatgtggcggcgcgcggggtcgtccagcgagggcgcgctggccctgggcagcgtgtggctgaaggtcaccatgttctccttggccatggggctgcgcggggccagcaggtccacgtccacgctggcgcgcttcaggctgcccagcgaggtcttctcgcgggccacgggccggggcgcgccctccagccgccctgggggccccagctcgtcggtgctcaccgacttattctgctgataaaccgagtcgtggccccgctgcgtcagggcccgcagcgcgtccttggcgggggccggggccgcgggcttctctgcaggtggggcctggaagttgcccaccgcgtggcaggcctgtcggggagaggggtctgggggtgaggcctggggctcagagggctcctcccctgtgatcgttggacttgccgcggggggctctggaccgggggtgggggctggcaagctcttgtccagtgggaccggttcccaccccaaggttgctgacccagcacatcgggcaggtctgagcccacgggattctgactccagcattccaagggcgagacacttcagcacccatgccttccccctaagaccccttcgggacccacgtctatcccctcagacaccctgggcacccgtgcctcccccctagagcccctgggcacccatgcctcccccctcagaccctctgggccagccccccgccagaacccctgggaaccatgcctcacccctcaggctaccagcctcccctgtcagaccccctgagcctgcctcccacctcagacccctgggccagcctccccactcaggccctgtgggcactcatgcctcccccctcagatcccctgggaacccatgccgacccccatcagaacctgccactcaccaggtaggcagcgatgcccgccccgatgaggaagccggcatacacgtccacagggtggctgcggtactgcgtgatctgcgtgagcccgcatacgcccgcggcgatggcaaaggcgaagaccaggatgggcttcagcagcttggtggtgtccgagatgaccgagttgaagtacatctggggcatgggggttggggtcagggagggctccccacgggtcagcaagagggcctgggaagggcagtgaggggccggactcaccgacacatagaccgcggcgaaggctgacagcgtggcgtgctgggacgggaaggtcttcctgtaagaggcgtccagcgtgagccccgcccacctggggaccccagctccagtggcctctctgtgtctctgtttccccgcatgttcaccggggcggaagaaggctcccagtcaggggagttgggggtccggctcaccgtgcagacaggatggcgtggatgtcgtggccggagcagatgtcctgcgtgatgtaggggttgacctcgcaggacgtgcccaggagagtgtagttgggcttgcagacggtgaggaagaagggagtgtggtaacccgtggccagctggatcacgtccgtcaccagggctgtggcacacaggccgaacacgtggacacctgcggggcggaaggctcggccaggcggggagctggggacccgggacagccccaccccctgcatgtggaggtagctcagggtcggggcgcgtcccgcaactcacccacaaaccgcaccgtacgccgcaggaaggagttgaagttgcagccgccggcgttgatgctgccctccgccccggcgggccccccggcacggccccacagccgggactgcagacagtacaacatgccctcggccaccatgatctgccaacagggagggggcgctcaggcctcggtgcccacagggagggggcgctcaggcgggctcccatctgcagtgcccacaggctggcacaggccccggtgtggatgttcaccgaggtggcgggggtggctcccagccgtggtgcccacaggctggcacaggccccggtgtggatgttcaccgaggtggcagtggctgcggtgcccacaggctggcacaggccccggtgtggatgttcaccgacaggccccagtgtggatgttcaccgaggtggcgggggtgggctcccagccgtggtgcccacaggctggcacaggccccggtgcaggtgctcaccgaggcggcaggggccgcgaaggccaagctgagcagcatcagcagcgggatgagctcctcgttggtctccacgtagggcatggagagagtgcggtcatagcactggaagcccaccttggccggcttgaagaggtcggtcagctccaggaagtacaaggatacgatggaagaagccactatgggcagctgtggggacaaggtgggccaggttcaccctgctctccctcgcggaggcgtctgtccagccctccatgaattcagggccatccaccgtctcactcacctatccacagatccaacccgctcccagccactctttcccccatgagttattcatccatccacagatgctccatctgtaactcgaccatctacacatcacacacccactcactcatcctccatccacccaaacacctatgcccccaacatccacccactcaccgacccatcacccacccatccatccactgggaaccatccatccattcatccatccacccacccacccatcatctatccacccattctccacccatgcacc

SEQ ID NO: 94880 - DNA, 28352 bp, Homo sapiens
  misc_feature (1)...(28352): n = A,T,C or G
cgcgggccgcagagacctggagggagacagagacccggagggagacagagacagaaagacggcggcagtcaagagacacaaggaagatgaccgggagagacgagagagacacagagacagagaggggcagaggcggagatgcttggggacagagatggacacgggaggtcctgccgcgtgcgtcagccgtgggaccagccaggctccggggcatgccctsgtgggacttctctccccgcaaattgtagtttcccgaaagccaggcccacaagggtgtgggaatgcgcgggtgggtgggcaggtgacgactggggacgtgtgtttgggcaggtaggtgggcaggagggaggatagccacgtagacctgtcggtggccggctggcggggcacgtcggaggcggcaggaatgggrcggccccattcgcacccacacttgctcctcccttagagccataccccaggccccacggggaaccacccagcaaggcggctggcccccacccttcctctgcctgccccatgcgctgggccccaaaaggtgagcacagtgaccctcacagactcacagccaagtggaggcattgacaactggggaaaccgaggcctgagaggggcggcgacctccgctgtggggacacagctcccagcagcccagtcctggccctgcggccacagccccaggtggcacccacctttaaatagcaccaggctgaagacatggcgaccagcctgtcctgccggggagccctctggagggataaccggtctggctggacgctgggatgccttcttggtggctcaggcatctcctgaccctctcttcctggcttaggcgggtcacacagagggtgtggcaggtgccacagtctcagggacaggggtccccatggctgaggtccagcctggcctggcttcccacactagagccctgtggccaacaccccaagcttcggttccgcctctgtaaaatgggccagtaaagagacgtctggaggaagacaatgagaccctccacggagcacgctgggcagagggcgcggcaccagacactgaagaaatgtccaccgccttctcgccagcaggagcccaggtcttcccttcttagagtgtccgccccccaccgcggaagggtgatctgagggccttgtgagaaatgatggggatgggacccacagcggtgagactggccccaccccaggcgtctgagtttctttaatgacacctcggaaacatcactcatataccacacaattcacccacttacactgtacagttcagtgattttattttattattatttctttgagacggagtctggctctgtcacccagactggagtgcagtggtgcgatctcggctcactgcaaactctgcctccctggttcaagcgattctcctgcctcagcctcctgagtagctgggattacaggcacctgccaccacacccagctaatttttgtatttttagtagagacagagttttaccatgttggccaggctggtctcaaactcctgacctcgtgatctacctgcttctgcctcccaaagtgctgggattacaggcatgagccactgcacccagccagttcagtgattttagtacctcgtagagttgtgcaaccaccacgactgtctagttccagaagattccatcaccgcaagaagaagccccatcagctgtcactcatcccctctgccagcccccggcacccacacatccccttcctgcctctgtggatgggcctgttgtggacatttcatataaaggggatcacacactgtgtgtccttctgtgtctggcgtctttcactgagcatgacatcctcaaggtgcatccgcgctgtggctggggcagagccttgctccttttcacgcctgtaatcccagctactcaggaggctgaggcaggagaatctatacaacccaggaggcggaggttgcaatgagctgagatcatgccactgccctccagcctgggcgacagagcgagactctgtctcaaacaaaaacaacaacaacaaacaccgatcagggctgggctggcgcacgctttgtattgagtggtgtcttcctctttgtagcctctgtggttggcccaaaggtaagtccccaccctgatccctagaatgtgacatttgccttatttggaaaaagagtctcaatatattgacaccatgaagatctgaacgatatggagaagattgtcctggggcatcctaaacgcggtcacaatacggagacaggaggagatttcacacaggcagacgaggaggctgcagtgcgaccacagagaccgagacgggagtgatgtggccgcaggccaagcacacctggagccttcaaaagctgggagaggcaggaaggagccccagggcctctggagggagcgaggcctccacacaccttgacttcagccccgcagtcctgattttggacttttcatttccagaaatgtaagaaaatgaacgttgctttaaggcaccgagtttgtggtaatttgtcacaggggctccagggacctgggccatccccttccatctagcgattctcgactctgtggggtttgcttggttgggttttgttttgttttgtttttagacagagtctcgctctgtcgcccaggccggagggcagtggtgtgatctcggctccctgcaacctccgcctcccgggttcaagtgattcttctgcctcagcctcctgaatagctgggattacaggcacccaccatgcccggctaatttttgttatttttattggagatgagggtttcaccatgttagccaggctggtctccagctcccggcctcaggggatccgcccgcctcggcctcccgtagtgctgggatgacaggcgggagccaccacgcccggccagatatatggtttcccacttttgatggtgatattaagtctcttcgtaaaacttaagcaagaaaaataattaatgttgtatttattaatttatttttgagacggagtctcgctctgtcgttcaggctggagtgcagcggcgagatctcagctcactgcaacctcagtctcttggattcaagcatttctcttacctcagcctcccaagtagctgggattacaggcaccacccactaccacgtccggctaatttttgaatttttagtggagacagggtttcaccacgttggccaggccagtctcgaactcctgacctcaggggatctgcctgcctcagcctcccaaagtgctggaattacaggcatgagccaccatgaccagccaatattgcatttacttaatacaggagtggtggagacagatgtagttaaaataaatggtggggctggggggtggtggcggctacagagttgcgaggctggaatttgggcaatgagctgtttcagaaactgctgtcttattccaaaacccagattatgttcttttttttttgagacagggtctcgctctgtcgcccaggctggagtgcagtggctcaatcacagctcactgcagcctctgcctcctggctcaagcaattctacatcttcccacctcagcctcccaagtagatggggccacaggcaggcaccatcacagccaacaaaatttttttgtattatttgtagtgatggggtttggctacattgcccaaggctggagtgcagtggtgcgatcttggctcactgtaacctccacctctcaggttcaagtgattttcctcccttggcctcctgagtagctgggattacaggcacaggccaccatgcccggctaattttcgtatttttagtagagacggggtttcaccatgttggccaggctggtctcaaactcctgacctcacgtgatccgcccgcctcggcctcccaaagtgctgggatctcatcaaataaaagaaaagactaacgcataaggaatggtgaaatagttcagaagtcggtttccacccaagtttctggctctgccagcctgcaggggtgcagggggtgtctgtaggtcttggcacaccaggcctggctgattcagggccaggcaggtgaccccagtagtgggtgaggtctgaggtcacagcccgctggggcaccctgaggtggactgaggcaggtgagggagggtgctgccgtctgtcgaaaacattcccagccggtggcatcagtgcgctcacgcaggcgtcggcagcagcgtctggaatgtgctgtaaggaggctgccaggcccttccagagtgaggtcgagtcctcgttctgggctgatggggaaactgaagtgccagggtttggggatggaggatagcttgagctgaggcccccgagcccccgtgtggtcaggccccctaactgagccccagctacatctttgctccctctccccagccccactctgctcaaattgctcctctgtccacgcttgttcctgcctcagggcctttgcacttgttttgttttgagacagggtcctgttctgtcaacccaggctggagtacagtggcgccatctcagctcactgcagtctaaacctcctgggctcaagcagtcctcctgcctcagcctcccgagtatctgggaccacaggtgtgcaccaccatgcctggctaatttctttttttcctttggtggagactgggtctcagtatctcggttgcccaaggcttgtctggaactcctgggctcaagcgatcctcccgccgcagcctcccaaagtgctgggattacaggcctgaggcactgaactgacctccctttgcacttttttttttttgagacaggttctcgctctgtcacccaggctggagtgcagtggcgagatcttggctcactgcaacctccgcctcccgggttcaagcgattctcctgcctcagcctcccgagtagctgggattacaggtgcccgccaccacccccggataatttttgtatttttactagagacggggttttgccatgttgccaggcatgcttgcgtatttgccaagctggtctcgaactctgaccttaggtgatccgcccgcctcagcctcccaaagtgctgggatgacaggcctgagccaccaaaccagctcccctttgcaactgggatattagcctggaacacagttacccccagatattcctattctcacccttcccaagcctactgccccacagcaggcgctcccgcctctggcctgctgccccggctgaacgacacaggtgggcacaccttccaggttccattctaaagctcccgccctgctcctcctaggcaggatcacgcggagaccagggcaggctctaggctccgaggtttatttcattcccttgacctcaccccacttagcaggtgaatccaagcctgccgctccattcggctcctgcccctgagggcttggggattggagggtaaactgaagctggaggctgggagtctcgcggactggggctttctctccttgcagcctccctgaggtcgcacgtgctgtgtcttccagcaacttggtggccctctctgagcctcagcttcctccatgatagacggcatcctaatgactcttacccaaaagttgtcgttggagcaatgaaggttgcggacaggaatctctaaattgcagatgctgtcctcgttattagatgagtatgccttgaaaaaaaaaaaaaaaaagccgggcacggtggcggcgtctgcaatcccagcgctttgggaagccgaggggcgaggatctctttaccccagcagttcgaagctgcactgagctatgatcacgccactgcactccagcctgggccacaacgcgtccaaaacaaaaccaaaaaagaaagaaaaacagaaaaaaagtccggatttgaggtcctcgggaaaacagcctgagagtgcctcccagttgccacggcaacagctctgtcccgccccctccctttaaaaacagcaggaggaaccaatcagagcgtccaccggcgcatgccttcgcgcctccgctgcatcctgggagtctacttccggctggggtttcccttcgcagcctccgtcgaccatgaaaccacaactcccggcaggcggcgcgggcgcatgcgcaggcgcgggccggtggggtggcctggagcggcgtgcgtaatgtcggcactttgctggggccgcggagcggcggggctcaaacgagccctacggccttgcggccgcccgggactccccggcaaagaaggtaacacaaagggagacggccaggcagcccgggggccacggcgygggctcctccccgcgcggccggggcctttggcgctttgacctttgcctctttgcacctgggcgtgcgcagcccaccgacccggccccgctttccactcgcccttgcccgcttttcgactgaggctcctccgtgcagtctgacctttgactcgtggtttcttatgcagcctcctgaccccaggtgtggtgtttagggctcttaacctttgacctgctgcacctcgagtgcgaggaaccctctctcggcggttccgcgcccgtgttcgccgcggcggggcccttccaccttcgctgtcttagtttctttccaacttaagcccgtgctccgagagtttccgctgcgtttagggctcctttgcccttcgacccttcggcttctgcctttatggaggcccccgcccacacgcccggcccygctcagccgctctcgtctttcccgcagggaccgccggtggcgtctgcggcyccaggaggagctcgtccgccagcccccaggagcaagaccaagaccgcaggaaggactggggccacgtggagctgctggagggtgagcgcgacccccacggcggcccgggagaggagagtccgctccctgctgccgggagaaaaggcaaaggctcagattctgagacaggctgagggcrgtctccacctctcgggtcccaggacacgcccagacggcgttgctgaaacatctcttgcaccrctcatgggccctgtccttgctgagcaggctccttcctggagctctcgtaattccccctccccagaaccccaccaggtgctcccactttccagggacataggtgaggcccaagattatgtctggagagaccccccccccsgccccgccgccaaggccacatgtgcagagccaggatgtgaascctgaactgactcagctgtcctggcttggctctggggggtaggcgcctaatggagactggatgactgcgaaacttgggagggacagcccaggctccagcggtggcaggccctcgtcctggcctggctggtggtgtgggagggaggtgggagcttccctgtgcttgcttcccgccggtgcttctgtcccacatcctgtctgcgtccattaggcagccgggaagggagaggcgggagaacctttataaagggaaaaaacctggccaggtgcggtggctcacgcctgtaatcccagcacttttgggtggccgaggtgggcggatcaagaggtcgggggttcgaggcctggtgcggtggctcacgcctgtactcccagcacttttgggtggccaaggtgggcggatcaagaggtcaagggtccgaggcctggtgcggtggctcacgcctgtaatcccagcactttgggaggccgaggcgggcggatcaagaggtcatgagttcaagaccagcctggccaacatggtgaaacactgtctctactaaaaatacaaaaattagctgggcatggtggtgaacgcctgcagtgccagctactcaggaggctgaggcaggaaaatcgcttgaacccggggagactgagacaggagaatcgcttgaacccggaaggtggaggttgcggtgagccgagatcatgccattgcactctagcctgggcaacgagggaaattccatctcaaaaacaaaacaaaacaaaacaaagctctcaactgttaatcctaaaagtatctcctgagttttggagcactctgaaggcggacatcacgcttgtctttttatttcagcaattttttttttcttgagacggattctcaatctgttgctaggctggagtgcaatggtgcgatcttggctcactgcagcctccgcctcccgagttcaagcaattctcctgcctcaacctcccgagtagctggaactacaggcgcgcaccaccacgcccggttaatttttcgtatttttagtagggacggggtttcaccgtgttagccaggatggtcttgatctcctgacctcgtgatccgcctgcctcggcctcctaaagtgctgggattacaggcgtgagccaccacatctggacacctgggtccccccccccctttttttttttgagacagggtcctgctctgtctctcaggctgcagcacggtggcctgatcacggctcacagcagccaggaactcctaggcttaggtgattctttcacctcagccaccggagtagctgggaccacaggtgcgcggccctgtacccggcttatttcaacagtcttttttttttagatggattattgttctgttgcccaggctggagttcaatggcgctatcttgagtcactgcaacctctgcctcccaggctcaagcaattctcctgcctcagcctcccaagtagctggtactatagacacaygccaccacgcccagctaattttttggatttctaatagagacggggtttcaccatgttggccaggctggtctcgaactcctgaccttaggtgatcttcctgcctcggcctcccaaagtgctgggatgaccgacgtgagccgccatgcccggccagcaatagatttccaacaaggcttctttaaasagatacagaamacttaggcattgattggttggcaaaaatgcaacctgaggcggcacgagcaggagccgcgttttccctgcgagctagtggctcagcgtccaccggtgtagacactgggagcctaggagtgtgtgtgtggcagctccaccagctgggggggtcttgctgaggcggggtgcgaacttgcaggccatggttgagccagggagtgggcggttcagggtcctgggagtctgtgcagaggccctgagctagacagtgagaggggcaggggaggcgggggccacctggatagattctggaggcamgcccagaggaggtactgagaggtggacggagggagttgtcacagaccccrggttctgggcctgtgcacctggagggtctgagcggccagtgaccggggagacgtggtgctgcaggtttcggtggcagcttgttagggctsctgagttctgtgaggctcgggtggggaggtgcggaggtggtggggtgcgtgtgtctggaaagcagcgggcagaccttacaacgttgttggcaagtatgaggaattcacgccttgggtcccagcgagctcagccacctgcacctcctggcctggctcagggtccagagagacgggtgctcgaatggggagggggtccctctcatgtcctcgccttctgcccctcacagtgctccaggcgcgggtgcggcagctgcaggctgagagcgtgtcggaggtggtggtgaacagggtggatgtggcgcggctcccagaatgtggcagtggagatggtagcctccagccacccaggaaggtccagatgggggccaaggatgccaccccggtgccctgtggccgctgggcaaagatactggagaaggataagcggacccagcagatgcgtatgcagcggttgaaggcgaagctgcagatgccattccagagcggggagttcaaggcgctgaccaggcgcctgcaggtggagccccggctcctgagcaagcagatggcygggtgcctggaggactgcacgcgccaggcccccgagagcccctgggaggagcagctggcccggctgctgcaggaggcccctgggaagctgagcctcgatgtggagcaggccccgtcggggcagcactcgcaggcccagctctcaggtcagcagcagaggctcctggccttcttcaagtgctgcctgctcactgaccagctgcccctygcccaccacctgctggtcgtccaccacggccagcggcagaagcggaagctgctcacgctggacatgtacaacgccgtgatgcttggctgggcgcggcaggtgagtgcagccgggagccgggccacctgccctggtngttggagacaggaacttgccctcatttagactggacttttctctcttagcccccaggttcaagtsctttgttttttattttaataattcttttaggcttttcaaatacaaatcacgtgtgactctcaaattttgaaaatgaccaaaaaagtagggagaaattctgctaatgccttgagcatttccttccgttctttctcrgggctcgtgaatctgtctgggcaggggtgcttttggcctcgtcggggggcagcctgcagagccctcgtcaggatgaggctttggtgttggggttgactttgctcctttttctggtttcctgaggtggaaggtcgggctgctgtgctgagatccttctgtgtgaaatgtgggtgttcactggcgccgcattccctctgagcacagctttagatgtatcccacccatcttcgttgtggttcatctggagtattttccaatttcccttgccgttttctttttgtttgtttatttatttgttttctgggacatactctccctgttactaggttggagtgcggtggtgcgatctcggctcatggccacctccacctcccaggttcaagtgattatcctgcctcagcctcctaagtagctggagttacaggtgcccgccaccacccccgattaatttttgtattttgagtagagacggggktttcaccgtgttggccaagctggtctcaaactcctgacctcgtgatctgcccccctgagcctcccgaggagctgagattacaggcgtgagccaccgtatccggccaaagtttctcctcggaactcttggttgttttggagggtgttgtttacacaccctttcaaagcagcaaacgttcccagctttctccccccccatgatccttcagccctaatttgagaaacaacagtaaaagcttctcttaatatttgggtaaacatgggatactattatattaaaatacagatatcgcaatattaagaccaattcgtggtagagaacttgatgtgcttctttattaacgcatcaaacagcgaaattcaggatcaggtggggccagtcttgcggtgaagtccgcagtgctcttaccgcgaggtggaggcggcgtgctgcctggttcctccttgctgcagggggcgccagactccgggaggactgaggatgagggtcgtgtattttcccctccaaggtcacaagccccctggattccctgggcagagagcccacactgtaacagggcgcttttgggatcggcccctacgaaagtgtcccaaacctggcggcttgcacagcagaaacgcactcttagcacgagcccagaagtctggaatcaagatgtctgcagacccgaagtctctccagaggctctagcaggggcccctcctgcctctcccagcgttccggggtggccagcagtcctggatgtcgctggactgcgagctcagcctcccgagcagctgggattacaggcgtgtgccaccacccccggataattgttttaatttttatttttagtagaggtggggtttcagcatgttagccaggctaaggcattgcttctatcttttttttttttttttttttgagatagactctctgtctgttgcccaggctagggtgcagtgccatgatctcggctcactacagcctccgcctcctgggttcaataattctccctgccgcagcctcctgagtggctgggattacagggactcaccaccacgcccggccaatttttgtatttttagtagagacgggcttttgccatgttggccgggctggtctcaaactcctgacctcaggtaatccgcccgcctcagcctccctaagtgctgggattacaggcgtgagcgaccgcgcccggccacgtattctaaccagcaccatccagtagaactttctatgatgttgggaattttccgcatctgccaacagctgtgtgtgctactgaacacttgaagctggtgaaagggaagaactgaatatttcaatttaaggactatgtgtggccagtgaggtctaccatacagaggttgtttagaaactgccccaaaaccggccgggcacagtggctcacgcctgtaatcccagcactttgggaggctgaggcsggcrgatcacgaggtcaggagatgagaccatcctggctaacacagtgaaaccccgtctctactaaaaatatacaaaaaattagccgggtgtggtggcgggcgcctgcagtcccagctacttgggaggctgaggcaggaggatggagtgaacctgggaggcagagcttgcagtgagccgagatcgagccactgcactccagcctgggcgacagagcgagactccgtctcaaaaaaaaaaaaaaaaaaaaatgccccaaaactcatgtctctggtctctggtgtgtggccacctcatgtcacagcatgtcttcagctgcaggactatggggtgggaggatgtaagggaatttttttccctttggaatagtctgttacagttacaggccactcttaagcagccactgggtcaaaggagaaattgctcagaacagggatgtcaggaaaaatgaatacaagaaaaaaattatatatatatgttattttayatatatatatatakrtgtgtgtgtgtatattttaagacagagtctccaagtctgtcgacagcaaagtttctgtctcccaggctggagtgcagtggtgagatcccggcttaccgcaatttccgctttctgcgttcaagtgattctcctgccccaggctcccagtagctgagattacaggcatgtgccaccacgcccagctaatttttttttttttttgtatttttagtggagggagcacaggcatgagccaccacgcccagctaattttttttttttttttttggatttttagtggagatggggtttcactatgttggccaggctggtcttaaactcctgaccttgtgatcctcctgtcttggcctcccaaagtgctggggttacaggcatgagccactgtgcctggccaaaaattaaatgaaaaaaaaaaaaattgcaggggatatttaagctatacatggctgggcgtggtggctcacacctgtaatcccagcactttgggaggccgaggcgggtggatcccctgaggtcaggagttggagaccagcctggccaacagggcgaaaccccatctctactaaaaatacaaaataattagctgggtgtggtggcatgygcctgtagtcccagctactcaggaggctgaggcaggagaatcggttgaacccgggaggcggaggttgacagtgagctgagattgcgccactgcactccagcctgggcgacagagcgagactctatctaaaaaaataattaaataaaatttccaaagaagaagtaaactatgaagttcgaaaacacttggagataatgaaaatgaaaacaccacctgtcagaagtcctgggatgcagctgacacagtgctcgcagggtaatttatagtcacaaaatgcctatattcggaaaggtgatggccgggcgcggtggtgcacacctgtcatcccagcactttgggaggctgaggctggcggatcacgatgtcaggagttcgagaccagcctggccagcatggtgaaaccccgtatctgctaagaatacaaaaaattagctggtgtggtggcgtgtgcctgtaatcccagctactcaggaggctgaggcaggagaagtgctggaacctgggaggcagagaacccggcccagctgagattgtgccactgcactccagcctgggcaacagagcaagactccatcttggggggaaaaaaagtgaaacatctcagaccaaatacgtcacctttcaccttaggaaactagaagaagaagctgtcactaaacctaaagcaagtagatgagaggaagttacaaagattaaaacaaatcgatgaaatggaaggcagaaacagcagagaacagtcaagccaagtcagtcctttgaaaagatccacacaattgacaaatctggaggtttaacaagctgcctcccagaggaacgtgaacctcccacagtcccacctggcgggccatgcggctgcctctgcaggtggagcttgtgtgtcagaacctcagggggatgcatcggtctgcccagctggccactcctgcctggtgaccctgtcccctgctgagctggtggctacagagaaggggtctccagggagcagggaggatgtggaggttgggccatccccccagaccctcaccctggcttggtctcccagggtgccttcaaggagctggtatatgtgttattcatggtgaaggatgccggcttgacyccggacctgctgtcctatgcggctgccctccagtgcatggggaggcaggaccaggacgccgggaccatcgaaaggtaggtggtgtcgggagggcccccaccccccaccatgtccctsccagggttttaagatctgggacggtgcctgggctgggggctggggacccccagagggcctgacagccacaccgagacctgcaggctagcaggaggtggtcacgaggttcccctggggtctgtggaagcccagcgtggggctggcccgtccctcgagcaggcngcctgcaccacaggtgtctggaacagatgagccaggaggggctgaagctgcaggcactcttcaccgccgttctgctgtctgaggaggatcgggccactgttctgaaggccgtgcacaaggtgaagcccaccttcagcctcccgccgcagctgccgcccccggtcaacacctccaagctgctcagggacgtgtatgccaaggtgagcccacgtgggccccggcagacttcagtcctyatagctgccctttgggggttcctggagcctcagctcagaccaatgggcctccccggtgcccagggctcacctgggctgggccctgaattcctcccttcctcctctgagaagatgggaggacccagagctgggagggtcttggccctgagggtgtgggctcagggggacgaggtggtcgggsgccgcagagagagggtggggtgacaggagagcagtgcgtttgagtggggctgccaggtgcacgcagtgggctcgtctgttactgaggtgtaattcacctgccataaaaccctcttaaaggtgtaattcagcgattttagtgtagtcacggttgtctaattctagaatgttccatcaccctaaaaggaagcctcgtccccatccccgtcactccccatcccctccccatctgtggatgagtctgctctggacattccatagaaatgggaccacacactgcgagaccttttgtgtttggcatctcccactgagcgtgacgtcctcatggtgcctccgggaggcgacctgggtcagggctgagtcatgctccggtgcgtggatggccgcgccgtgcccgtctgttcgtccgtttatgggacgttgggctgtttctacttatcgactgcgagtcatgcagctgtgaacgtttgtgtacaagcttttatgtggacgtgcgtctttgattctcaaagcgctaggctttagttgttatttttaattcatctatttctggatgggtcacattcatacagttctgagtttgaggagaaaacagccaacatctgggggtgcagtgaacggtctccccaggctctgccagctcccagcatcaccgcccctgccaccccctgcacggtgcccagtgtcccttctagaggggtcgaggccaggagggtcaaggcctttggtttgcactgctggcactgactttacccgcagcccgcctttccccgygtcagcgatagccaccagcaacttgcaggagacgcagaaacgcgtgcacccatgctgtctcggggtcctgggagggcaggtcgccctctggcaagcccccaacctcactacycccatccctgcaggatgggcgtgtgtcctacccgaagctgcacctgcccttgaagaccctgcagtgcctcyttgagaagcagctccacatggagctggccagcagggtgtgcgtggtgtccgtggagaagcccacgttgccaagcaaggaggtcaagcacgcggtaggggctgagccggggtcccgtgtccgccgcaggggctgagccggggtcgcgtgtccaccgcacgggctgagccggggtcccgtgtccgccgcaggggctgagccggggtcgcgtgtccgccgcaggggctgagctccgtgtatgcggttgaattgctcatgccctggtctggtcatgcagggcctaggaactcagcctggctgccgctcagggaaaacttgtggggtcccgaggttgggtcttggcctgtgcttctgcgcacactgcagctgggcttttgctcttggctgcgtcaggcacgctgaagccggcagagggcaggccggggtgaggagctacccggaacacacagcagggaccttgagggccatgaggtctctgcagggagctgcggtgacccccgtcctgtgagcctgggtcccaccagctgccacggggctcaccgggnccgttcatcccccgcagcggaagaccctgaagaccctgcgggaccaatgggagaaagcactgtgccgggcgctgcgggagaccaagaaccgcctagagcgcgaggtgtacgagggccggttctcactttaccccttcctgtgcctgctggacgagcgcgaggtggtgcggatgctcctgcaggtgcgtcttcctccgcgcggccgggtccccgggcggggcgggcaggcactcacggctgccttccgcaggtcctgcaggcgctgcccgcccaaggtgagtccttcaccaccctggcccgggagctgagtgcgcgyactttcagccggcacgtggtgcagaggcagcgggtcagtggccaggtgcaggcgctgcagaaccactacaggaagtacctctgcttgctggcctccgacgccgaggtgaggctcgcaccccctctcctcctggctggggccagtggtgggtgggcgctctccctccctggagcagccgggtttgcacccaagcttcagtctgttcatctgtatgcttgggctgacagatgccccaccgggcgtcaggcacgggcggtggggcatctagctcaggggccccggtgcccagcgccctgaccgccctgtcctacaggtgcccgagccctgcctgccgcggcagtactgggaggmgctgggggcscccgaggccctgcgggagcagccctggcccctgccagtgcagatggagctgggcaagctgctggcggagatgctggtgcaggctacgcagatgccatgcagcctggacaagccgcatcrttcctctcggcttgtccccgtgctctaccacgtgtattccttccgcaacgtccagcaggtgccaggcagtgccctcctgarctggggggcatcccgctgggaggaccagggaccccatggggttggcgcctttgggcggagccttgatctcagcgcagccgtcagtacctcccaggactcgggacacaccatgggtgtccatgcagstgtccggccgtttctggaggtggcttctgttcgtgggaggccacactggtttcttgttggccggggagccggcccctctcacccaagtttaaggggtgggaacaggaaagccccagcaccggggccctgacccgtctgcctgtcgcaccccagatcggcatcctgaagccgcacccggcctacgtgcagctgctggagaaggccgcggarcccacgctgaccttcgaggcggtggatgtacccatgctttgccccccgctgccctggacatcgccgcactctggtgcyttcctgctcagccccaccaagctgatgcgcacggtggaaggcgccacgcagcaccaggagctgctggaaacctgcccgcccaccgcgctgcatggcgcactggacgccctcacccaactgggcaactgcgcctggcgcgtcaacgggcgcgtgctggacctggtgctgcagctcttccaggccaagggctgcccccagctaggcgtgccggccccgccctccgaggcgccccagccgcccgaggcccacctgccgcacagcgccgcgccygcccgcaaggccgagctgcrccgtgagctggcgcactgccagaaggtggcccgggagatgcacagcctgcgggcggaggcgctgtaccgcctctcgctggcgcagcacctgcgggaccgcgtcttctggctgccgcacaacatggacttccgcggccgcacctacccctgcccgccgcacttcaaccacctgggcagcgacgtggcgcgggccctgctggagttcgcccagggccgcccgctcggcccgcacggcctggattggctcaagatccacctggtcaatctcacggggttgaagaagcgggagccgctgcggaagcgcctggcctttgcggaggaggtgatggatgacatcctggactccgcggaccaacccttgacggtaggggcggggcccccgcattccccgccctcccggcacccccgcgccctcccccggcgcccccgcgccctcccccggcgcccccgcgccccctgcccgtcttcctcctcccctccccctcccctggcgccccctgcccgtcttcctcctcccctccccctcccctggcgcccccacgtcccccgcccgctctcctcccccgcgccccctgcccgtcctgcttctcccttctcccctgccccagggcccccgcgttccccacgttcccccctcccctkcatccgccgagctgcttcctcccccggcgcccccaggtcctctgtccaccctcctcccccggcagctccggacacgcttgtttcagcccggtccacccgcagctcccatcctccatccgtggctatggagaactcatccagccaccgccccgtctctcgcccacatgcgtcccgtgttcactatcacgggtgtgcgtctcctccccatttcccacctccccgcaacacagcctcccagcgggctcagggatcgggcccgggcctcactgccccccatccgctgtccccgcagggccgaaagtggtggatgggcgcggaggaaccctggcagacgctggcctgctgtatggaggtggcgaacgctgtgcgcgcctccgaccctgccgcctatgtctcccacctccccgtccatcaggtgagccagctgggtctggcccccgaggccgtgcagtgtgcactgggcctggggctcgacttgagggtgtgagatttcaccttcgctcgtggtattctctggaggtggtcctagagtgtgcgggagccatggctcctggtctctcccgggagcgtgcgggggctccggtgcacttggctggggggtgcacggccctaggaacggctcgacctggggggtggtttggggtcccacacgtctctgcctctctagcttccatctcccgtttgccgccccttcctcaggacggctcttgcaacggcctgcagcattatgctgctctgggccgcgacagcgtgggcgccgcctccgtcaacctggagccctcggatgtgccgcaggacgtgtacagcggcgtggccgcgcaggtagggtgtgccctgctgcccgggggcatctcggcgtgggggcartgtgagccctgagtctcggccccaggtgccctcaccttggcctgtcctgaggatgtggtggggctggggcgggggcttcatgggtgcttggtggcccctgggctgctagcggggctgacccgcgcccccggcccacccgcsgtgcaggtggaggtgttccgtaggcaggacgcccagcggggcatgcgggtggcacaggtgctggaaggtttcatcacccgcaaggtggtgaagcagacggtgatgacggtggtgtacggggtcacgcgctatggygggcgcctgcagattgagaagcgcctccgggagctgagcgactttccccaggtgcgccaggcmtgtcgcgctgcgaacacgttggtttcactgccatttaaaactcagacgggtgtgcccccgacccagcctcccagcaggagccctggctgctcccccagaccactggctgcctgttagggcttgggcgtttcttgctgactgcgtgggcgccaggccccattccccygcccccctgctaggccctaggccttgggcctcagtggctctgaaataggggggagtagggcgtgaacgggccagcccctgaggacctgcacctgctgcccgccctctgcaggagttcgtgtgggaggcctctcactatctcgtacgccaggtcttcaagagtctacaggagatgttctcggggacccgggccatccaggtacgtcctgtcctgtccccgctcggccaggactccctaagcaagtggacgggatccccggcctgagcccyctgccctgagacggcctgtgtcccacagcactggctgaccgagagtgcccgcctcatctcccacatgggctctgtggtggagtgggtcacacccctgggcgtccccgtcatccagccstatcgcctggactccaaggtcaaggtcagtgtaccaccccatccctccccagtgtgccaccatcccagtgtaacagcgtcccagtgtaccagtgccccagcgtaccaccaccccagtgtaccaccgccccagtgtgccaccccatcccgcgccagtgtgccaccatcctagcgtgccactaccccagtgtaccaccacctcaatgtaccaccaccgtgctgggcctcgggtgggactcaccggccccttcccctttttagcaaataggaggtggaattcagagcatcacctacacccacaayggagacatcagccggtgagtggggggcccgggctggggcctggccgggggtctggagagcagccacggtggagacagcggccagttaggggtgtccctgggccgcccccaccggcacctgttccgtcctcagaaagcccaacacacgtaagcagaagaacggcttcccgcccaacttcatccactcgctggactcctcccacatgatgctcaccgccctgcactgctacaggtgggcgtctccggacggcgtgggtgccgctcgcctcccaggggcgtcttctggctagcagggcacagctggcaaggctgggtctagctgggggcagggactgggcagagtggatctgctgtgtctgtggggcctgtgtagaggccctgaggctgtgtgccccgaatgtaggtggtcctggcagctcccctcctgtggcccgacagggagagccgagcatgggcgctgccccttcctgctgggcatttcttggcaccgcgatgtgtggttagatctggagcacgtggaggtcgttccagcagaatctaccggccacgggagctgggaatgctcaggatgcggggtggtggccctggcaggaggggacctcgtagccgccctcggagctgaggctcccacagcagcgtggggggcggcaggggtggggcgaggaggcttctgggaacatttcctccccctgtactgatacctaacccaggatgtttggggaggggcggggcgaggggtggggcgaggcctgcaggagggtgggcttccctggacctcaagtggagggggctgagcgcagggccaggatgctggtcactgggtggccctgtgagctcccctcccttcaggagtcctccgctctgccacaggaagggcctgaccttcgtctctgtgcacgactgttactggactcacgcagctgatgtctccgtcatgaaccaggtgcccccgtagtctgagcctcagtccacccatgggtggggcccccacactggggcgttgggtaggggtggtgcccagagcctgcctgatcacccctggggatcctctgactcctgcccaggtgtgccgggagcagtttgtccgcttgcacagcgagcccatcctgcaggacctgtccagattcctggtcaagcggttctgctctgagtaaggcgctccctgaccccaactacctggattccccccccaccccaaaacctggcctcagcctcaccccaccctgcttccaaccccaggccccagaagatcttggaggccagccagctgaaggagacactgcaggcggtgcccaagccaggtaggcgggtgggcagcctcgcaagggtggctcgaactgcgggccagggcggggctttcccgccacccacgccgtccgctctgcttcctccgcaggggccttcgacctggagcaggtgaagcgttccacctacttcttcagctgacaccccgtgagccttgtcagtgtgtaaataaagctcttttgccacccccaggagccactgtcttcaggaagggtgcacgccctgcgggtctcgggcaatcacacgcggccaggcttggcgccaatgctgtcgtttattgcgcggaatgggggtgtgggggttaatggggcgtggggggccacggtgggggcactgctgcctcggctcgtcagtacattcatcacggsggcgggacccyagcctcccccccgcgccctgcgcagccaggcctgcctctcggtgccagtgctggagggaggcggggtgctgctccccgaggtcaccgggggacgcgcgcggacgggggccgggccggttattgcgtgagcgcgatgggggcagcgggaagccggcgggccaagtattgcacttagaaaacgatcctcctcggacgggggccacctagagggtggggggcgggcggggctccacagccggctcctctcagccactgggccgccccgtccctgtcttacagctgggggaactgaggcaccgaggtgaagggagccccctcgcacgcgaggccgccgccgggggcaggggcgatgggggtgggcgcggggcgatraggggggacggccgggggcgcggagggggctgccccgccggccctgcccgtccgtccaactacggctacctacgtctcgtctatggcttctgggcggactggcggccggggcagcgcaatggcatggctttggtctggatgacggccccgcccccggcccgcctgggcccgcggggcggtcggcgagggtcacaagttggacgagaggcgcgagcgcgcggagtcctgggggtccaggccgccggcggcgccgggtgaggccgagtccctgcggtccgggctgggcgcggcggcccgggcagcgggcgtgggccccaagcgcggtgtggagctgctggccgggcgtgtggaggccgcggggccgggggcgccgtgaggcagcgagggctgcgaggcggacagtgggcgcgacgcgcggctcaggcggcgcgcgggcagggcgggcccagcaaggggggcggcgggcaggccgccgtagggcgaggtccgcggtgcccgggggctggcgggcgcgcccggggggctggcggggggcgggggcccgggtgaggcggcggcaggtgcgggccccgggggcgggcggcgcacgaggcgcggcgagccgagcgccagcggccccacgagcggccgcgccacctgcgggcagaagctcatggccgccgcctgctgcagcgtggcgatggccgaggtgacctgcggcggcggcggcggcggcgggaagaggcccacgcgctgacccagctcggcctgctgcaccatctcgcggtcgtacttgacgatctcctggatgatggcgttctcctggttgttgaatacgcccgagttgaggtcatgctgcaccttgtgcaggaggatggaattcttcttgcctgmgggagagggggcgttagcgtgtgcacagggagcgcctgctgcgtacagcgggcaccgagcacctactctgcaccgcgggtgcgcacacagtgcttgccgtgtagagcaagcatgcatttaccacctactgtatacaataagcacatatgtagcatctctggcctatagtatggatattgagtacctgccatatacaggctgagcacctgctatgcacagccagcatgcatgaagcacctgcatacagaaagcagggcttttgttttgctttgtttctgagacggagtcttgctctgtcgcccgggctggagtgcagtggcgcgatctcggcccactgcaaggtccacctcccgggttcacaccattctcctgcctcatcctcccgagtagctgggactacaggcgcccgccaccacacccggctaattttttgtattttttttttagtagagacggggtttcaccatgttagccaggatggtctcaatctcctgacctcgtgatccacccaccttggcctccgaaagtgctgggactacaggcgtgagccaccgcgcctggcagtaaacaggtatttaatgcctgctgtgtacatggagcaggtatcactgtgcaccaagtatgcatgtgtaccacctgtatacgctgattatgtaatgactgcctccagtgtgccacaggcataccgaaaacacctgcctgtacacagcctgtgctgagcacctgctgtatacagaagttataacctaagcacctgatactcaggaacgggttgcatactcactgtatagagcaagttgtggagagcttcctactgtacaccagggagctccctgacaccactccgtcgcacctgtcctgcgtttcagccatggtcttcattcccattcccacgaacagcagcatgagccgccatctctctggcgcctacatccagtcatcagggctctgcccctccctgccccagagactgcccccctgagaggccaggtcaccgtctccctcctggacacggcccgccttggcggatacaatctgaccaggtcctccgcccacctagaaccctccatggctccctgatgctcctgatttagtctaaactctccctgccgcccactgggccctgtgtgtctggcctccccttcttccccaacctcctccaggcctccctggctctctggactctaggcctcttttccacctcagggccttgggatgtgctgtgtccactccacgaacacatcttcctccccgtttccacatggcatcccttaccctggtctccactctgcattcccaactcagggaagcccaccggccccacctgccctgctggcacacagcccagtcgtgtgtgatttcatcaccagtccataagcctccctgggagtctgagtgggcccccgggtctgtcccctgcacccccagcacacagcaggtgctcaccgagcattcggcacaaccgcaaacaccctgtgcattccctcccttgggaaacaggctgcctctggctgaagtaggacaataggtcagaaaatcagcctctagacccaaaggggtcctaggagcggccagccgctgcccctgccccagccacgcccctgctgccatggccacactcctgatgccttggccacgtctctgccccaaccgtgcccctgatgccacagccacgcccttccccctgccactgtccaagccactctcctgatgccttggccacgcccctcccccgccagggcacccgccccggccacgcccccggcccgctcaccgatgcggtccaggcggtcgatggccaccgtctcgaaggcgcgccgcatcatggggtactcctccagcacctcgttgaagttgtccacgctcagcgaatagaggcggcagtaggtgtcrgcccgcacgctcgccgtgcggcggccccgggtgagcaggcagatctctgcacgtggcgcgcaggggggggttgctggacgaggcgggcgccgcggccctccccgcccaggcacacggcccggcctctgcaccttggccagcgtgggcgcttcccacccaggctctccctggtgccggccccggccccatccccggccccatccccggccccatccccggccccatccccatccccggccccatccccatccccatccccggccccatccccatccccatccccatccccggccccatccccatccccatccccatccccggccccggccccggccccggccccctggctctgcacaccgcgggggtcgcgtgccccctccccctccaggcgcgcccccctcaagctcacccccgaagtaggagccatcggacagcttcatctccttgttgcccttagtgagcacgctgaccacgccgtgctggatgaagtacatcttcttcccgatggtgccttcgcggatgatgtagtcacccggctggaagacctcgaacttgagcttggtcagcatggccgtgacgaagttggggtcrgcgttggcgaacagcggcatggaggccaccagcttccggcagttgaagttgacgatctcctgcaggggggaggcagggctgggtccgctgcggaccccactcccgcttccccctcgccctgcctctgggaccggctcacctctcggaccccagtttcctcgtctgagagacgggctcagccccgtagccggaaccgagctgctgccgccaaggacgggagaaagaaaaaacgctcagtgccccttcgccgtttgacaccgtattggcgacatctgccaatacaatcggaccaggaggggcggctgtagacaagagcggtggaaaggaggccgggtgcgggggctcacgcgtgtgatctcagcatttgcggaggccgaggcgggaggatcgcttgagcccaggagttctagaccagcctgggcaacacggtaagacccccgtctctaccggaaaaaaaaaaaacagccaggcgtggtggtgcaggaagtcgaggctgcagtgagccgtgatccccacaccactgccctccagcctgagcgcagaacaagaccctgactcaaaaaaaaaaaaaaagaaaatgggggaaaaataaggccgggcgtggtggctcacacctgtaatcccagcactctgggaggccaaggtgggtggatcgcctgatgtcaggagttcgagaccagcctggccaacatggtgaaaccccatctctactaaaaatacaaaaaattagctgggtgtggtggcgggtgcctgtaatcccagctactcgggaggctgaggcacgagtctcttgaacccgggaggaggaggttacagtgaaccaagatcacacaactgcactggagcccgggtgacagagcgagactccatctctctctctctctcacacacacacacacacacacacacaccagtggaaagctacattcggtcagactatcaggtgatttttgaaaaatcaacatgaaaaccaagggtctggagatgaatcaatggtgtgggaagtcagggcaattccccttagcaaaggcagcttctaaggacggcaggaacgttccagcttcgttctgtgtggtggttacaccacgttccctttagggaccagctatcgagctgtgcccttatgacctggggcactttttggtactttttttttttttgagacggagtctcgctctgttgtccaggctggagtgcagtggcacaatctcggctcactgcaaccgccgcctcttgggttcaagcgattctcctgtctcagcctccagagtagctgggattacaggcgcccaccaccacgcccggctaattttgtatttttagtggagacggggcttcaccatgttggccaggctggtctcgaactcctgacctcaggtgatctgcccgcctcggcctctgaaagtgctgggattacaggcgtgagccaccacgcctggccatatgtgggtttaaagatttgactttgcaactcctaaacacctaaataatgactaagtagcgtgggttgccaggggctggggacggggagtgagctggtgactaacaccccaggtctccttttgggcccatgagaatgttctggagtgaggctgtggtatcgggtgcagcactctgttaatactaaaagccaccgcattttatgcattttgtggtctgagtgttatatctctacaaatgaatgaatggaaaccgtagtcatcaaatgcaattaaacattcttggcgaagcgaaccgcagtgtgtgcctcctgggagcaacgggtgtacacgcccccccagaggcattcccggggcccgaggtccctagtgtcaggcccgtcctgcccgcctcctcgcccagctcctccagcccctcctcggggcctctgcccgagccaggtgctacaccggggacaccctgcctggctcacacacggccttgctgatgtcgcctccccgtcctcgtccctccccgcttcccagagctgctctctgctgcctgcgtgatcacggccgccatccctaggccccgcttcctgagggtgggaccttcaagcacacggcagggcacgcagtcggcgctcaataactgtttgatgtgtg

SEQ ID NO: 94881 - DNA, 10502 bp, Homo sapiens
ggtgcatgggtggagaatgggtggatagatgatgggtgggtgggtggatggatgaatggatggatggttcccagtggatggatgggtgggtgatgggtcggtgagtgggtggatgttgggggcataggtgtttgggtggatggaggatgagtgagtgggtgtgtgatgtgtagatggtcgagttacagatggagcatctgtggatggatgaataactcatgggggaaagagtggctgggagcgggttggatctgtggataggtgagtgagacggtggatggccctgaattcatggagggctggacagacgcctccgcgagggagagcagggtgaacctggcccaccttgtccccacagctgcccatagtggcttcttccatcgtatccttgtacttcctggagctgaccgacctcttcaagccggccaaggtgggcttccagtgctatgaccgcactctctccatgccctacgtggagaccaacgaggagctcatcccgctgctgatgctgctcagcttggccttcgcggcccctgccgcctcggtgagcacctgcaccggggcctgtgccagcctgtgggcaccacggctgggagcccacccccgccacctcggtgaacatccacacyggggcctgtcggtgaacatccacaccggggcctgtgccagcctgtgggcaccgcagccactgccacctcggtgaacatccacaccggggcctgtgccagcctgtgggcaccacggctgggagccacccccgccacctcggtgaacatccacaccggggcctgtgccagcctgtgggcactgcagatgggagcccgcctgagcgccccctccctgtgggcaccgaggcctgagcgccccctccctgttggcagatcatggtrgccgagggcatgttgtactgtctgcagtcccggctgtggggccgtgccggggggcccgccggggcggagggcagcatcaacgccggcggctgcaacttcaactccttcctgcggcgtacggtgcggtttgtgggtgagttgcgggmcgcgccccgaccctgagctacctccacatgcagggggtggggctgtcccgggtccccagctccccgcctggccgagccttccgcccygcaggtgtccacgtgttcggcctgtgtgccacagccctggtgacggacgtgatccagctggccacgggttaccacactcccttcttcctcaccgtctgcaagcccaactacactctcctgggcacgtcctgcgaggtcaacccctacatcacgcaggacatctgctccggccacgacayccacgccatcctgtctgcacggtgagccggacccccaactcccctgactgggagccttcttccgccccggtgaacatgcggggaaacagagacacagagaggccactggagctggggtccccaggtgggcggggctcacgctggacgcctcttayaggaagaccttcccgtcccagcacgccacgctgtcagccttcgccgcggtctatgtgtcggtgagtccggcmcctcactgcccttcccaggccctcttgctgacccgtggggagccctccctgaccccaacccccatgccccagatgtacttcaactcggtcatctcggacaccaccaagctgctgaagcccatcctggtcttcgcctttgccatcgccrcgggcgtatgcgggctcacgcagatcacgcagtaccgcagccaccctgtggacgtgtatgccggcttcctcatcggggcrggcatcgctgcctacctggtgagtggcaggttctgatgggggtcggcatgggttcccaggggatctgaggggggaggcatgagtgcccacagggcctgagtggggaggctggcccaggggtctgaggtgggaggcaggctcagggggtctgacaggggaggctgrtagcctgaggggtgaggcatggttcccaggggttctggyggggggctggcccagagggtctgaggggggaggcatgggtgcccaggggctctaggggggaggcacgggtgcccagggtgtctgaggggatagacgtgggtcccgaaggggtcttagggggaaggcatgggtgctgaagtgtctcgcccttggaatgctggagtcagaatcccgtgggctcagacctgcccgatgtgctgggtcagcaaccttggggtgggaacyggtcccactggacaagagcttgccagcccccacccccggtccaragccccccgcggcaagtccaacgatcacaggggaggagccctctgagccccaggcctcacccccagacccctctccccgacaggcctgccacgcggtgggcaacttccaggccccacctgcagagaagcccgcggccycggcccccgccaaggacgcgctgcgggccctgacgcagcggggccacgactcggtttatcagcagaataagtcggtgagcaccgacgagctggggcccccagggcggctggagggcgcgccccggcccgtggcccgcgagaagacctcgctgggcagcctgaagcgcgccagcgtggacgtggacctgctggccccgcgcagccccatggccaaggagaacatggtgaccttcagccacacgctgcccagggccagcgcgccctcgctggacgaccccgcgcgccgccacatgaccatccacgtgccgctggacgcctcgcgctccaagcagctcatcagcgagtggaagcagaagagcctggagggccgcggcctggggctgcccgacgacgccagccccgggcacctgcgcgcgcccgccgaacccatggcggaggaggaggaagaggaggaggacgaagaggaagaggaggaggaggaagaggaggaggacgagggcccggccccgccctcgctctaccccaccgtgcaggcgcggccggggctggggcctcgggtcatcctcccaccgcgcgcggggccgccgccgctggtgcacatcccggaggagggcgcgcagrcgggggccggcctgtcccccaaaagcggcgccggggtgcgcgccaagtggctcatgatggccgagaagagcggggcggcagtggccaaccctccgcggctgctgcaggtcatcgccatgtccaaggctccgggcgcgccgggccccaaggcggccgagacggcgtcgtcgtccagcgccagctccgactcctcgcagtaccggtcgccgtcggaccgcgactccgccagcatcgtgaccatcgacgcgcacgcgccgcaccaccccgtggtgcacctgtcggccggcggcgcgccctgggagtggaaggcggcgggcggcggggccaaggcggaggccgacggcggctacgagctgggggacctggcgcgcggcttccgcggcggggccaagcccccgggcgtgtcccccggctcgtcsgtcagcgacgtggaccaggaggagccgcggttcggggccgtggccaccgtcaacctggccacgggcgaggggctgcccccgctgggcgcggccgatggggcgctgggcccgggcagccgggagtccacgctgcggcgccacgygggcggcctggggctggcggagcgcgaggcggaggcggaggccgagggctacttccgcaagatgcaggcgcgccgcttccccgactagcgcggcggggccgggggcgggcggggggcgggccgagggcgcgggcggccgcgcggatgctcaataaagcggcagaaaccgaggtccggctcttggtcattcgctctggcccgcacgccccacgcagggacccccactctcagggccgggcccaccccgcccgtggccccacctggcgcttcggcggacacccgggcgggagtcggggccgcccgcggcacagaaagaggaagccagcaacgaaggcggaacggagcgaggatacagaagatttattcgaagtccaggtacagactggccaacctgcctctacagcgtccacagcgaacacagggctagacaagggaggagtttctcaaamggttttaatcggttctctccgcgtcacaagccatcgrgtaaggcaacggaatgtgcgtggggtcccctgtggctccgcggtcacaatactgagcctggaattgctgttagcaaaatatacatttgtgtcaccataaaaaaccgcgccgccgcccctcgggtctcacaacaggtataaaaaattataaatatttacacccttgttacacgcttttacggaaaggggatcctaggagagcccccgggacaggacgcgggggcggtagaaagagcacagagaagacaggaggagcgcccgcyttccgggtcccagcatcagaggcaggcaaaacacagaaatgagactttggtccaaaatttgaaggaaraaaaaaccctgaagtttgagagcaagttttctaggcgactgcaggtgaaggcgtggtgtaaggcaaccggaggcgatgccagaggcggcgacacgcccgccccttccctgaagctcaggggctctaagataggaccggggctccctgtgcctgacccactgggcggccccgcctgctctctggaaactgggtcctgcctgtgacttaattacaaggaataaaataaaagtaacagcatacaaggtaataccacaaggaagtttagattacactcataccattgtatcatcttgctataaaaagttacttaaaactatttcttttgcatataaatgaaaaaagattagaatatttggtcaactggaaatattgctaggcacagacgtctgcaactgcaaagtatataatacagagattatgtcgaccagctccgcagctggagcagcggggagcccgcctgggggcagaagggaaggccctgggggcggggtgaagggagaatcacgtgacttgattagagggctggggttggggtgtcgcagccgcggccgccgcgccccagctgcatgatcctgcaggagccggccaggccccctgcctctctctggtgtracccccycaccccttgggtccccaggacaccccgggtgggtgtgtggctgcaggaaggcaggttttttaaggcacaaggaagccaagtcgtggtcggggcgcccacctgcaggccccacgcccgacacaggccccaccaaggcatggccccgagggtctggccccgggtgtggagggccgggaactcccgctgccacagtcaccaagagcctgagctgtccctgtcaccgcagggtgagcaaggtgaactagatttaatttttttaaaaacaggtaaactgatttctctttwaaaaaataaaatctctggtctgctaaggtcacttcagctgtttttaaagtggcttttctctggaatgatggaagttgtcgccagggggcccggccgtgggggcctgtgcccctagatggtggacttggagaaggagacccgcaggtggtggttctccccgaggtcgtggttgtgcaggtcaatgagggcctggaccgcctcctccacggagcccatctggatcagtgccatcttgcggtccttcctgcaagacagggggtcagggccggccgcagggcagcctggggagagccagggacagcccgcctcatactcactggaagaacttgaatcctttgacgacgcccccattgctggaaaacagkaccttgagatcctcctcggagactgagggcctgtgggaggagaaaggcgtgagcctggggccgcgtgggggtgggggcgcccagtcaggtccgcgaggctttccccagactagttttcagagtagccggggaaggcgtagggccttttaggagcccagaaatggggtatcaaatcatgtccacaatggtctgaagcagcttctaacgaaaccaggcatctacaagtttgcagaaacagagtaccacgctcctccacttttttttttccagatggaatcttgctctgtcgcccaggcgggagcacagtggcgtgatctcagctcaccacaacctccgcctgcaggttcaagtgattctcctgcctcagtctcccaagtagctgggattacaggcacgcaacaccatgccaggctaatttttttatttttagtagagacggggtttcaccaggttggccaggttggtcttgaactcctgacctcaggtgatctgcctgcctcggcctcctaaagtgctgggatgataggcgtgagccactctgccaggccccttgttgattttctgataacatttcacaagtaacgtgttaaatatcaaagggcttactactggttgacatgcttggggccagatgtacctgcatttccaaatacttgcattatgtaatttttacagacagggtcttactctgccgcccagcctggagtctggcagtgcaatcacagctcactgcaacctcaacctcctgagcgcgaagtgaacctcccacctcaacctcccaatccggaagagctgggacctgacgtgcacaccaccactcctagctaattttaaccaattgttcctgtagagacagaggtctcactttattgctcaggctggtcttaactcttgggttcaagcaatcccctgcccggccccccacagtactgggattataaaggtgtgcattaggccaggcgtggtggctcccacctgttatcccagcactttgggaggccgaggcgggttgatcacaaagtcaggagatcgacaccatcctggctaacacagtgaaaccccgtttccactaaaaatacaaaaaattagccgggcgtgctggcgggcacctatagtccctcccagctactcgggaggctgaggcagcagagtggcatgaacccaggaggcagaacttgcagagatcccgccactgcactccagcctgggcgacagagcgtgactccatctcaaaataagtaaaataaataaataaataaataaatgtggctaggcgcggtggctcacgcctgtatcccagcactttgggaggccgaagcaggcggatcacaaggtcaggagatcaagatcagcctggccaatatggtgaaaccccgtctctactaaaaatacaaaaattagccaggtgtggttgtgggtgcctacagtcccagctactcgggaagctgaggtggcacaatcacttgaacccaagaggcggaggttgcagtgaaccgagatcgttccactgtactccagcctgggtgacaaagcaagacttcgcctcaaaaaatataaataaataaatgtgtgcattatacattctcacagggagcatcccctgagccaaaacctccaaagtgtccaacgaccccctcccttgagcagccctcggctcaagctccaggccttgcagtacttcaggtttggggtaagaggtgcccgacctgcactctggaaacgccagaagtccacacaccgacgcggtaggacagccaagcagagcccttgcccgcccccggccccatgagccccccggcccagcactcacgggatgttggagaggtgcagmgtggccgagggcgggaatatgttctggaagttcttggagcccggcttcttgaagcggtgcaggggtgagttgccgtagtccttggtcaggccctggtcctcctggccctcrcggggcagctgcacgttctggtgcttcgagagcgtgatgcggatsggcttcccgtgcagcttgtgcccgttcaggtggctcatggctgggggagcagcacccgcgtgaccaggcgcccgagagggaacgcagcccccgcccctgccccctccaccccggggccgccccggcctcttacccagctgggcctggttgccgtccgccatctgcactagggcgttctccttcttattgaacaggatcttcacgcgctgcacgtcaccgtagacgccttcaaaagcccagggatggggcctgagtctcctgctgcctgccccgcccatctccccgtcagccccggccccgcgcacccccacaaggcccggctcagcccggccgggtttgctttatcggccactgcggagctgcgtctcgcagccacagggcgcgctaacaggagcagctccgttcagcaaagtcatagcatccaggacaggtaagctgccagcgggtggccacggtggcatatgccaccgacaggtctaactctgaaaagcatgcagggcgataaaccatgcgtacgtatctacgggaccaaataaaattcgcaaaccgaaagcaaaccataaaacgaggcggatgccacggagcatcagagtgccaaaccgcaaactcataatacgtctcagggcatcaaaatcatctcaattaatgaaaacaaggtaataaaagtgtgaacgataacataccgaaaagaataaagaggctttggggtgtgactctctttagagacagcagagcaaggcagcggagggacaggggagagggagaggtcaaggggggcgagttgccaatcgtccacacgaggaagacagtccccgcaggcgtgcagtggttgatggatgatgaagttgtcaggatgttaatattcaagggcaggttggtttccggagagcagggtttgagggggaatttttgttttttatttgtttatgtttttgttttgtttcaagcaacaacaggaagcagaagtaccgtgcagtcagttggcaaagaaattccggatcagggcaagaaaaaaaatagggaaaggggaaggggagaaaagaaaaaaagtagcaaaaaaacacaggtcagtaaatacataagaatcaggtagtgttctatcagtcacactccacacacattccagttacaggtttacctcgasgggcacacggtaagagaagcaccttcactcacatgccggcagagacagcgctgctggaggggctcccagaagccgatcccaaccacgccccccaggagcgcgcgtgcagctccgctcgcggccacctcagccaagccctgcagcagcgctgtctcccgcagctgtggcacaagtcagtctctaaggacgattacaggcgtgaagggagatcgagtctgttagtgcacggcctcgctcaggaggagctggagggacagcacccggctcgtggtaagaggcacaggcagggagtgcgtcctgggcccccgcgagggagggccaggctgggcaccgccttgaggaagtcacaggagttgccgggaaacagaacagcctgaaatgctgattccaggaggatcccatccatcaagagttacatattttgggcctcttgtttcacccaagctctccccgaggggaatttawccattctgggaaataacggatccaccagttaagtgacaggctctcgagccacaggggctgcccacaccccgccgcgctaaccctgtgtgtcccgctgaccagcagggcggcctgctggggctctgaactgcgcgccctgctcagctccaagtaatttttagattgcctttgggtaaccaaaaaataattcattctgcgtatcatgcaagagaaaacgcgaaccaagatgtgaattcaggaaaagaggaaaactcaagccatcttggaaaaggagggtctcagcgctgcagcagaggggctgccagggcagaggcgcagacacagcgaggggcggcgctgctccgggacccgagcccgagcacaacatcccctgctcgctcttccgggaggaacggcggcgcggaggaaaagcccacgtacctctgggttgaggttgctgaccagcaatacagaatttcctgcccccgccaggcccgggatggcgatccgacctgccgccgcagctgccgccgccgccgaggggatggccaggggggccagggcgccgtggacgttcggaacggaaaggcctggaaaagcaggaggtgagatgagcggcggcgcccccgactccaccgcagagtgggagaggccgacgctccccgtcctcatgcaccgaggagccgagccgcgcgggaggcggccctggctctggccctaccctgggtgcctgtggggtcgtccgacccccgcacagccacccgccggctcctgcaccagcgcccgcctctcctcacagcacgggccgggccgggcctgggctcatctgcatgcgccccgcccacagcacagaaaagctccggctccgccagcacagacacggggccctcggcaagcagggcccgtcccgggaccaccgcgcatgcgcgcccatgcctccatgcagacgaggcggccgccgggcggcacgcgctgctccgtccacggccagcactggggcggccgggccccggtcccagaagggaagcgggaggacggccacgcacacacgtcccgccgccggtcatgctgctcagcctcgggccgcgcgcttaccaggccactcaaattcaactactagagacatccctccaaccactggcggtcctcgcgctcgcccggaggtgcttgaagggaaccagaccacaaagactgtgcgattagcggcttctggctggcgccgtccacacgtgggcctccacagccctgtcctaccactgccctggccaagcctgctctgtggacgtggcgt

SEQ ID NO: 94882 - DNA, 22131 bp, Homo sapiens
  misc_feature (1)...(22131): n = A,T,C or G
aacccaagggcaagaagtttactgcttttgttcactgctcaatccccagaacctagatttacacatagaagagaaggaagagaaggagagagggaaggagggcaagggaagggaaggggaagggaatggaagggaaggggagtggaggggaggggaggggaaaggaggggaaaggaggggaaaggaggggagggggataggaagagaggggagggggatgggaagagaggggagggggaggggaagggagcagaggggaggggaggaggaggggaggggaagggaggggaagggaagagagggggagaggaagggagggaaagaaggaagcaattttcccctaggaagaagctggaagtcattgaggtgtgttaatccctgtagctgtagtaacaaatttagtgacttagcgtggacgtaccatctcacagctctggaaggcagaacttctaaaatcgaggcatgaacagggctggtccctcctgggggctccagggagaacctgtttcctcctttcccagagtccagaggcgcccgcatccctcagctccaggcccttcctcccccttcacctccaagagcgcaacctcttccagtctctgactctcggygcccgccccccaccgccctcttaaacggaccctgtgaggacatgggcccccatcaccccggatgctctgccgtctcagggttcttatcacacctgtagagtcccttttgccacctgaggtggtacagccacagattctggggatcaggatgtggatgtcttgggggccttattccctcttccacggtgaggaactggcccgggactgcacagaggaaagctgacctggaagcctgttctgatgcatctggaagcacacgggccccacagccttttgcgtttttcccctttttttttttttagacagggtctcgctctgtggctcaggctggagtgcagtggtaaaatcacagctcactgcagcctcaaactcctgggctcaggcgatcctcctgcctcagcctcccaagtagctgggaccacaggtatgtaccatcacacctggctgcttaagaaacatttttttttttttttttttttttttttgtggagacgaggtctggccatgttgcccaacgccccacagctgctgtgtcctggctccgtgtccctctcccctgaggaccatatcctcccacatgcacccctctgccttctgagaactgtctttcttccctacaaggcatgagagcagcaagatgccatcgtgtaagagtctcagtgacatcttgggctccacaggaagacctttgtacaactatcttatctaacccactttcaaattaaaaaactgaaagtcgggctgggcgcggtggctcatgcctgtcatcccagcagtttcagaggccgaggcaggcggatcacctgaggtcaggagttcgagaccagcctggccaacatggcgaaaccccgtcactactaaaactacaaaaattagccgagtatggtggcgcacctgtaatcccagctactcgggaggctgaggcaggagaattgcttgaacccaggaggcagagattgcaatgagccaagatcgtgtcactgcactccagcctgggcaacagagtgagactctgtctcaaaataaaataataaaataaaataaaaaactgaaactcataggccaggcacggtggctcatgtctgtaatcccagcactttgggaggccaaggagggtggatcacatgaggtcaggagttccagaccagcctggccaacatggtgaaaccccatctctactaaaaatataaaaattagctggcatggtggcacaagtcacccacttgggaggctgaggcaggaggatcacttgaacccgggaagcaaaggatgcagtgagaagagatggagccactgcgctccagcctgggtgacagagcaagacgccatctcaaaaaaaaaataattaaataaataaattaattaaataaacctgagactgggtttaatgtttgagcgatatttccaaggtcgtggcagaaactagatttgaatttaaggttcttctctgccatgtgatggaaaacctaactcaaactggcttaattaacgaagaaggaatttatttttacttatttatttatttttgagatggagtttcactcttgttgcccaggctggagtgcaatggcgtgatcttggctcaccacaacctccgcctcccaggttcaagcgattcttgggcctcaccctcccgagcagctggaattataggcatgtgccaccacgcccggctaattttgtatttttagtagagacagggtttctccatgttggtcaggctggtctggaactcctgacctcaggtgatccaccctcctcggcctcccaaagtgctgggattacaggtgtgagccacggcgcccggcacgaagaaggaatttaacctggttgtggtggtgtgyacgtgtggtcccagctacctgggaggctgaggtgggaggactgtttgagcccaggagttcaaggccagcctgagcaacaggaacgggggcagggagggaggaaaggaaaataaactaaaaaggctgggcgtggtggctcacgcctgtaattccagtactttaagaggccaaggcaggaggatcacttgaggctgagagatcgagaccagcctggccaacatggtaaaaccccatctctactaaaaattcaaaaattagctgggtgtgacagtgcacgcttgtgatcctagctacttcggagacaggtgggaggattgcttaagcctgggaggcagaggttgcaatgagctcagattgcgccactggactccagcttgggtgacacagagagactccatctcaacacaaacgaactaagaggcaagaattcatgagcttgcatcattggaacatccaggggaggtcaggtaacagcatgatgcaggatcactaataggattatcaacgtttcccctctcatcagccggctcggctttcctgtgatgccgcctttgttcggaggccccgtggtgacaccatgaccccgtaactccagccccaggtccttccagctcagccaccccagcactgtgatcccagagaaatgtcccagagctgaatctcattggacgtcaggagtcacatgcttgttcctgaaccaatcattgcagcccagggtgggggccctgggaactgatgggatggcccctccctgcagccagggcttgcgtcagtccaattcgaacccgttcccacagagtagggagcccccaagcaggcaggtggaagcccctggtgtccaccgctcccgggtgctgtgagcctgagcctccctgggggtcggggccctgtgggaccagctggaggggcttgaaaatctccccaacccaggccgggcgcggtggctcacgcctgtaatcccaacactttgggaggccgaggcgggcggatcacgaagtcaggagatcaagaccatcctggctaacacggtgaaaccgcttctctactaaaaatacaaaaaattagcagggcgtggtggcatgcgtctgtagtcccagctactcaggaggctgaggcaggagaatcacttgaacccgggaggtggaggttgcagggagccaagatcgtgccactgcactccagcctgggcgacagagcaagactccttctcaaaaaaaaaaaaaaaaaaaaaaaagcgagagaaagaaaacctccctcacccacacagtgcttcctgggatgtgggtgtacggaagaagagagatcttgggagcccttagagaaggaatcgtggttaattctaattagcattaatttacccatgagctgctgcctgccggctccatgatgctggcaatatatccacgacctgtggcacggaagagactgaggctcacaaaaccctgggaaccttggtgaaggggccacagccagaaggccccactagtcccgagaccctccttttactccaggcccccagggtgccgggcagaggggcctgagggaggaggcccagaggcccttacgggtgaggacgcctcggcctcggccctggacagctctggaagtgaccgctcggcccagagctctttcttggatccctccctccctctccactcctgatgctgttttcctttccccagacaggtttgcctgctggtcctcttccggggaccagactcatgaagccggggccaggtgttggggcacctgcgggacagagtggccctggtcccagactggtttttgtttttggtttttttttttttgagacggagtctctgtcgcccaggctggagcgcagtggcgctatctagactcactgcaagctccgcctcccgggctcacgccattctcctgcctcagcctcccgagtagctgggactacgggcgcccgccaccacgcccagataattttttgtatttttagtagagacggggtttcaccatattagccacaatggtctcgatctcctgacattgtgatccgcccgcctcggccccccaaagtgttgggatcacaggcgtgagccaccgtgcccggcctgtatgttgatgcagctgtgtgtacccagggcatagcaacaatgccactggcacagtccgagggcagggccacccgtcacgggcacgactcaggggaggctgggctgccccgtcctcaccacggccagttctcccgaccaagcttcacagcaaggagcatgtgggtgtctgggcagccactgagccaggtcagaagtcaggtggggtcacagtgatgcccggaatcagctggggtcaagactcaggtgggctgggcgcggtggctcatgcctataatcccagcatttgggaggccgacgcagacggatccctttattagtccaaactgcatcctccccttcctttcaaaacctaacaacacacttgaggtcaggggttcgagaccagcctggccaacatggtgaaaccccatctctacttaaaatacaaaattagccggacgtggtggcgggcacctgtaatctcagctactcgggaggctgaggcggacactagcttgaacccgggaggcggaggttgcagtgagattgtgccactgcactccagcctgggccacagaacgagactctgtctcatttaaaaaaaaaaaaaaaaaaaagactcgggtaggacaaaggtcaggctgggaggagggcacagccaggctcgggctcagcttggggtgggggctccgtggggctggcgcctctcccgggtcaggtgctgagccgatgctggccggcgtaggcctctttcccagtttctctggggggcaggagcaccttgccaacctctgatggctccagcgcctgcactcgcctcacaccacatggtgacttcaacggggaccagggaagccctcgcccctcccacccctcagagccctccctgacctcgcccacttctcagagctcccgctgtcgggggaaccgaggcagcgccgcgcctggaagccaggtctgcggatcccgcctcgctcccgccccttcctcccttccgcgtggccagcgcgaccctaggacagacttcgcgcccgtcccctgcacagacggggaaacggagacggggacgcggggtcgcgccggatggaccggccctgcccctccggtcccggtcaggaccccgcgccgcgccccgttcaccgcccgcggccccgccccgcgccggcacgtcacaaaacaaccccaaagccgggggaccgggccggtgacggcgcagagcagccctgcccgcctccttgcgcacagcgtccgcggtgctggtcgagcagggggcgacggcggcggcctcggggatcggaagagcccggggctgcgcgctcgaaccctccctcccggcggaggcgctcggcgccgtaggcgggaccggggccgggactccacctcccggcgtcccctgcggccgggcgcgcaggcgcaagtcggacctggccgcggagcgcaggcgcagtcggggccaggcggtgcgcgcaggcgcagcggggggcggggcgcgcgggcccggccaaggcaagcgccggtggggcggcggcgccagagctgctggagcgctcggggtccccgggcggcggcggcggcgcagaggaggaggcaggcggcggccccggtggctcccccccggacggtgcgcggcccggcccgtctcgcgaactcgcggtggtcgcgcggccccgcgctgctccgaccccgggcccctccgccgccgccatggctcggccgctagtgcccagctcgcagaaggcgctgctgctggagctcaaggggctgcaggaagagccggtcgagggattccgcgtgacactggtggacgagggcgatctatacaactgggaggtggccatyttcgggccccccaacacctactacgagggcggctacttcaaggtgagcgcggcgacccccgcccgggtcccggagcccacgagcgacctcgggcgccgggaaccagctccctgccccgcggtcctagcgctgttgctgggcgggccccgaagcctcctggcttgggctcgtttcccttctatggccacgttcccccacccagctctgcccggccccctcctcggaccgtctcggggaccttcagcctctgctgcagtcctcgaaaatccccagttcccttcaaggcatcgtccggtcccctgttaggctcttggcccccggaggggtggccgggggccctccctgtagcatctgggcgtggggctcttgcccacctcctccttggcgggggctggaccccggctgcctccccctccgcccctgcgagaaagagggagcggagcccaggccgcgccggcctttcagctgccctccccgccctccccggaggagacaaagaggccyccccagaccccgtagctgctattgttggggagctgggcccgtgagcgggggagcgaggccagcctgggggtggctggcgcggccactcgctcagtctccaacaaaggcccggatgagccttggcagccaggacccgcctggaaagcggccacccttgccagtagcagccggccaggcgccctgggctccatcccctgctttatgtaacctgcgccctcgggaaggccgaagtaggggcgtgcctcccacctgctccctgcagctctctccaggcctcccggctcgggcccgcgtcccggaccccgacctcagaagctccgggctcgctcatcccagctggtcttggcctttctcagagtscactgaacaggtggcttcttgggacccaaaccccgagttctgggccgtttcttctgccctctggcggtttaattccaagcagtttctggatgtttttgttgttgttgggagcggggaggctgtttctgtctcatgtgaaaaggactcaggccaaaaccagggcagttttcttgatctcacgatccagacgtgacctttgactccttttagcgttcagggacctcgttcttggggccagagggacaaagcgaggggccctgtgtgagcggtrgggaacgagcaccctgtccaggaatctccccctcccaccgtcacttcctgccaagagcctggacacgacacgacactgcagggcccggcccgctctgccccggccagctgcgggcgtggggccgagggaccgatgcctcccgcacgatatgtgtctgctctccgagctaattagtgtctgaaccgcacccgctcagcggctgtgagggcagcagcctggtctgctgggggcgattcctgagcagagagtgggacgcccgtgggttctgcatctggaatcctgcgtccccacacagggaacagagtttgggtctcgaggttgccaaatggttttagcagctcctccgccagacccttctgtctgcttgggggagcagctggctgaggagccgcagccccacctcgaagccaggcctgtgaggcggctgctgttctggaaggaggggatgggggtttctggctgctgtgcccaccagaccggttgccagggattgtgggcagagcttcctgggccagcattaggggataatccggttttccggatttcccagggagggggcctctagacatctgccacagggtcagtcctcagaagccagtgttgagacgggggtgctgccacccacgaggactctcccttcccgctgtgcctgggagggagttgggggagcctggaaatacagaacctgctgagtgcccagggccgctgctgcccagccactgcctgcagctgctgttccttcaggagccaaagtgagccctggggcaggggccgccagagagagtcctccacagccgacttgctgtctgcccttggcagggcgctttccttttctgagcctgggtttgctccggggaaaaaacattcttagaggtgcccaaaataagaggctcattgggacttggtggggtttggtacagatgaggccttggctgttgtcaaggattgccgcctgaaacccagcaccaggcttggggggcctgaagtcttggggaaccgcaggacagttctgagactgaagttccagccttgctctgtggccgcggccaagtcacttgccttacggggcaccagtgagttccctgtcaaacagaggacaccccccaagacaccccgcgtgccctccctgtccaggaggggcccgtccacgatccaagacccccaaagtgccctgcctgtccgggaggggcctcgcccacaatccaagacccccgagtaccctccctgtccagrcctcgcccacgatccaagacccccgagtgccctccctgtccagacctcacccacgatccaagaccccctgagtgccctccctgtccagacctcgcccacgatccaagaccccctgagtgccctccctgtccagacctcgcccacaatccaagacccccgagtgccctccctgtccagacctcgcccacgatccaagacccccgagtgccctccctgtccagacctcgcccatgatccaagacccccgagtgccctccctgtccagacctcgcccacgatccaagaccccctgagtgccctccctgtccagacctcgcccacgatccaagaccccctgagtgccctccctgtccaggcttccaccacgatcgctctgggggtgctgctctcgtgccttggagtgctgagtgccaccaggacccctgacccagacaacctctgtgtctggcactggggcccagcaggaaaacagtgaggcttccttgtttacctgctgtggcccaggagggccgtgggtggcatcacgccccaggctgcaggccagacagctctgtcacctggcacgtggcttcaggcctccctctgtggccgtccttgccagcagatctggacctccagggcctgggtgaccacagggggcgatgctgacagggaaggagtcctgccaggtttctgtgacctatgggtctgcctgcctgaccccccaagaccggacacctgagggcagacggccatactgactcatcccctcccacggcctgggccagggcaggtgtcacaagtgtttgctaactgagcaatcatctgtgctaaccctccccacaccctggctgccaaggccctggaggtgcagccctggtcctgggcttcagctccatccaaggggagcctggagcccctgccagtccattctgtctgctggtgggtgcccctggcctgggtcccatatgcctgacctgggctgccacgggcctggagccacgcgggcagccagtgcccacgttccccagcagttgtgctgggccgggtcccggccacctggactgtgtaggagctgggatcagctcaggtgactcagaaaaggcttcaggcagccttctggggacttgaccccaggcctgtgagagtccctgccttgggcaggatacggtgtccctcacacacaccctcaggcaccagcactgggagtgggatggccttgggcaccttgtgagctggggcaggtcttggggctgggctggactgagccacctgccttctgcccctgcaggcgcgcctcaagttccccatcgactacccatactctccaccagcctttcggttcctgaccaagatgtggcaccctaacatctacgaggtgagcgcggcccccacgggcctcaagtcctcatcctccgggacccagggtgctgggagcctcacgtcctcatccttccgggacccggggygctgggagcctcacgtcctcgtcctccgggacccggggcgctgggagcctcacrtcctcgtccttccgggayccggggcgctgggagcctcacrtcctcgtccttccgggaccygaggcgctgggagcctcatgtcctcgtccttccgggacccggggcgctgggagcctcacgtcctcgtcctccacgtcctcatcctccgggacctggggcactgggagcccgtgctgacctctgacctgttctgacctgtcttcttcttgtgcagacgggggacgtgtgtatctccatcctccacccgccggtggacgacccccagagcggggagctgccctcagagaggtggaaccccacgcagaacgtcaggtaagccggcccaaccccctgtgtccacccagaacatcaggtaggccgggctccgtcccgtatccacccagaccatcaggtaggcygggctcccccncaggctgtggcgccaaggcctgattcgggacctgccagctggcggtcctgggcctcgctgtacctgcacggtnggtgctttcacggggcytgcggcacngtgtgtcggtgcagactcccaccaggaccccaggccggccccaccgtctggaaccacctagaggtgtcccgccmtcctcagtcctggggccttctccttacccagccgtctctgggttggtcacctcgtgccacgtgtgccgccygggcctcgtccccaggtacaagcactgggccgtgttgcccgtgtgtcctggagtgtagtcyaggcaggacgtgcgggtgtgagggcagccccgggtctgacggaggggtctgcaccttgctgccctccctggtcttggcgtgggagggaggagactgatgcaggtccagcccctgctgttctgggggcctgagacaraagcagaggccatgaggccagrtgaaggtcacctgctgggtgggtccaggcgtccccgtgaccctcagggccagagaagagccggaaggctggggtgccccgggccgccccactccgacccactctccccacaggaccattctcctgagtgtgatctccctcctgaacgagcccaacaccttctcgcccgcaaacgtggacgcctccgtgatgtacaggaagtggaaagagagcaaggggaaggatcgggagtacacagacatcatccggtgagggcgggcgggggcgtcacgggaggagagactcagatccggcctgcaccccggcccctggtcccacggccgcccagccccaccttcctggtgagggtggcggagcttcctggtgcccatttacagggtgccagtcacagatggaggccgggccgagtggcggagggtccagccaggttcaagcccagcttcttgccccttttcctctttttttttgtttgagacagagtctctctctgtcacccaggctggagtgcagtggcrcgatctyggctcactgcaagctccgcctcccgggttcacgccattctcctgcctcagcctcccaagtagctgggactacaggcgcccgtcaccacgcccggctaattttttgtatttttagtagagacggggtttcagcgtgttagccaggatggtctcgatctcctgacctcgtgatccatcygcctcggcctcccaaagtgcagggattacaggcgtgagccaccgcggccggcctttttttttttttttttttttggagacagagttatactctctygcctaggctgcagtgcagtggtgcgatctcggctcactgcagcctccactactcgggttggagcagttctcccccttcatcctgccaagcagctgggattacaggtgcccactaccacgccgagctaatttttgtaatttttagtagaggtgggatttcaccatcttagccaggctggtctcaaactcctgacctcaggtgatccacccgcctcggcctcccaaagtgctgggatgacaggcgtgagccactgcacctggcctggtggttagtgttttcatagattcttccaggcttttcagtttaacgcatgtctgtgctttaatgaagaaatggggtcgtgctgtgtgtgcccagtgactgactgttagggaacatgtgtctgtgccttaatgaagaaatggggtcgtgctgtgtgtgcccagtgactgactgttagggaacatgtgtctgtgctttaatgaagaaatggggtcgtgctgtgtgtgcccagtgactgactgttagtcaggggtgttggccttactcatgtctggagtgcgtccctgcaggctcttggcctggtgagctctgggtacagctgtgcagtcgcctaccggcgccttctgtacctgcagtccacttagcttgcgtggctgtgtgtggtgacccacggctctccctctcctcccatcgccctcatgccccagagctgagccccacagccccttctcttgggtgcctgtgttcacatgaatgtgtaaacacgtgcgtgtctgtgtacaaagacaaggctttctttacgggttgacgrccttaatggttcctgctcttcctgttacatagaggcccttcctatccatttttttttttctcagagtgatattgcatagatttcctcacagaggcctcacctatttttgttggtattttgtataaacagaatcttaaaaacaacttttaaaatattgcacacataatgcatgtgtcttcctcgccccaggacccaggarcatccagggcaccttccatcctgcactcgctggtacctggtgtcgtggggtcatctcggggcagcatcctggtgctgggcggtctcggctctgagcagccatggtgggcgggccccgtgcggcctcctgggaagtggcctgcaagcacctgctggcctctggaggtcacagggtagctgccctggccgtccctctggtgcagatgtcctcggtggccccggtccggtcgtgtcacctggcccrggtggctggctccttggcccggttcttcccggccacctccctgaggcaccacctccttgagatyccagcacagaaataaaagccacactatttttatccctcaaaactccctgtgggccaacacacatgtgccatgtggactctgctgtggtcgccgtttctgcctgttttttcatctgtgtgcgtgttggcctcgtggcagcccaagtcccgctgagctgtgtcgggcaggctgccgtggagsccggcttggtcagggatgttggtcttgctgaacaggacctccagaccrtcctccagctcatgctggcggtgtgccggcggcacctccacggcgcaggtcagttcycaccctggccctcccctgcgtctccccacagccgccacctctgcggtgccgtccccggggcaccgtcacccccccagcccgtccaccctggccctcccctgcgtctccccactgctgccacccgtgcagtgccgtccccggggcactgtcagtcacccccccagcccatcggagagcttggaaagcaaagcttggcgtccgctgggtcccgccacccagggacgtccctgaggccagacgcctgccctccacgcgtcatgcatccccataaaaagcactgggcttgtgggctgggcttggggctgtctgtctgytccctggtgccctcccatgcgggcactgtgggacccgcacaccctggtagcagccagccccagagcccagagccgtgcctggtcggtgataggggctcgagcccattgcctgcggctgcagcctcgttcctgttttstgtcaaatggggtcagcgtgccgcctggccctgctgtgccacccccggaagcccctttgcttccagtcctggggggacattcttgaygcgtgtcctggaggtggagccgggggcaggttcctcgtaggtcctggtgtgcgcggtgcagcccctcatagggccgggtgtacacggtgccctccaggaagtttgagctaacttgtcctcccttcctgccagaggctgggatggccaggccccccaggtttagaatccggaggccggggtggccaggcccccaggtttagaatccggaggccggggtggccaggccccccacgtttagaatccggaggccggggtggccagaatccggaggccggggtggccaggccccccaggtttagaatccggaggccggggtggccaggccccccgggtttagaatccggaggccggggtggccaggccccccgggtttagaatccggaggccggggtggccaggccccccgggtttagaatccggaggccggggtggccaggccccccgggtttagaatccggaggccggggtggccaggccccccgggtttagaatccggaggccggggtggccaggccccccgggtttagaatccggaggccggggtggccaggccccccgggtttagaatccggaggccggggtggccaggccccccgggtttagaatccggaggccggggtggccaggccccccgggtttagaatccggaggccggggtggccaggccccccgggtttagaatccggaggccggggtggccaggccccccacgtttagaatccggaggccggggtggccaggcccccgggtttagaatccggaggctgggatggccaggcccccgggtttagaatccrgaggctgggatggccaggcccccsggtttagaatccrgaggccggggtggccaggcccccsggtttagaatcctgctgaggccacggagaggctcaggccgtttttgcgtttcccatctcacctgtgctggttcccgtctccagggatggtcctgcctcctgtccttgggccctcccagctgcttcctttgctcctgcgctgaggaaggcttttgccccccagtggggcagcatgggccctccctgttgccggcatcgttattttctcccagctcctgatgggtcccttgggttgtgcttcggggcggggcaggygggtgtgactgcactgcgcccgtccagcctcccacccrcacctcctgcccttcccgagccccctcctctgtcatttctccccctggagttcctcacgcacagggctttgtcctaagtggtcgccacacgccgttttaagagaaacctgagcgttggggtgagcgycrgacctgggggaggggggccgggcaggggccgagtccaggcacgtgggtggcgccctcacccaccctgtccccccaggaagcaggtcctggggaccaaggtggacgcggagcgtgacggcgtgaaggtscccaccacgctggccgagtactgcgtgaagaccaaggcgccggcgcccgacgagggctcagacctcttctacgacgactactacgaggacggcgaggtggaggaggaggccgacagctgcttcggggacgatgaggatgactctggcacggaggagtcctgacaccaccagaataaacttgccgagtttacctcactagggccggaccmgtggctccttagacgacagactacctcacggaggttttgtgctggtccccgtctcctctggttgtttcgttttggctttttctccytccccatgtctgttctgggttttcacgtgcttcagagaagaggggctgccccaccgccactcacgtcactcggggctcggtggacgggcccagggtgggagcggccggcccacctgtcccctcgggaggggagctgagcccgacttctaccggggtcccccagcttccggactggccgcaccccggaggagccacgggggcrctgctgggaacgtgggcggggggccgtttyctgacactaccagcctgggaggcccaggtgtagcggtccgaggggcccggtcctgcctgtcagctccaggtcctggagccacgtccagcacwgagtggacggattcaccgtggccgactcttttccctgctttggtttgtttgaaatctaaataaaactactttatgagaggccagagaagctgtgcttgggagggagaggcagcctccacgtccatgagtgactgcacacggccagtcccactgggaccctggctacgccaggtgtggatctgggaggcctgtcctgggaggcacggggagcagccgggtcccgcggcctgtacgttcccatgacttgggtcagacaggcctgggcagcatcccccagcctgcgggacaggggcggccagaaagcccccagagttcctcctccctgtgaccaggtgcatctagtgggacgggagctgcctctgcaggcatccagcaaagcttcgtcgcgggtccacagccgcctgggcgttgatctcagcgtctcagggctcccaggaccacagatgcccccgatcagcactccggcggctccagctccgtccagrcacaccctcggggtggggagccgtggccctgggcacacagggcaggcacctcacgtcctggtgtcaggaagtccccagcatcgttttattacatgtcatggaggaaagctcggagctcccatgccctcccggggcaccgccttccaggaacctgcctgcgttccgcttctgggcacccggaaagtcgctcagtggctgattcagggtcgaggagctgtgaggatgaggtttcccaccaagttgggacagaaaatggggccctggggtctcagcaaaccatggccctcgggaccaaacctggcgtccgcccctattgtgagtgaagtgttactggcacagccacacccaggtctcaggatcatccatagctgcttggtttggtttggttttgtttttgagacacagtcttgtgttgcccaggctggagtgcagtggtgcgatctcgcctcctgggttcaagtgattctcctgcctcagcctcctgagtagctgggactacaggctcccaccaccatgcccagctgatttttgtatttttagtagagatggggtttcaccatgttggccaggatggtctcgaactcccaacctcaggtgatcgcccgcctcggcctcccaaagtgctgggattacaggcgtgagccgccgcgcccggcctaaatttatttatttttgagacagggtcttgctctgtcacccaggctgaagagcagtggtgcagttacggctcactgcagccccaacctgggctcaagcgatcctcctgccccagtctctcaaagtgctgggattacaggtgtgagccaccgccttcggccagtgtctttattcatgaagaccaaaaactagaacagcgcaaatatccgtccgctggtgaatgcataaacacagcgtggtccagccacacaatgggatgtgacacagccacaaaaaggagcgaggctctgacacaggccacagcctggatgcaccttgaggacgtcatgctgggagagacgccaacgcaacaggtcctgtgtgattccactcctgggaggtccctagagaccaattcagaggcaggaagtagtggccgggcgcggtggctcatgcctgtaatcccagcactgggaggccgaggtgggtggatcacctgaggtcgggagtttgagaccagcctggtcaacatggtgaaacctcgtctctactaagaatacgaaaattagccgggcgtggtggtgggcacctgtagtcccactactcgggaggctgaggccggagtatggcgtgaacccgggaggcggagcttgcagtgagccgagatcgcaccaccgcactccagcctgggcgacagagcgagactccatctctgaaaaaaaaaaaaaaaaaaaagtgttactttgtcaggtgtgatgatggtagtgtggcttcatctcgagtcctctttgagaaacactttctaaaatgctcaaggatggagggtggagggtgtgcagcggtgggcggggctgtgaccgtcacctcacctcccccacaggaagcgcgtgtggggaggctcggggccggggccagcacccacactgggtctccacagcggcatggaggcctgcgtgtcttcactgctggtgctggccctgggggccctgtcagtaggtgagtgggagccgggatgcaggggggacactgaggcccagcgctctcggtgggtccctggatgggaggggtgggcgcgggcgccgacatcctgggtgtaagagcggagattcatccttgtttggagggggactgaggcctggggcatcccgagctcctcacgcttcaccccgagtggacatcccgggaccgtgggagagtgtggtgtccaccggctcacctcgcccatcctcccggcagcagccagaaggcaggggtcacgctcacacccgaggtgcagagtaggagactgagacttggcgaaggagatgctgacctaggactgcccagctgggagggcagagctgggactcgatccccgctggctgcctgccaccaccaagggcttggctgggactaggtgcccagcagtgagggagaagggaggtgggtggcggctcccctgcattccagctggactgagtgacaggggctcttgatgagttggggacccaagaagatggacagaggtaggaatccagccgtcagtcatcatcatccttcctcccatttttatttccttccacccatgggtccatcatccctccctccctccctccctccctccctcatctccccttccttccctctacccgtccgtccacccatcattcctccttccattcttccacccacccatccatcatccatccctctacccatgggtccatcatccatccctccctccctcctttcgttcccccttccttccctccgccagtccatccacccatcattcctccttcctcccattcttccacccacccgtccatccatcatccatccctcctttcaacctccctccttccctccacccgtcatccttccctccctccttccatgtatccacccatccatccatcatgcctctctcttcctttcccccctccttccctcctccctcccatccatccatcatccattcctccttccatccctccttcctttctcccgtgcttctgtgtatccatccgtatttgcagggctcgtgctgttctaggcctgccctcctgtctgactggaagagacaggccaggcatgagactgtgcagagcggaggaaacacggagggcaagagggcgggtggggggccgttgcaggagacgagcataaaccaagggaggaagccggtgggggaaaggtacgcaggcagctaagtgagacagacaaaggcccagggtgcaggcagcttgcaggcacagctagacttgcactcttgtcacccaggctggagtgcgatggtgccatctcggctcactgcagcctccgcctcctggtttcaagcgattctcctgcctcagcctcccgagtagctgggattacaggcgcctgccaccatgccgggctaattttgtatttttagtagagacagggtttccccgtgttggtcaggctggtctcaaactcccaacctcaggtgatccgcccgcctcggcctcccaaagcgctgggattacaggcgtgagccaccgcgcccggcctattttttttttttaagatggagttctgctattcttgcccaggctggagtgcaatggcacgatctcggctcaccacaacctctgcctcccgggttcaagcgattctcctgtctcagcctcccaagtagctgagattacagatgcccgccaccacgcccggctaattttttgtatttttagtagagacggggtttcaccgtgttagccaggatggtctcgatctcctgacctcgtgatccacctgcctcggcctcccaaagtgctgggattacaggcgtgagccaccgcacccggccttaatttttgtatttttagtacagacggggtttcaccacattggccaggctgatctccaactcctgacctcaggctatctgcccaccttgacctcccaaagtgctgggattataggcgtgagccactgcacccggcccgcaagcggggacttgattttcaaagcatgatggggattcagagaagattttgagctgatttacgttacattatgaaatcgatccttttaaatttatgattgatttaaaataatttttgtacagctttattaggaaattatgcactatacaatttacttatttaaagactacatttcttgctgggcacagtggctcacgcctgtcatcccagcactttgggaggccaaggagggtggatcacctgaggttaggtgtttgaggccagcctggccaacacggcgaaaccctgtcgctactaaaaatacaaaaaaattagccggacgtggtgatgcgcttctgtaatcccagctactcgggaggctgaggcaggagaatcgcttgaacccaggaggcagaggttgcagtgagctgagatcacggcactgcattccaggctgggtaacagagtgagactccatctcaaaaaaaaaaaaaaaatggccaggtgcagtggctcatacctgtaatcccagcactttgggaggctgagatgggtggatcacaaggtcaggagttcgagaccagcctggctaacatggtgaaaccccatctgtactaaaaatacaaaaattatccaggcgtggtggcaggtgcctgtagtcccagctactcgggagactgagtcaggagaatggcatgaacccaggaggcggagcttgcagtgagccgagatcgtgccattgcactccagcctgggtgacagagcgagactctgtctcaaaaaaaaagaaaaaaaaagttttttttaagagactgggtcttgctgtgtcgcccaggctggtctcgaactcctggcctcaagtgatcctccctcctcagcctcccgaagtgctgggatcacaggggtgagccacccacatccggcctgatgtgcgttttgaaggactcctgtggctgtggggcccagtggggcctggggaggtcctggagaggggattgggaggtggcctggggggaacatgatgggggtgatgagagggggatgggagggatgaagggcagcccacacgtatcagcctaaaagtttcggggaacactggggacttcattaggatggcacatctgcttggggtcctgggcctctgagctgggcaaggacagtcgcggcaggcagcaggggcatgtagccccaacctggctctttgtcccccatcctggcaggcagctcctttgggacccagatcatcgggggccgggaggtgatcccccactcgcgcccgtacatggyctcactgcagagaaatggctcccacctgtgcgggggtgtcctggtgcacccaaagtgggtgctgacggctgcccactgcctggcccagcggtgagtaccctgccctgcccaccccaggggtccggggaatccatccgacggcgctcattctctgcagggggtgggctctgggagatttaggcccattgtgggacccccgtcccctcccggtgacgacttaggcaggtttaagtgacctgcggctgtgggactcctggagaaggtttactccttgcaagaggcactggcagggccagctccttccacaccgcagcctgggtcagagcctggctcctttcacggctgagccacagtcctggtgtggacagagtgcattgtgtctgtccattcacctgctgatggacccaacttaggcgggggcttctgctataaggaaggagggtcaggtgggggtgtttgccacctgtggccaggaggtcgaagccggccttcgagagtggctcgggaatcgacctggttcccggggatcaggaagccgctaaatgacccatcatggagttgccctacctcaggactggtccgtcatacagagcccagatcaagatggtcaaagtaacaaaaagggacctgccggcttgtgtaactgcaaagtctaggaggaggcctggcttcaggtgcggcttgatccaggtgctcacaggaggtgctgtggagcccatctgtctcccagctctgctgcactaccagga

SEQ ID NO: 94883 - DNA, 104063 bp, Homo sapiens
ttttttaaatagcagcttctgcaatgctgggaaacaaggtatggtatggggtgtggggaagggaggtatgattgaagctgaagggtcttttttttcttttttttgagacagagtctccctctgtcacccaggctggagtgcgatctcgctcactgcaagctccgcctcctgggttcacgccattctcgtctcagcctccccagtagctgggactacaggcgcctgccaccacacctggctaattttgttgttgttgttgttgttgttttaagatggagtctccctctgtcgcccaggctggagtgcagtggctcagtctcggctcactgcaacctctgcctcccggattcacgccattctcctgcctcagtcttgaactcctggactcaagtgatcctcctgccccaccctcccaagtagctgggatttcaggcctgggccaccacacctggtcttaacctcaactttttacaagcttgtttcaatggtatctatgaaatagttcaacaaatctaattttgttgccaaagggcaaaaatttaggtaggatgatctagaacagcttaggaattggtcctccctaagactatactctattgagccatggtgcaaataggccctagtgaaggttcccaaattctctgtagctgtacatcactgtacataagctaaacacattccagaaaggctatttgtaaagcaaattttcattcagtaaggctcatttttccactgattgtctctttattcttatttatattacaaaagaagtgcctgttcacttcacctgttttgctcaatagaagtaagtatataaagaagtctctgatccctttctgtagagataacaactgttcattatctggaatagatctggtacagatctggtacagatctttccagatgtttgctgcacacacatactgtgacatatacttatattttttcaaaatgagaatgaattatgtgtatcgaactgcaaattgctcttatttgcttaataatatatcacaaacatcatttcatgtcattatgtttgcatatagatatttaaataattgtgcctcattcttttttttttttttaacctaacacagtattccatagtatggatatgccataaggtattaaccgcattcctattaatgaacacttgggatttttgattaatttttcactattaaaataatactctggttactattcctgtgcatagatctttgtgtatttgttcaagtttctctgtatagtagagccctgtacatgaaaatgtcaaagagtatatgcattttaaaatttaaaagatactgccaaattgtcttttaaaaaggccagactgggtgcagtggttcacgcctgtaatctcagcactttgggaggccgaggcaggtggatcacctgagttctgagttcaagaccagcctgcccaacgtggtgaaaccccatctctactaaaaatacaaaagttagctgggcatgggggcgggcacctgtaatcccagctactcaggaggctgaggcatgagaatctcttgaacccgggaggcagaggttgcagtgagctgaggtcgtgccactgcactccagcctgggcaacagtgcaagactctgtctcaaaaataaacaaataaaataaaataaaggggccaaaccaatttacgctcctacttagaatatatgagtgcaagtttcttcatattcttgccaaaattgaatattatcaatctaaagatcttaccaacttgaaaagaaaaattaaaaatatttaataatcttttatatctatttctaaaagtaataattattcattcaaacatattgttaaaaatgttttatttgaataacagtaatttggcttgtatcaggtgccatgtagggtccaagtgaagcagacagttttattacagaattttggtttgaagagggatgctttgaataaatatccaaaggtttaatcagtccaatagtcccagtggggactattcactcagtttcagagtgaaatagtcccataattatttaagcataattatggggtttgtctatttcatagacggcattagcaacaggaatatttgtaggattgatgggaatggagattaacttggaggtcagatagtgacttagtgaatgaagtggctgtagaccacttctcaaggaatttgtccttagttgtaaagaaagttactgaataggagaatctggagaaagattgttctggttctagcttcctttttctcatctgtgaaatgaagaggttgaacttggtgattaatagccatcattttatacacacttgccataaatcaggaattttataggcatgatttcatttaatcctccctcagaagagtcttatgaatgaggtaccattattatccccaatttacagaagaggctgaggctcaggaaaatgttatataacttggtctagggtggttggcttaagtccaaacccatatggtttccatcgtgctactctgcatctaagtggcttcccagcactaatagtcgaagattttgagtaagggacattttaaaattttgttattttactggtcttttaagaataggacatattggaagctttttgtatgttaaagggaaagcataataaaaagagatttaaggcaagttatgaaattgatgacctatctttttttgtaatattactaggctagaatcactacagagagtgggcaaaaatataccaaaggcaactttcttacagattcaatgacaaccacaatagatttttcacatactcatggccttatggataataaaaatattttgttatttttgattctttatgggaaggtcacacaaacaatttcaaggataactgtggaggattttatttagagggtgttgtagttatctttaaaaaggacaaatgagtttcatgagagaaaccgaaattaagttccattaaaatcctgctgtgattttgatgtggaccacactgtcttgacggattaatttggaaaaacttgactccatgcaatactgtgtcttcctatctgggtgcactagatgtctatttgttttggtgtttccattaatttaaaaacctgaaaaatgtgccagaatgaaaagaaatagttattttgaaaaaacaaatcatttctcaaaaataacatttagatgtagctactatgcctttgatcatttttgaaaggagtggcttaggttattatttatgttcacagtgagatgatcatctacgtaggtttctgatttcaccggttgtttaacacaagccactaaagacaatatttggcctggttgttgggtctgcaaaaaataaggtttgttaatgacaaaatctaacacaacttgtcaatgcaaatattattatgaagccctgctgcttgtatttagaccacaggagaaaattattattattctacaaacccgtgaagtttaacacgcaaaggcttgttacacagtcaatgaagaacagttgttttctgcccttccataaataactaatgccaagagcagcctggctatctgtttcagcttcttgttacagaataataaaataggcaaggcctaaatatcagtgcctgttaacagagctgtcctttaaattctgtttagcttctaacagactaattctcatgcttttagtacttattacattgcattttgaatctgtcaattgcattgtacattttcctaactcttccatttccatacgtttatctactccatttctaattgggttggtagttctgggtaggactcattacagaggcagcttaatgtagcggcaagcaccctggtctaggagtcataagcagtgtagtaggaaattcaggctctgttactacttagttgtgtgactggacaagacacttaacctgcatctatttcttcatctgtgaaatagggataataataccctatcttcctaactaataaacaacgttgcaaatgttctctttaaaatgtcagacagctgcttgggaaatattttgctcctgggcagtaatttctggaaggtttctgatgacaagaaattaagcaaggtttgttttgactccgaaaaaggaaagctggaaatagcgtggttatacttggtttcctttttggaggtatagttcttctttcctcttcaacttgggtgcagttaaatgtggaagaaggtgagatgtggtaggtgatgaagacagccagaactgtacacactaatgaatagcttaagtaataagagatcttgaaaatccaagtagtttcttggtctgataaacatatctatatgtatatcatacacacatttgtataccaaaaaacggatagtttcaggctatagtgatttctttcctttatatcttgtagagctggaggaacttcagtaagctgaagactctgttcagaggaaattacctaattgaaaatgtctgggctaagagaccgacaataaaggaaactggcaaaagtactctttaattacaagttctttttcatcttcatccagcacactgatttatgtgctacactgggtttgtattatatctatattttaattccacaactagacactaactttattgagaacagcgatattcatttcttcaatttcatttgtgttaacccaactgtaggtgatagtgctctgtacatcatagttacccagtgaattacgtacctgacatatgattgcttatttctggtattaaaacaagatttcataaaataaacatgacaattaaactcgttgtttgaagtactgaactttgtaggtcaatyttgaaaaaggaagctacatgactgtcttagcaatatttataggtatattatatgtaagtgggtgggtttcttggaaattgaattggtaatatggctttagagtagtaacacaaaaactatagctctgtgctctcagctaaccacttttagtgtcacctgggctgcttattaaaaattcaaatttcttatccctacccagatcagaatcaaaatacctgggggttgtagctccaggtacctacatttcaacaagcaccccagataattgtgatgcacactgaagaactactctagcttgtaatctcaggtggtaaggcattttatatatacatatatatatacacacacacaagcacaaatggtaattctatgggaaaatggaaatcagcaagtgaagtgaaatgtcaattaccatcaggaacaggaagctagttcaccattacgcatcagggaactggaagaattcttgagatttatttttttgggtgatatattcttggcagtttatcaggcctcatttgcaattatggtctgtcccttttgaagccctcagatagttcgctggcattttaattttaatagcaatttcttgcatctgttggaacagcattcgtatgaccggcttataagcaatgatcagggctagtaagatgtcacaaagctgcggtgacttttccttatcagttgggggtttttttgccatgataccatcgtggaaatgaaagacaacgtgaaaatcctgcgtccttgtgatatttcatcagtgggagtgagcggggatcttaacgcagtaagaggcaagataaacggatgagaggcattagttcaggcttacaggagcaagatgcttttagtcaaagtgttcaagatagctctcttaaagaggagcagtgaaacccaaaaatgagtgtcttttgagggcagctggaagatgacccgaggggaacttttatcctggggtggagtcctgcgaagcaagccgcaggtgagggcgtgggccaattctgcgcctcactgctgttaggcgcaaggacatcccgaaacacactcaacgacaccagcagcgagactgacagaagcggatcgccagcgggagcaacaacttgaggcgagccgttagccgcctcgccttcctcgcagcgcccctcccgcgccccgggaagcccgttcggctccgccttttcgactgacgtcccgggcgagcgggggcgggcgcgtgggtgggccgagccgtctgcagccagcgattcggctggctctgccacaccaccgcgcgcccccgctccgcccgcccctccgggcgcgtcttttccgggctcgcgctgagtcccgcctccgccggctgtccgggtgcgcgcgcgccgctgcggctttttctctggcctccgccgcgcgctcctcctcgtcccagcgctagcgggcacgcggttcctttttgcgagctttccgagtgccaggcgccggccggctgcgaagacgcggtgggccgcccctccggtgagtatccctggatggggaggttgcggccccggcacccctgccctgtcggtaccagggccccatttccagagggggactggcgtacctcacctgagccgggaggaggttgggtgggcattccagctcctggagtcggctcgcttttttccttgagccagggctatctatccgctcgcctccgctggggccgggaagattcccgaggtcactgtatctgctcctgtgatggactctggggtcctcggaaccccagcctgcctcttcctgccgctcaccgcatcccgagggccagaagtcatcttcctgatcggggtactaggctttgccacggccctttccggaggagaccatgaagtgcttgctagacctccaaacgacctttagggtgcccctaaacctcaactccattttgtcccctcccagtcgctctgtaactgagggctagggagcctctctagccctagaggcatccgccctctcgaatttgagggatgccgtcgcttccgatatcttccttgcttccgatatcttcctagcttccgtaggcttaggtttgttagaaaacagctggatcctggcgaagcgtgctttccttccttcccccacccccgttctttctgtctacatccctgccttcagtgggtgctatatatttagtatgagctttattcacttcctcttcctctcgtttgagtgcctgaaagaactgtggctgatgtctatagacatagaaaaatctaggagaatatgattcattgtctaaccccatcaaggggttacatattttaaataagacgtcatttctcctcttcactccagcatctcctccttcaaaggcatttttcaccctcttgaaattaatacgctctattcgctcttttcacctaaaaaaaggtcaatcgtcgctctgagaaacaacagtgagatgcaaaataagggtaaaatggcattgaaatgaatccctttgaaaaagtaagcggtttgctttatcagttaatggtctcatcagcgcttcagtttcctcttctgcaaaaatcagtctgttgaactagagcatatcaaaggttccttctagtgttttgattctaggacctctaaattcatgcaggctgcataatgcaaatttaacctgattaaagccttatttctcatagtcgcttgtcaccttagtttttcttttattttgtctctaacaagaaagacttttaaatgttcttgatacgtaaggcagcaggtggagattcaatgatggtactgccattgagcatatcggtcaagattttaacagkgtaaggcctcttccttaaattgtaaaatagctcatcttttgattgaaactgctaaagtgtaagacatgtaagactcctgttagaattaacactctctgccatttaggtgggggatgaaacattaaactgttagtatacttgtaccttagaataaagtaccttattgtcctgctataagaaataatttgacaactaaaaatccatggaaggtgtaatacagcaattgaaagcttgagtaaattcaattttgtgggtttttttttttttttggaaaaccccctatttaaaaacacaagtgatttagattaagatatttctttcagtatttttggtaggggtgagatgggtgaagaaagaagagtcttgttcaattcagacaagagaaatgaattggaactctggagaggctcaggttctagacccaactctagatatatatttaaccttgaacaagtcacttcacctctcttagtttttgcatctgtaaaataagtgtctttatggttgttgaaatgatccacaagtcccccaatttgaatgatatattcttataatgaatatatatgacaaatatatatatacacacgtgtatatataggtatacacacacacatataatgcaatttgcgttaaggctgttataaatcctgttataccagttgactagaatgtttttctcaaaggtttgtgtatagtggtttcaatttaggtatacttagttcttaatcctgattaaataaataattatatgtgaaaatctataaactcagaagcattttacaaatgttgggtattatgttaatttctgcttgcaagtgaaatgtgtgttataccgcactattttttaaatgtccatggcttttagaaatttataagggaatggctgggtgtggtggctcacgcctgtaatcctagcactttgggaggccgaggccggcggatcatgaggtcaggagatcgagaccatcctggctaatacggtggaaccccgtctctactaaaaatacaaaaaattagccaggcgtggtggtgggtgactgtagtcccagctacttgggaggctgaggcagaagaatggcgtgaacccggaaggtggagcttgcagtgagccgagatcgcgccaccgcactcacatactgccttacaactgtaattggctaggaactttaaaataatatgtgggcatctcattcatttattaattcattcaactatcttcttccttcatctgtcamgtatgtcaggccctcaggacatgatggttaagacaaaccctactctatgagtttatactttgggctgatggagatggttggggggcatgtggagagacagatgtacatccagtttatttttgttaaaaacaacaacagtcaaatcaaggacaaacaaaattctggagaagttaagtttccataggggaggaagagatgattctattaattgtagcctgtagactctttgacattacctttttctccatcctttcaattgctgagcctttagcaaaaataaaagctttgtttttccacttctaccattggctggtcttatatactctttctttcccttttaactttttattttgagatagttgtagattcacatatagttgtaagaaataatacgctttatctaatttcccccaataatagcctcatgcataagtatagtgtaacatcacaactacaaaattgaaatcgatgcaatccatcaaccttactcagatttcgtcasctttaatgcagtcatttgcatgtatgtatttagttctacataatgttatcacgtgtagatttatataagcactaccacagtcaagatacagaacaattgcatcaccacaaggatcctttttgttgtctttttatagatgtagccatctcccttcatccctgactcctggcaaccactgatctgtttttcatgtctataattttgtcatttcaaaaatgcttatataaatgaatcacacagtatataacctttggagactgactttacttcactcagcataattccttggagattagtgcaaggaatataccttttatcaatggcttgttcctttccattgctgagtagtattccataatatggatttactgcagtttgtttaaccagtcacctcttgaagggcatctgatgtttccagggtttttgtttgttttacttatttatttatttatttattgcctattttgaataaagctcatatgaacagttgtccacaggattttgtgtgaacataaatttctgaaatgcctgagagtgtacttcttgggtggtatagcacttgcatgtttagttttctaaggaactgccaaaccattttccagagtggctgtaccattttacattcccaccaggaatgtgtgaatgctcctcatccttgacagcatttggtgctgttactattttttattttagccattctcataggtgtgtagtaatatatcctcctagttttaatttgcatttttctgatcgccaatgatgttgatcatttttccatgtgtttatttgccattctctgtatcttcagtgaaatatcagttcatgtcttttgtccattttctatttggattttttttttaacctggtgagttttaagagttttttattatttttttgagacggagtctcgctctgttgcccaggctggagtgcagtggtgcaatctcactgcaagctctgcctcccagattcacgccattctcctgcctcagcctcccaagtagctgggactacaggcacccgccaccacacctggctaatttttttttttttttgtatttttagtagagacagggtttcaccgtgttagccagggtggtctcgatctcctgacctcatgatccacccgcctcggcctcccaaagtgctgggattacaggcgtgagccaccgcccctggcctttttattcttaatactaatcatttgtcaggtagtggtatgaaaatatgttctcccagtctgtagcttgtctttccaacctcttcacagggaatttcacagagcaaaaggctttaatttggatgaggtccagtttattaatttttcctctatggactgtgcttttggtgtcaagaaatcttacaaacttttgttatttaatttgattcctttctgttctgtataacatccattatttctgtaagctatttgagcattttctctttcaacaattttagagctcaaatatattctgtgaacaagtggccttaatggcttagaatgttaatacatattcacacatgctctcactatattaaaatggctgccttaaaaatataatgtctacctcaccaggctgtcaaatgcaacattaaaatttgtattttaaaattaaatagacgcatgatatgctaaagaggtttttggtttcactttctaaattaaaaatattttggcaaaactgtatcattttccatcaaggattttggtaagtaatccaaaaaacaaatttgtgttcttatttaaatgtactttgaaagtctacttctgcattttgagtagtgaagttatgattcatgaccatgtatttagcagacttttctactcactgttgattatgagaataatgaataaaagatcattgtatttgactgtctagactgcatttttccttttatagcagctacatgacactcattgtaactgtcttttgaaataaatattaggttcaaggtgatgtttacagttttatattttgaaaaatgtatgtgctcatatgagaaggaattataggaaaaggttagtgattaattttgagaatattcatttctgtaaggcagtactgaaattatttgtcccttcagtgttactatatttactcaaatatgtgtgcagtgagggaagtagattgttatttgaaaaagataaaacattggtataaggcaggggctggcaaaatactgcctgtggccaaatcctgcccaccaccggtttttgtaaataaacttctcttggaatatagccacatccattaatttatgtgttttctggccgcattcacaatacaacatcagagctgaaacagagcccttatgtcccgtgaagccaattttctctctggacctttacagaaaaagtgctgaccccagagataaggtaaccttataaattgttgattacacacacacacacacacacacacmcacacacacacacacacacacacaatttaacaaactaccctgactttttataccttctggttacatttccaggtgatattgtgattcaggagagtgcattcattttctttactaagtctccaaagcactgtggtctaggagcagcaataaggaatgcatagagagttgagacggttgattttgttgttaagtgtgggttatttaaatgtgaatgtgaatttacatgtgtggcaatcagtaagctgcagatagacttctatgcagtctatgatgtcttttggagaccctgttgtgagctgtagcggtaataagagagccaggcatggtagtgtttttgctcctgaaactgctatgtgatctttaagtacatagtagtaagagcctatcaaactgagcttagactgttggtttattattttgtttgtacaacttccttttttataacgaagcagttgacactttagttcttttaagtgttctaagtgtaatgttgaaaatggaaattgagtaaagacaggtggctgtgtatttagaaagtaataagtctccatctctcatcatacacaaaaataacttaagaatatattttaaaaatctaagtatatattttaaaaaatcttctggaaagtgtaagacatcataacccagttaaaaagacaagtgatggccgggcactgcagctcacgcctataatcccagcactttgggaggccaaggtgggaagattgcttgagcccaggagtttgagaccagcctggacaacatagtgagaccctgtctctaaaaaaaaaacaaaaaaaacaaaacaacaacaacaacaacaaaaaacaacaaaaaaagccaggcatggtggcatgtgcctgtagtctttgctactccagaggctgaagtgggaggatcccttgagcctgggaggtcgaggctgcagagagctatgattgcaccactgcactctggcctgggtgatagagcgagaccctgtctcaaaaaataaataaataaaataaataaaaatgaaaaagcttctacatatgcattagaagctttaattgacctccacttaattgactcaccacattgaataatttttatttcctttgtaaaatacagtgtacactgaatacttggtattagttggttgatctccagtactccagcgtgcttgtttacctaccagtacagtaaatttttttactactaaacctgtatatgttggttgtatttgtttttttgtttgttggttggtttgtttgtttttgagatggagttttgctcttgttgcccaggctggagtgcaatggtgcaatctcggctcactgcaacctctgcctcctgggttcaagcaattctcctgccttagcctcccgagtagctgggattataggtgcccaccaccatgcctggctaattttttttgtatttttagtagagacggggttttgccatgttggccaggctggtcttgaactcctgacctcaggtgatccacttgcctcagcctcccagaatgctgggattacaggcgtgagccaccgtgctaagcctgcttgtatttgtttttaaaaggtaatttgtttaatatgttgtaacctgacaatatatgagtgggggagattggagttctttttactgaaaatttacaaatgaaataatatgatgtctgggatttgcttaacattatacaaggggtgagggatggaggtgggttgtgggtagtatggaagaaacacaattcagcacatatgaataactgttgaagctgggtgatggttacattagattcattatgatgaaacaaattgttttgagaagagttaatgaaaacaagttgcaaaaaaaaatactgtccgcttaaatgtgggtaagatgactatacaagatacgtggaaaaaatataaaaatctaaaagagttttattttattttattttattttattttttgagatggagtctcrctcttttgcccaggctggagtgcaatggcgtgatctcggctcactgtaagctccacctcccgggttcacgccattctcctgactacaggcgccctccaccacacctggctaatttttttgtatttttagtagagacagggtttcaccgtgttagccaggatggtctcgatctcctgacctcgtgatccgcccgccttggcctcccagagtgctggggttataggtgtgagccaccgcaccagccatctaaaagggttttatactcacattacttgtcaaatgtaaaatcaatgggcctggagttagagaaaaaggtcttggcctcttggccccatatagaaagtttgaggctggcatggtggctcatgcttgtaatcccaacattttagggggccaaagcaggaggattgcttgaagccagttcaagaccagcctgagcaacatagcaagaccctgtctcaaaaaaaaaaaaaaaaaatagctgggtgtggtggcacacacctgtagtccccagtcactcaggaggctgagacaggaggattgcttgaggccaggagttcaaggttgcagtgagtcatgatcacaccactgcattccaacctgggagacagagtgagatcctgtctttaaataaaaaaacaaaacaaaacaaaaacaaaaaaaaccccaggtcaggtacagtgcgtcatgcctgtaatcccagcactttggaaggccaaggcaggcagatctcttgaggccaggagtttgagaccagcctgggcaacatggtgaaaccccatctctacagaaaatttttattattattattattgagacggaatctcgctctgtcgcccaggctggagtgcagtggcatgatctcggctcactacaacctccgtctcacagattcaagcgattcttctgcctcagccacccgagtagctgggattacaggtgcccaccaccacacccggctaatttttgtatttttagtagagatgaggtttcgccatgttggccaggctggtctcaaactcctgacctcaagtgatctgcctgcctcagcttcccaaagtgctgagactacaggcgtgagccaccacgcctagcccaaaaaatacaaaaatttagttgggcatggtgccatgtgcctatggttccaactactggggaagctgaggtgggaggattgcttgagcccagtaggtggaggttgtagtgaactatgatcactcacgtcattgcattccaccctgggtgacagagtgagaccttgtctcaaaaaaacaaaaacaaaaattagccaggcatggtgatgcacaactgtagtcccagatacttgggaggctgtggcaggaggatagcttgtgcccgggaggcagaggttgcagcgatccaaggtcactccactgcattccagcctgggcatcagagcaaaaccctgtctcagaaacaaacaaaaaaacaaaaaagccccccaaaaataaataaaccaaaaccacacacacacaaagtttgttgaatgagtatatatataccactgatgaaaggaaggtgaaatgtttgccatacatatttttatgatcgtttacctgaaattaaccttttaaattacataaccaattgttctaaatcacattagataaaagggtttctactgcataatatccataatatataaagagctcctaaagatcaataagagaaaggtacccactacaaaaagcaaaaagtggcagaagattatacatgggcatttcccaggaaaagaagtactggtgaataaaaaagaaaagatgttcaaattgactctggttattagggaaatgtaaaccgtttttcaccagacagattggcaagaacttaatatccacttttaacaaataggcatttgcatacactgttaatgagagttcacatgtataactctttgctgaagaataccaaaatcatctcatttttaaatgtgcatacattttgacccaatagttttattagaaaacaattctagggaaatattacatgtgtataaaactatgtataaggtttcgctgcagtgaaactgtttgtaactgtgaaaatttggcagtatcctaaatatccatcagtagggaatgatttaaataatggtaagttatactgtggaataccattgagttattaaataaaaaaagaagaaaagcctcttggttagacatatatatacactgacataggagttccaaagtatgctgttaagcaggggaagagagggggagggagtcaaagaacagttgtataccataattccacttatctaaaaataaacccttatcatgtgtatgggtaatacaaaacaatctgattgatacacatcaagagtaattatccctagaggaaaagagagtggtgttagaggagggcagtatagttttactttttctctgtacaattctatattatatattataatttacaattacaattttgatagtaggtatgcagattactattatagcaaaatacaattactattttgatagtaggtatgcagattactaatatkaaacatttgcacactggaggatgcttataataggattccttcattctacaacaacactctactgtaaatgtaattaatgccttgtactgaacactcaggtttttaaaaaaatgatgttttctgctatcgatgaagtattggtattttctaaatttttgacaccaaaaatataagtataaaaaagaataaaaacagtaatttcatacccagaaacatccattgtcaactttttggtatatatgcttgtgcttatatgtatggacacttgcatgcacatgtgcacacatatatcacctttctacaaaaatgggtttttactgtacatactgatttgtaacttgcttgtttaactcgacactatattgtgagcatcttgcagcatcagtaactccgagtaagtgaaaaagacatctggtgggaaaaggccaacatcgtgccatgtaaatacagtgttttagttaaaataactggtttctaggacaaaccagaattaaaaaaaaaaaaaagtcatggtcaccaaagtaaataaccaaggaattttaaagtctttaatgttgagtcagttcagttctgttttgaatttaactatgaacatgttatttacagtgtagttatcaatgatgatgtaaaagtgcaatatattaaaatatcattaggaagctttttttgggtggagtttgattttagcgaagaattaaacactgaacctgaatggttatttttgttcaaagaaaaaccaactgctgtggctagtttttggtagaggtgtgtgtagttgtattcttttgcaacttataaaagtaaagaaaatctaggtatctgtggcaacataacctttttctatgatatctcagtttgtagtttatcaaattgattattaggagaactgtgtcagagaattaagtttgatttgggcaagtatgtgtgtatgctactttctcttgtcatctagaagtatttgttaaacaaatttgctgaagacccattataatttcctctgggtttatgctgtaggacttagaggtgaaaatatcttacttttgttgaagggtttttgttacttactattttccatgaattcaacagtgcattttacaaaacaagattctacctggtagacaatggtgttaatgtgaaggcccaacatagctatactcaggtttttattatgatgattgaaacagtgtccctattctccaaagccatttaggcctttttggaattgatttcacagtacagaggattttaggtgctatcaagttagcagattttaaagggaatcaggatagagtttctctatttctcacttagttaatgagagggcatgtgagattgaacttttacagaggcattgaaaatgttaatggtggattcttgtggtagttatgaggttaatggagtggggaggtatggtgaaataactgtttcttcttttttcttttcttttcttttttgtttttttttttgacggagtcttactctgtcacccaggctggagtgcagtggcaggatctcgcctcactgcaacctctgcctcccaggttcaagcgattctcctgcctcagcctcccgagtagctggaactacaggcatgcactaccacgcctggctaatttttgtatttttagtagagatggggtttcaccatgttggcccggctggtctcgaacttctgacctcaggtgatccgcctgccttggtctcccagagtgctgggattataggcatgagccaccacgcctggcccctgttttttcttaggtattctgttttattacctttaatgtggactttaagtattttaatactataaataatgatagggttttgtaggaccaactctcctggggaatacctgaatgatgttttatcaaagaaaacctggagaaataggcagagctgccctgctaagatggtgaaaattcactgtgcttcaggatatgttagtaatttctgctttccagatgaactgaaaactgaaaactccctcagtcaggagacaggaacttggtgaatgagcataaaattcagtcatggttttgagaagaaaaagaagaactagcactaataccacatgggatgaatccaagtaaaagatctatgttccacatgacgactgaaagttgagaagcagcttcaaagaacagttgaaaaatcacaactttactgaagggtagaactcggcagaaatagctgtagcaattgttagatgaatatgtttcagacaaacagagcagaaaagagaagagaaggcctaggataatgatatttcttcacctggaaccatggaaactttcccgatttggtcaacagtcaattgcaaggttagtctaggacggtttaaagtctttagtggaatatttcgggttcagaaagtgtcagcaagcaaagcaaagacccattttggaaggcattggggtcccttctgtacctagacaattccttataggagtaggttagaatttctgtgaagcaagttgtttttctataacctggaaactacaaaaggcagggctcaggcacactgtattggtgaattatagcaacctgtagatgggaagctgtgtagtttttttatttcttcaagtagaaatgtgagtattagcacattcattcaaatagagttacatgttataaatttttaagcaaaataactgacctaagtatgttatacagctcaaatttccccccagaaaattttggactgttttactaagattttagtttttagtgtcaagtattaaggccaggatttttatgtggaagcaggtttttaaaaatttatatacacattgacttaattttaacatcctcttgatcatcaagagattaagtatttaaatgtttgtaggaaagtagcttttttttttttgagtctcgctctgttgcctaggctggagtgcagtggcgtgatctcggctcactgcaatctctgcctcctgggttcaagtgattctcctgcctcagcctcccgagtagctgggattacaggcctgtgccaccacgcccagctaatttttgtatttttagtagaattactaaaaattactaaaattacatgttggccaggctggtcacaaactcctgacctcaagtgatctacctgccttggccttccaaagtgctgggattacaagcctgtgccaccatgcctggccaggaaactagcttttttgtttttgtttgtttgtttgttttttgtgagatggagttttgctcttgttgcccaggctggagtgcaatggcacgatctcagctcatctcaacctccgcctcccgggttcaagcgattctcttgcctcagcctccttagtagctgggattacaggcatgagccgtcatgcctggctaattttctatttttagtagagacagggtttctccatgttggtcaggctggtctcgaactcccgaactcccgacctcaggtgatccacccacgtcagcctcccaaagtgctgggattacaggcgtgagccaccacgcccggcggaaagtagctttttaaaggaaacattcccccaaagaattgacttcattataggtggtatcccttaaaatacagactgtttcagaagaggcagcagcagaatgaaaactttcatggtgaattccccaccttctattttattcctgttttgaaatggagttccccaacatcaccattacagctcagccatatctttgcatttctttgtggacttagttagaactgaatgattgatgattttcagcgcgaggagtacaaaataggggagttgayacttgcatcagccctgctagctgccttgaatcctagctcagtaggggtcactcttaagctgccataggcataacaacttctacataggtggcmcttctggcactttggagaacattctagtggtgggatagttccctaacccctgtcttatctctgtggtaccctgcatctatgccatttttgtttggttacataaaatgtttctgtggagtgattggcctatgattgcattgataacatttagtaaaacagaagatttgttcctaacacgttttacagagctgatctttttattgaaaaatccctaaccctaaagaccacagttttttgtttgtttattttgtttgttagcctcatagggataaagtgcttccttataatcttgtttccaattgtcttcaactgaggaagaggaagtctgttgactgtctccctgcaccccctctgattgaaggatcaccttgcttagggcactgccagcttaaaagtggaggtggatgccatactaggacattaccaaagatgaggaggagtggcagtgaacttagagtctatagccagagtgtacattgaattttaaaaaccaataatctgagatctagtctgtacttaagagacatatttaaacaacaaattgtagactatgggatttcttttctttctttttttttttttttttttcttgagacagggtttcacttctttcacccaagtgcaatggtgtgacctcggctcactgcaacctccaccttctgggctcaagcratcctcccacataagcatcctaagtactgggaccacaagctcatgccaccatgcccagttaatttttgtattttttgtagagacagggttttgccatgttgctcaggcaggtctccaacttgtgagctcaagcagtttgcctgcctcagtctcccaaaatgttgggattacatgagtaagccactgcgcctggctgactatgggatttcttaagctaagtagtatattgaaaagtctgcagtgtttcatttgatgatcagtctccagtgaaaatctgcaaaattgagtcaaaactgaatttgtctttcaaagttgggattattgttatataacactttcatggtacttaatgacttcagtgagatgtaagtaacacattttgaagcagctcacttcggttgaaagaattatttttcaacctggagttgatttcttcaatttcgcatcattcctagcaaattgtaacattaaggtcatattatttgtccagtcttttctaaatgctgtaacgttttgtcatgaaatcatgggaaaatgttacttttgcattgtgaggagtgagtaggaatttgtttaggacagaaaaccaaatcttagaattgtggactttgcttatgacttctacctctttagttaaaatcaaagttgcgcagttacctgtttgagttgcataaaacagttctgtgggatgatcctctcaaccatggttatccagccttttggcttccctggaccatgttggaagaagaattgtcttgggctacacataaaatatgctaacactaatgataactcatgagcttaaaaaaaaaaattaaaggtgtatacataattttcacgatatctaccaccagagataagcaaaaatgtcctcgcattcaaagggttggacacggctgtgagtataaactattggaaattgtgttgagtttgatttttggccagggttagggccatgtcctgctattgccagaccatttttttcccttgctcttaccggcactgccccattgctgcagaaagaccaggatgctgtctgggcttggcacaaggctctgaacctcaatgtcattcccttctactttcaggcattagcagccctgaaaaccataagatggggctgttaaaagcattttgaaattaatcttttcttgttctttttttttgttttgagatggagttttgttcttgtcacccaggctggagtgcaatggcgctatctgggctcactgcaacctccatctcctgagttcaagcaattctcctgcctcagcctccctagtaggtgggattacaggtgcccgccaccttgcccaggtaattttttgtatttttagtagagacggggtttcaccatgttggtcaggttggtcttgaactactgaccttaggtgatccgtccgcctcggcctcccaaagtgctgagattacaggtgtgagccaatcttttcttattcttaaaaaaaaatcaggcttgtaagacgcggtcacatagccatcaatcagagttaaagatgtatggtaagagagaacaggtttgttttcaaaactgtcctctgtgttggccttagttttgcctttgatgaaaaagcaaactaccctcttatattttattgctattcatattggttgcagatgcttcaaggaggattgaattactgcctagtttaaaggtgatatatcttaaataatcatagaaatagctgcaaaaggatatcttaaaggtacattacattgcagatgcaacagaagctaaatgcattagggatacatgggcaatatctactagtaggaaatatcagcactgttaggattacagccattttcttggctgacctttgtatggggatacataactctccttccttaaatagtatttcattgagatgggaaaaaagactcctgctctgcttgggcttttttagtgctctggcccttctctttaaatctgttgttaagagttcttgttttggcactatgcaaaagtgccttatactgaggcattttaagtacttaaacaatgaaacctccgttggctgtgttccacagtggaactaacccattccaaactttacacttgctggagtattataaccagacagcagtgttgtttgtaacagctggctagtctgtagatgaaattgatcaagatgttttagtttctcagttggtgcctttcaactctgcatttttcttcctctattctttcagaacctcactttcatcctttggctttgcatacttttccttgccccaatatttgaaggaagtttttaataacattcattttcaaagcaagccaggtgatacttaagtagtaacaggtataactggttaattccagagggtaactattatttttaacttttaaaaagcatataattgtcaggttgggcaattattatagggttgaggattgcctcatgtgtgaccttcctttcctattctacctacatgtctagttctctgtgttagtcttctgtccacttaaaatatcaattgaacagtaagctccacaaaggcagggcatagtatatacttactgagtatttcttgaacaaatgcacgcacatgtacctgtaattacccagggtttgggaaactagattttaaaaaatattttgaagggaaagggttgttactggctatacttaacttttaattttctccctccttaaatcaacatgttattcttcagcaatgatgtttacaaaaccaaataaaattagaattaaccatttgtttcccacttcagtgagtccgtacccagtggggtgatgtcactgtcatatttaggagaggccagatgatataattgcctttataactttctgttacaatttaaaagagcacagtgacttactaccagaaaagctttgtaccatcatattcttgtttatatgtagggaccacttaaccaagtggatacttttgtttagatttttaaaagttttagtttcatgtcttctaaactttaaaaatatcatcttattatatgatttattgttttgatctctctmtatatatatatataattttatttttttgagatgcagtcggagtgcagtggcatgatctcagctcactgcaacctctgcctcctgggttcaagcgatcctcctgcctcagcctcccaagtatctgggattacaggtgtacacaaccatgcctggctaatttttgtatttttttgtagagacagggtttcgccttcttgaccaggctggtctcaaactcctgacctcaggcgatcctcccacctcagcctcccaaaatgctgggattacaagcatgagccactgtgcctggcctgttttatgattttaaattacagaaaatttgtttaagatagttcagaggtcctgtgtaatgtgcccccagcttcccctaatgttaacattttatataacactagtgtgatactattaactaaactaaggaatttatttggatttcccttgtttttctaccaaaatctttttctttggtttcagaattcaaaattattatacatgtttattttagaaaacgtatgtatataaaaacataaaacaaaatacggtgatcttcctacccagagacaactactgatatttttagtatatatccctcattcctggtctcgaactcctgagctcaagggatcccccctacctcagcctcccaaagtgctaggattagaggcatgagccactgcacctcttgctttttttatacttaatattagcatttacttcttttgtgaacctcttgccatgtttgctgtttttaatacatgtagttacatagtcataggttgcttaatgacagggacatgttctgagaaatgggttgttaggcaatttcatcattgtgaacattatagagtgtacttacagaaacctagatggtatagccaactatgcaccaagactgtatggtacagcctattgctcttaggctacaaacctgtacagcatgtgactgtattgaatactgtaggcagttgtaacacagtgctcagtatttatgtatctaaatatatctaaacatagaaaaggtactgtaaaaaaaaacggtataaaagatgataaaatggttcagctatatagggtgcttaccataaatggagcttgcaggactggaagttgctctgggtgagtcagtgaatgagtggtgactgactgtgaatgcctaagacattactgtacaccactgtccactttataaatactgtacacttatgctacactaaatttatgaaaatatttttattcagtaataaattaaccttagcttactataacctttttagtttacaaacttttaaatttttttgactttttgattcttttataacatttagcttaaaacaaacacactgtacagctgtacaaaaatattttttctttatgtccttattctaaaagcttttttatatttttaaaattgatttttttctctttaaacttctgtgttaaaactaagacacagtctcaaaacaaaaacaaaaacaaaaaactaagacacaatcacaaacattagccgaggcctacaaagggtcaggatcatcagtatcgctgtctttcacctccacatcttgtcccactggaaggtctttaaggtcagtaacatgcatgcagttgtcatctcctataagagtgtcttcttctggaatacctcctaaaggacctgcctgaggtgcttcttgagaaggtgtcattctttttagaaatattgatatgtccatggtggtttgctagtattcttgaataatgtgccctgctgtgacttcactagtctacaggaatttttcatctccattatattcttatgggacgactgtatatgcagtccgtcattgactgaaatgttatgtggttcatgactgtagtttattccctatttttagatattttgttgtttccatctctttgctcagttaattcttcatgattttaagtaaaaggccaactgtgtgtgtcttctcaatcttttcccccctaacaaatgagaaatatgacactcttatcattacagtggctcaataagccagtgattctaaatgtatgtatattatgttgaacgacttgaaattgccttttttttttgtctgtagcaaattttttactattggcaattttatgtggttcaacctaatagcttgaaaaagatttctaggttattctgaccaccctgcacccctgtcccatctctcacttccctgagaatctgcatttagaatagtgagctgtttctgaagcctttggactaagcaacaatgttgacaaacttaccttccaggagtctctgataagcacaacatcctgaagacatatccttgtgttgatgacatatgcagagaactttaactatagtgacttgcatctgtgtgtcagtacggtagagatagacttctgagttttcacctaagctctgcaagagagcctgatggtcctctatcctggttccatatctgtagtgactagctaaggacagtggtgccacccagtggcacgttatagacaagctgctgatgttgctttagcactcttcactgcatcaaattctttcctttcccatccctttcccttccccttcycttcttcccttcttcccttcatccctccttccctcccttccttcctctctccctttcttcccttctctcttctctcctccttccctccctcccttcttcctttctttttgttttctttcttttctcagggtctcactctgtcgcccaggctggagtgcagtggcgtaatctcagctcactgcaccctccacctcccaggctcaagcgatcctcccacctcagcctctggagtagctgagactacagtcgtgtgccaccacggcctgcaaatttttgtacagacaaggtttccccatgttgcccaggctggtctgaaacccctgggctcacatgatccgcccacctcaacctctttagtagctgggactacaggcacatgccatggcagctggctttctttttctttcttgcatactcttccacattcatggtctcattttccttttattttccccacctatgccactggcacttacgagcttcatttcggccagctgataatattcagggacactagccatataattttgctgtgatacccttattttaataaagctttggaatataggatgtgaaatagtaagtgtaaacacactgaacacactgtcacttactctgcttatgaagtcgtggttcttacccagaattggcatcaagtttgtacttggtcagaatatggcacttcttggccaggcatggtggcttacctctgtaatcccagcactttgggaggcagaggtgggagggtcgcttgagcccagaagttttgagaccagcctgggcaagatggtgagaccctgtctctacaaaatttttaaaaatgaaccaggcatgatggcgagtgcctgtaggcccagctactcaggaggctgaggtgggaagcttgcttgatcccaggaatttgaggctgcagtgagctgcgattgtgccactgtgctacagcctgggcaacagagcaggaccccatctcttaaaaaaatgccacttctcctgttcaatgatgagactcctaatatatgagaggaggccctcctatgtatttcaaatgtggagaggcatatacttctactcagattgaaagatttatcttggaaatccttttttggtttcctttctacataatatgacttcttatttcattccaacttaattccaaaaatatttatccagcacctactgtgaaccagtactgtgctaggccccaggtattacagtagttatcaagacagacatgacctctgcctctaaggagcttagagcctagcaggggaacaggaacttagacaaatttaagtgctgtcccgtagggtactttgaggtcaaatagyagaggcacttcacgtaacataggaggtcaaggaaggctttctacacatttcatttaaatgaagacctaaagggaagcaagaaaaggcagaagagaatgttactggcaaagggaaaagcatgtgctagaagcaagcagagatgagagattaagcttgatgcttttgagaaattaaaagaggttcaagttcgtaatggctacagctgtgagatcaactcttttaagtctcatgacagtacctgtaactaataatattatcccctccatttttatggttgtggcaaatgaggaaaagatgttaaatattttgccctaggtcatccatctctagtaagtggcacagccagggattgaacccaggtcatctggctgtagcatattggctcctaactaccatactggattgcctctcagctggggcatagtcttccttagtaaatggaatggtctgtgtctggtactacctaccataaaaagagctggagcttataggatctggattagtttagaaatacaggtttgctttagtcttttattcttgattgggaatgaaatgcttcatttgatatgcaactctgaggctattgacacatattttccaaaaaaccatagatgggaaattataactggttacatgtttattacaaaaataaaattggtgtgaaatatgtatttcctgcaaggctagggtttttgtttgattgttaaagttaacttggcaatatccttttctctgatttttaaagttaggctgagtgcagtggctcatgcctgtaatcccaaccctttgggcaaccaaggccggaggatcacttgagcccagaagtttaataccagcctggttaagatagtgagatgcttactctacaaaaataaaaaaataagttagctggatgcagtggtgagtttctaagtcctagttataggaggctaaggcaggaggatcccctgagcccagaagttcaaggcagcagtgagctatgattgtgccactgtactccagcctgggtgacaaagcaagaccccatctctcaacaaaaaaaattaaaaattaaaaaataaaattagttaaagggtgaacataacttattaaataggactatacttttttaaagtcacaaatcaaatacctatacacggagatattttcttacaatgcatctgatttatcctatatctgtttaagatacaagtgtgttttttgtgagatgagaaattgacttcagtttgaagtcatcagttaaggtgttaatctagattctagaaattggattataaatgttgcacataaactaagattgtagtaatttgatatcattgaaaaacacttggaataaagagtcttgtgtgtttgtgtgattaatggtgtgcagctggtgctttcatttacttgcccgtcgtatatgactgtggattcaaacaggagtttttacttggaagtgtttttccaggagtgaaggttggcttctgctaatatacccatacattcttgccttgttctctatgggatgaaagttaggatacaactagggtcatcattaggatatttttgcaaaagaaagaggggtttgataattatgctgggacaaccacaggacagtcctcagaaagctgggaaatgtgttcacctacattttattttattttattttttgagacagagtttcactcttgttgcccaggctggagtgcaatggcgtgatcttggctcactgcaacctccgcctcccgggttcaagcgattctcctgcctcagcctcctgagtagaggggattacaggcatgcaccaccaggcccggctaattttgtgtttttagtagagacgggttttctccgtgttggtcaggctagtcttgaactaccgacctccgtgatccgcctgctgcagcctcccaaagtgctgggattacaggcgtgagccaccgcacccggcctcgccttcattttaaccagtttatctggggatcaggtttgtgactctagcttccgaagtactggctcaacccagtttagcgaaccatcagtgacagagagatttccctctactttggagtaaaagttaatttttgagaaaatattctgttgtattattatactggaattgtatgcgtagcagctgtattctttttatactttttagcattgtgaactccatgctgccagaccctgttggggttattgcaggacacatttgtagatgtgtgggccttacaggaagtgaaattacttaatgatattttaccactgctcgaaacatttcgaaagaaaaactttgagagaaagaaatgattcagccttttctgcctcctactttttgaagtcagctagtacacatttgtaatgtgatagcacagttgattggaatgtctgaagctagacaggtaagatgataccctttgaagtttgagtatttggtcccagaaccaggttgtaaagaagaaagtactgatggaaagctcacttctgaaatcccctcctttcacaggccctctgatcacccgtgtggaaagtagccctctgggtctactaatcacagacatcaaaggaatgatattcatttggttccttttgcttgagttaccttctcctggggcaggcttaatttcctgtaggggactgattctggtcagttgaaaaacattttcattatggggcagaaggttgcaagtatggcatggtacctattctatctcatgcagatataatctggcatttgagttcccatttgttttaataggataagtaagtagaactcttagctttaaagaaatttatactttcatctgtgcagaacccctcatgattgtctggctttttgatattgtctgttaacttgctattacaggttgagtatctcttatccaaaatgcctggggccagaagtgtttggattttggaatttttcaggttttggaatatttgcattatatactgactggttgagcatccctaatccaaaaatctgaaatactccaatgagaatgtcctttgtgtgtcatgttggtgctcacaacgtttcagattttggagcatttcagattttggattttcagattagggagactcagcttgtaccagtcaatttttgttagtcacgttttgacataagggacaccaaaaggatgcttagcttcagaaaacagttaaccatggtagttatagtaaggaagaaaaccctcattttatttagcttataggttatattacatgagcaaaagaagagtttattttgctttgagcctaatttaaaaaccgaagatctaacctgctttccttagtacaaataaagccaacttttagctccttttacagtattactttgccacttgagtagggctaaacaccttttggaccatattcattgttactatcaatacatagacacacattagaattaattgaaaggctggtgctatattttctactttattattaaatgataaaagtaacattcactgtagaagttttagaaaatgtagggaaattataaggataaaactaaaaataacctctacgtgggtgcagtggctcatgcctgtaatcccattactttgggaggctgaggcagatggatcgcttgagcccaggagttggagaccagcctgggcaatgtggtgaaaccctgtctctaccaaaaatacaaaaaattagcctgatgtggtggcgcatgcctgtagtcccagctactcaggaggctgaggtggaaggatggcttgagcccaagaggtcgaggctgcagtgagccaagattgcaccactggattcctgcctgggtaaccgagcaagaccttgtctcaataaaaaaaaaaatcacctgtaattctgcaacctagagattaacattttggtttatagcctacataaatttgaggaagttgatcttgagtatgaagtttcatcttaaaccaatttcacttcatatatcttaaacattttctcatactcttaaatactctggcaatgctgcatttgatggccgcatagtatttgatcacatggatacattattttaccaatcacctattgggaatttgaagttgttcctattttttttttctgttatccataccaccatgatgactgtcctctatttttttgtgtgaatctctaatgatttcctttaggataggggtccgcaactcccagaccatggaccggtactggtccatggcctgttaggagctgtgctgcacagcaggaggtgagcgacaagtgagcatttctgcctgagctccgcctctggtctctggtgcccgaaagtttgagaactgtggctttaggatattcccagaaatagaaagtgaaattacaagtgcaggaagtataactgaaggcctgttgtcacatattaccaagttattttctatttagcatgtactaatttctacttttgtcaacagtatataaagtgcctttttgtatacttttggcagcactgagtaatttctttattcttaattggcactagtttttatggacccccagtgcattgctatctgttttagtaaataaaagttattcatggcaggaattaaaataaggatgcaatattataagtagtagtactgcaaggaactggtaactccagctggtactttgagaattgtctaaacggaccatattttaactctaagggtctatgtttctaaaaatatatttttcctttctgaaatacttttatcagtctctaatgtagaggaaagtgctatttttttctcctaaagttgtaattccatatgtactttctgctcattacgttaggcatttctctgtgtgtaagacttatgtttttgccattttaaaaaacaaaaacaaaacatacattctggcaaaaattgtacaaattttgtgggaagtcttgattgttacacaagagtactttctggttaagaacacttaaggtaacaatcactttcttcaagtattgttcaggtctgtagtattttaatgaatgccttgtaaattcagattcatccatgtatcaacacacttcttgactaaacttggaaaggagagttgtggtaaggtcagtgtttgctgttatgtaatctgtttgtccaaaatatttaaaaatcagtatcgtaagattcttaattcagagtcaagaattatcagtgtgacagcaattttcatatgttgaaagttttttccccagtagttgtttcatgataatcaagctgtttcttaggtgtggacctcaaaaagtattatcagttgatttttatgactttgaaaaattctaatttaaatgcaattgatatattgagagctcataaacagaatgtgctttccctgttgatactgctgctaatttaattctaggtaactgaaggaaaaggaatggtgtgcattcttgttgttttttcatactctcacattcatcttttatctagtctcaagatgatcttaagagtaaagctgtaattataactgattagaaagaatttcctaactttagtatagagggaagcacatagggtgctttcttaatgttctagaaagcagaccctattttagcttcttagtcatggagtggggggaactgtttctttctttttaaaattattttacagttatcattgtattcaatttttaaaattcttacaacctctgtgaagaaggtaaagagtagatgaataaattttaatgtcaacctagaacttcactccataatttatttgtgttatagtaagttattttaagctagtatatacccctattcaaaagtcaagatttaaacattgttgctaaaaagtaaatggggcctggcgccatggcttacgcctgtaatcctagcactttgggaggctgagacgggtggatcacctgaggtcgggagtttgagaccagcctgaccaacatggagaaaccccgtctctactaaaaatacaaaattagccaggcatggtggtgcatgcctgtaatcctagctacacgggaggctgaggcaggagaatcgcttgaacccgggaggtggaggttgtggtgagccaagatcgtgccattgcactccagcctgggcaacaaaagcaaaactccacctctcaaaggaactttctggcatttaaaaaagctttccttggatcagatattgaaaatccctctagtgttttaatagcttctatttgtcactaaatatgaaggatgggtgggtttgtggttaaaaaaataaatagcaacaatttcccaaaaggtacatatttaaactgaatttcaaagccgagataaaaagtatggttcagaaaccggagatttcagttaagcttcaggtaaaggaagcaaataggcagaataaaccacacagacaaaatgtcaaaccaggcaatgtttgtctttgagcatcttccatttcttattttagtaggcatctcactggttccctgtgtcttttatcctgctctctgtcactggtagcagaacaagctaaacttccttaagcaaaactgtcctaagaaatgtacactgcagagacttcctaaagagagatggatggattcatttggaaacatctgtgtgcacactctaatttgtattcatttttccctagagaatgattacacctatataattaaaaagttgcctttgaaaactattggcaccaaaaatggacaataattaatgacccatccctcattttttaaaaccattttattgtggtaggattgacatacaaaaagctgtaaagatggaatgtatacaactcaatgagttcggagagaatcatcaccacaatctatgccataaacccatccatcacttccaaaagtttcctcctgccctcttatgtattgttatttgtgtgtgtgtgtgtgtgtgtgagagagagagagatgaaaacacttaaaataagatataccctattagcaaattttaaaatacacaatgcagtattgttaactataggcaccatgctgtacagtagatctctgggacttcttcatctttcataactgaaactttgtatcatttgactaataccatcctgtttctccctctacccagcccctggtcaccaccattctgctctctgcttctatgagtttgactctttttagtttccttttataaatggtgtaatgtagtatttgtccttctgtgtctagcttatttcacttagcatagtgtcctccaggtttgcccaagagaagtgtttcttttttagagacaagctcattatctttactttaaagcctattttggttctgagagtctacaacttggtatgtaaggagtgaaatttgtgtgcttgcagttcattaggcacttgatagatctacatcgtatttatatatcttcatactaatcatgggggagaatttatgtaacaaaatgaatgataatagaattattagctaagattggactatttctcttggcattcaaactagactctgtctttgagtttagatgaagagaatgggtctaagataaataagcattgcttatttgctgtaatgtttaccttatttaagtaagaaaaataaaaataaacattgcttcaaaatggataaagtgaaaactatcagaatactgcatatttatctatgcaaggaaatatgactgttgtcatggatatgcagtttggtatctcaagcaagaaggtatcagagaatgtgaatatggcatagtttataagatctgtgacctaataatcatacttctaagaaatgcgagggaataattttatagtcttgaagtgggaaaatgacccagaagccataaaggagatatattttactacttaaaactaaaaaacaaacagccaacaacaacaaaaaaaccccacaatatttatctaatatgtctaagaaattcagacatagtgaatttttttttttttatttgagatggagtctcgctctgcagtggtgcaatctcggctcactgcaacctccacctcccagattcaaccaattctcctgcctcagcctcccgaatagctgggattacaggtgcctgccaccacacctggctaatgtttgtatttttgctagagacagggtttcaccatgttggccaggctgacctcgaactcctgacctcaagtgttctgcccacctcgacctcccaaagtgytgggattacaggcgtgagccaccatacccagccagtgaaatattttcatatgttcattagctaatagtgaaaagcaaaaaattaagacagtgtttttggtatctatcaaacagttcaatccagtattggaggagatatggggaaatgggcatattaatatactgccggtgggaatatgaaactatattcttttttagagggcatttttacttttttaaaaaaaataaattttagactcacaatagagttgcaaaaatcatacaccatttccatgggtcctttacccaatttcccctaatgttaacatgttacacgattatagtacaattataaaaactaaaaatgttcctaatctgggttaatctaatgttttttcatgatttgattgagattatgcagtttgggcaagaataccacaaaaatgatgctgtgttcttctcagtgaatcaaactagggcttacatgatatagatgtaccttatactggtgatggtaactctgatcacctagttaagatggtatcagctgtgtttttccacagtaatgttatcattttcccctttgcaatgaagtaatatccacacactttttattaatacatatttgggggagatactttgagacaatgtaatgtccagtttcagcttttgctcaccagcattagcattcactgatggattttgcctgtagtaattattcctgtggtgttctaatggagatttctatttcctttattccttctacatttattagaattcttctatgaggaagattagtctcttctccctcatttacttatttgatygttcatttatattagtatggactcgtgggtattattttactctgtgggatataatctagtattattgttatttgttgcccagattgtgttaataccagctgtggccattgggaactctttttgggttggcccctgtgtccttttcacatgtctccatttaaaaaaattcagcacttttttattccttggcaccagataacactaacctcatcttgaatatttcctgcctcagccccgtaatcaactgctccaaagagctctggttctttttcttggagaatagtatttggaacaagatctgtgtgctggatatgctcattgctattggggtatcactgcttctaggcctggagggcaatttttaatagactaaatataaaatgatcatacccttttgaatcagcagttctgctagatataaatcctctagaatcactagcataagtatattgatagggatgttcattctgatctttcaaatgatcagaaattagaaaaaccccaaatgtctaccaacagagaatatgggttaacttaattgtgatatggtcatgcaatcaatggaatgccttggaatggttaaaaaatagatctatgtattctgccatggaaagacatgtaagagagtcagtttgttttttgtttttgtttttgttttttttgagacagaggtttgccattgtcgcccaggctggagtgcaatgatgcaatcttggctcactgcaacctccgcctcccgggtttgagtgattctcctgcttcagcctcccgagtagctgggattacaggcgtccaccaccacgcttgactgattttgtttttgtatttttagtagagatggggtttcaccatgttggccaggctggtctcgaactcctgacctcaggtgatccacccacctcggcctcccaaagtgttgggattacaggcgtgagccaccacgcctggcccagttttttttttttttttttaaagcaagttgcagacatgtatagatagtatgattcaattgttgtttaaaaattgtatgtgttagccaggcggagtggctcacgcctgtaatcccagcactttgggaggccgaggtgggcgaatcacaaggtcaggagatcgaaaccaccctggctaacacagtgaaaccccatctctactaaaaatacacaaaattagctaggcgtggtggtgggtgcctgtagtcccagctactcgggaggctgaggcaggagaatggtgtgaaccgtgaggcggaggttgcagtgagccgagatcatgccactgcactccagcctgggcgacagagcgagactccatctaaaaaaaaaaaaaaaagaaaaagaagaagaagaaaaattctatgtgttggccaggcgaggtggctcatgcctgtaatcccagcattttgggaggccgaggtgggtggttcacttgaggtcaggagttcaagaccagcttgtccaatatggtgaaaccctgtctttactcaaaatacaaaaattagcggcgtgcygtggtgcacacctgtagtcccagctactcagaaggctgaggcaggagaatcgcttgaacctgggaagtggaagttgcagtgagccgagatcatgccactgcattccagtctgggtgacagagtgagactccatcatctcaaaaaaaaaaaatgtatgtgtgtattagaatatgcttagaaaaaaggcttcaaagttacccaccaaatgtaaaaagctgttatttctaggtggttggataaaaaggacactttcacttcatttaatatattttgtaatgtttgaatatttttattttattgtttgtttgcttatttatttatttattttgagatggagtcttgctctatcagccaggctggagtgcagtggtgcgatctcggctcacggcagcctctgcctcccgggttcaagtgattctcctgcctcagcctcctgagtagctgggactgcaggtgtgcgccaccacacctggctaatttttgtatttttagtagagacagggtttcaccatgttggtcaggctggtctcgaactcctgacctcatgatccgcccgcctcagcctcccaaagtgctgggattataggcatgagccaccgtgcccagccctgaatatttttaaaaaactttttaaaaaagttatctaacttttccatgaagcaacatatctagttcattctgtacattgcacaggctagactttgggtagttgtacttatgttataacatttatttaatatgttttaatatttacgaatcaagtgactcaatcttatgaccacttagttctcctgtgctacacattcacatatattcttttttttttttttttatgagacagagtctcactctgtcacccaggctggagtgcagtgatgcaatcgtggctcactgcagcctccgtctcccggtttcaagtaattctcatgtctcagccttccgagtagctggggttacaggcgtgcaccgtggtgcccggctaatttatttttgttatttctagtggagaggtggtttttcaccatgttggccaggctggtcttgaactcctgacctcaggtgatctgcccgctttggcctcccagagtgcttggattgcaggcgtgagccaccgtgcccgactacattcacatatattcttttttttttttttttttttttttgagacggagtctcactcagtcgcccaggctggagtgcagtggtgtgatctcagctcactgcaacctctgcctcccgggttcaagtagttctcctgcctcagcctcctgagtagctaggattacaggcatccaccaccacgcctggctaatttttgtatttttagtagcgatagggtttcaccatgttggtcaggctgttctcgaccttgtgatctgcccccctcagcctccgatagtgctgggattacaggcgtgagccactgcgtctggctcacatatattcttaaggggaaaagattctcccacagcttagcgtgtgagtgataccttccagtagtttgactggcttacgacagttttttagtactgtttttaatgagacattttcttgttcctttatgatttttaaaataaattttaagtacacaatttttatttttgaaaattttggaagacactaaatcagcaggaaaaaaacccaaaatatatgcaaatattaaaacaattcacctctaatcctaccacccagcaataactgttagtatttgaagtacattttgctaatttttctatgaatatgtaacactcaaatatatgtacatatttagaatgcagtcatacatactgtttttgacctgtatttcttgataacaacatttctaaacattgaaatgtattttagtatggcagttttaatctactattaaccaatatgtgatttatgtatacttatctaaaataagacctatcaaggaccattgtttagggaattgttttgaaaaggacttggccagaatttacttttagatttgaacattaaatgctaaaaactttcttaatgtttttctttttgtttttgagaccgagtctcactctatcacccaggctggagtgcggtggcatgatcttgactcccgggttcaagtgattctcctgccgcagcctcccccgtagctgggttaataggcatgcaccaccacacccagctaatttttgtatttttagtagagatggggtttcgccatgttggccacgctggtctcaaactcttgaactcaggtcatctgctcacctcagcctcccaaagtactgggataataggcatgagccaccgcacctggccaaaagctttcttaatatttttccactgttttctgaaacattctattttaaacttattaagatcgatttttgagacattaagtccaggacgatgattcttcgtgcttgaaacatttccaacagatgctatcacaagtttagtatggactttacttgtggaagaatgttttcaaaatattgcttaacagaccaacttatttgcagagagggctagagccaaacacattaatgatttgttttaaagtctgtccccaaatatgagggttgtctgaaattgaatgacactgccttgtattcgtatcagtttttactttttttatatcactttttgctctcctattagctgcgtggactttgttttgctcactggcatttggtgagttgggctttctcagtgctgccttcttttctaattgtaagatgataaacccttgatgctgtattatctcttttttctttttttaatgccaccaggttactgttaggtcaaaacaaacaatattatatgcttcagtctgttaaaaatttgctaggctaacactttctaactttcttatattagaaaaaaaccttgcatatatctgaagtgaaagagtctaaagtttgttttacaattttagctaaatcatcccaattcctgatcatctataaatgcaacccacatggtggtaatctgcttagttttttatattaaattatttcttcaatttattttaatataatgactttaacagggagatgctattttgtaggaggagactaggagagaagagagtgcaggatcagtttttctgttgtgtagaagtaaattaggctaggttacaaaatgtgatttggtttccttttctttgctgggtagctgctactttcatttttttgtgatgaaagaaatggcttttaaggtgataggcattgagaaaaattacttccttcacattagagaacctctgagagttgcttctcctgctcagccaatttggggctacaagaatggagacgagtagaaggtttaagctggggctctcatccagcttggagaattccctgacactctctagtaccaagggtcaagagttgactatcctttgcaaatatttatttatggagttattttccaaattaagcaaactagcggatagttttgtattttcccctatccctctcccctgcaacttctacctttagatctttagatgattttatagaaggatgggtttttttttttggtcatttttaagttactggaattatctatgggggaaatgtgtacgtttttatatagaaatatgaagattttcttctccagcattctccttgtgagctctttggatcttattttaatatctatatgcaagttccccgcgcccccccccccatgtcaatagcaaatgttagccttctggaagaaaaataagaacatatgaaataacctgacttctgtttataagtaatcttaaccatttgtgttaagacatatactgatactgtccctggtaacccctcaacaaaagtagattgtggatattaacataaagttgaaagtagttcactattattaactagcctttgttagtaataggcttggatataaatcattctttccttcatctctttaatggtagcaaagagaaaattaactgtatgaattaacaccagctagttagtgtgatgattacagttatgtggatgttcgtttatatgacttccatgggggcgtctagactaaaaaaaaccaacaaaacaaaaaactcgaagggttattctcataatcatatgcaagtagtagtgaatactgctggatggaataaagcctcagttcttcagaatatagcatcatgcccagggggccccagctctgtagaaagcaatatcaaattactgaaaggccttattttattattccaagtattcagatggtaactagtttactcctgcattgtccaaaataggtcaaaccctcaaccctaaactgacaaacatttctggtgtatatatttttttctttttcttttttcttttctttttttctttcttgtttttttagacagggtctcactctggttgcacaggctggagtgcagtggtgcaatcttggctcattgcagccttgacctcccagactctggtgatcctctcacttcagcctcctgagtagttgggactacaggcatgcaccaccatgttcggctaattttttgtatttttagtagagatggggttttgccatttttcctagactggttttgaactcctggattcaaggtatctgcctgccttggtctcccagggtgctgggattacaggcatgagtcaccattacctggtccttttggtgtatatcttgaaaaatgtcacaaaaatgatgtgtttacaaattgaaaaaagatggaaatatatttaggtttctacctagaccagtgtcatatttgtatttgggaagaaacctcgtgttgtttcaaggaacttactcgtttttggttttgatgggaggatagatgcctacagtcatctgtgtgtggggatggctgtcttgtgtgactgactagtttgctgtggtcagacattgtctctgtgtctgaacatggctttggtcctgaccatgggggattcagagatacaaataaaacagttaagaacatggctcttgcttcttgtcatttttccatagagtttcaactactgtcacttagattctggctcagttactttctgagatcctaagagcactaattctagtcagacactcatctctagtcatttcttgcttttcctttagtacctggcttatgagctaaggtgcacagataatgtgaacaagcactcgatatttcttttaaaggggcacttttcttatgtcactgtactcataaatgctgtctcttactgcagattgaaatcacagaagatattcgtgttcttcttaagagaaaaagaggacatttgtaagtatttgtcctttagaaattctaaatgtgtaattttattagctttttgagaaaattaagttcccacactaacaggcatcttgaccctttttatagaggaaaaactctaccaatatttatgattgtgtttaaaaaggcagtattttatagagcaaaataggaaaacattttaccctgtgcagcttctaaaatttaaaccatttgccactcatttgtaaaagaacaagtggtaattaaaattcaaacaacgtctttctatttgagtcatacccaaaactggagtcagggattggagttctggttctgactactgaggcttatagaatatgtgtctttggtaaactacttagtctctcattatctcagtttccttatctttaaaatgggtttaacagtaagtgcacaatcaggggttcattattattattattattgttgttgttgagacagagtctcgctctgtcttccaggcttgagtgtagtggcgccatctcagctcactgcaacctccacctccgcctcccgctcctgagtagttgggattacaggcacgtgccaccgcgcccagctatttttttgtatttttagtagagacggggtttcatcatgttgcccaggctggtcttgaactcctggcctcaagttattctcccgcctcggccttccaaagtgctggattacaggcgtgagccaccgcgcccgtcctcagtggttcattattattgatggagttaaatccatagcagtttatgcttgccccgatacgttgaagcttattcttttttttttttgccccaagatggagtcttgctctgtcacccagactggagtgcagtggtgtgatctcggctcactgcaacctctgcctcccgggtttaagcaattctcctgccttagcctcctgaatagctgggattataggtgcccgccatggcgcctggctaacttttgtatttttactagagaaggggtttcaccatgttggccaggctggtctcaaactcctgacctcgtgattctcccaccttggcctcccaaagtgctgggattacaggcatgagccaccataccagcctgaagcttattctttgagagacagccacaatgtatacttgtgccgaagcttattgaagaataagcttcaatgtatcggggcaagtatacattgaggctgtctctcaaactgatttgcgtgtatttctgatcttcataaatttttaagtatatatttcattgaggcatctattctagactacaatatggagtaaaagaaatacaacagagcacctaaaattaaaatcatagtgtttgaggcttggactttgaaatttacctagtcctatagtccccgattgttgatttttagaccagtgctggttagtgaaaacgtttttactggtccatggtgaagtgagaaaaataaggacagcagatcatgagtttttaaaagctaaacattttcagtttaaaggattgcttcttatagaatatatctttctaatttaggggaattaaacatgttatttatctcatgaaattatggtgatagtaaatggtagggctttaaaaaaattcatgcctggcaaaacaacaacaacaacttggtagctctgtgtcatttccccccactaattctttcttttacattttttgctgttttgtgatatcttaaaatatgaacccaactttctcattttacagatgaggaaacagacattgagaggttaatttgttccaggtcttaccactcagcagcttgtgaaccaggactaaaaccctatatctgatactgtctctctagaacttctggtcttctgaaaattgctttcattataataggttataaatttgaaactgaagatatagtagttcttatgtgctaataactatttttgatttccaagtataaagaaattcaaaaggccatgtttttgtatagctaaatgctgaagtccactgattagcctgcattagaagaatcttaaacatggccaaagatttgtatcagcagatcagaattagctgtcaccgaattcagctacttaggtgttacacgctacccagtggctgacaaagaagttaaaatatcagcaaaattattatttccttttggaagttgacagactatactgccactgtgaagagtggtagtattcaaacttctatagttaatttaactacagaaagtactgttttctctctcatagatgcacacctacacacacacacatacatatttatagcaatcaatctgcagcccatctagatttggaagggaaaaaactaccaaggtgaagagtaggagttaccagaagcactggcatgaacatatctggccagttgtgttcaggagattgcagatagtactctgtgacactttggaggccccccatcaattgcctttgtctgaactttcccaaaatatgtttcaaaatggaaataattagctcccttatcamccttgtcttactcatcttactgaagcataagccagataaacaaatgaatgtggagggagagaacagaatggaatgtattcccaatcctaatgtggaaatattaactccaggggtacttttccatggcttcttatatttggctttgtgtgacttccttctttaggtaggaattctttaatttctgaaatgtcagacatactcaaaatgaaatgctaataaggataaaatgcatttttgaattatctgctgtctttagaatatgtggccttctgttctttactacggctaatatgtgagcattgactatatggccataagatttcaatattcaacagatttatcagtctttgagttatttaattagaatcacttctaagatctatttaatactgaaaagcagaatgagtttttttttttttaaatcacgatacaattttgtattatggtggtcaggcagctgaattatagtcatttatttggccattttataagaaatggtttaagactgcattgttgcataatttattaacagtctgacatattgaaaagaacattgacaaactaacctattaagctggttcctcctctggcagatggggagggcagatcatgtggcaaaaaaaggcatagttgtaaaattctccctgtaacatgaatctattcctatgggaactactactgctgcttaaagacttttttggaacctacactcatggttgaaagccctaagttgtattactttattataataaatatgtaagatgacaggagatagatgtataacctatagatattttgtatattcttcacttgaacaaaacacatttattataaaagttaactttaaagttaaattctataacccaattatttttggttaacttatgttaaaatcatctatatatcccaacagagaaaaagcacccagtaaatcgaagactttgtagataaaataaaagtctgcactgtggtacaatgggcagtttaatttagcagcaaggttttgtgtacagggacctgcagcagttactctttagcatcagttgtacaacattgacattgtcattgtgctgtctgctgcccttctacagcaatgaaccatttgtattgctctctaaacacatatcacccagaacttagtttttctccctttttcattatgtttaataaagtttgattatagcatcatgcttagccagtaggtgccacttctagcctgatttatcctcaagattccttaaatgtaagctttggattatttacaaccaattattggattaaattatatacaaccaattcccagctttagaaagctacatttttaaaaatcaagtgtatcttgatcacttaaaatgaggaatagatgtataattatacacagtgtatgtgaagtgtgtaggcatcaacattgactcctagagctcctcattttaacatacatagataggatactgattataacatcctatgacctagcaacaacattatctgatgcatgctggggatcttcttaaggcatgatgggagggaattcactctagagcattaaaagtgtcttcaacatggcagctgaggtgctttctttgctgggaaaagctgcaaagagactggcagaatggcgacttcaggagttaatacctctccaggtgatgaagtaaacaggttcagtttatcttgtgagagacgcacccaaagatcagtcataattgtgaaaagctttcagtcatactagccaggcacaggtgtaatgtgttggtatatggcatctctatagtcatcttaggttttgttttgcttttcttggttttaaaatgtatttattataattactgtatatttgagcttaaggtttgattgcacaagttatttgatattgaatagactgcttgttatttgcaatataacaatttgaatcagatgagacaagtgccgtaatgatacatatattttacatgattatttcgtcttgcagactgatgaaagatcttgttagaactcttaatgcttttattttcttaatgtattggcattctctaagttttaatgttaaagtataaagttaattgtaatgtctcttgtaaagtttgatttcatttacaaagtgaaaccattctgactcaacctagttgagctttctctggtatgttttacaatcatttggaagtttttaatagtgtatgaaagaaaataagattttaaggaagcactccacccctttacaaaagtccttgtgatgcaacatgtatttagaaatatgatcttttaaagtacagcaggtattcttatcggtttaatctcttggaacttttataattgttttctgatttaatgtttactagttacaactaatctttttcagaaggcaaattgtctctttatttggtgcttaaattactcttaaataatgtgtaacttgaaaatgagacttctaaaaaagtagcacttatatagttaattgttgattttcaaattgatttaaaaactatttttgtaagatcttatgtcaaggacaaagttaatttgtcactactgtatgtttcaacttggcagatgcatggatccttgcttggtttagttcattttctaaaacttttgaaaaaatatcttggcattaaccaactgcagttcagtagtttttctctttcattctcaaattggtgttgtgtcacatgcttctgggtaagacgatttcttcttttaaattcagactttaattaatatgtagtgtttgtttactttgtgtactagagcttaatgtatcactaatgctttctgtatttaacctatctcggagtgtttgaagtaactggaatgaaatacttattaaatctcacctcagaacaaaaaaataaaataaaattgaatctgatttttcactaaaacttctagtacttactggacatctatagaggccccccccccctaaaatgtcttaggatgtaggacagattagtgctcaaaattgttgccagtatttcttcatacccaaagtttgtcactctcacttatttagattataccagtattactaggatcacagataattgagctaaaaacatggactttaaaatcaaagcgacctggttcgaatctctactcagctgtgctatcttgggcaacttaatctctctgagtctgttatatctttaaaatgaaggtactacctcaaaggagttttctgaaggattaaatgagataatatatctgaaggacttagcacagtatctagcctgtagtaaatgctcaatacctggttattactatgattcccatatggaatggtaaagttcaacaggagcaattaactatccaatgactgaagataatgccctgcctttttctggctgacatacaaatacatgatttcaaggaagcaccactcaaagttcatgtcctcctaatgatgggatagcagtatcattcttcatacatggaaggacagcatacctttgtgaaaattatcagtgaaaatgcacatagtgcaaattgtgtaaccttcatgcttttataacaccaatcttttccaactctatgcaacaggcagtttttccagtttcatattttctattaagcarctaacaacatgttcaagtttattttaattaccagggattttaagagtatagtatttcctaggatgttgacatggacaagtgattgttttttaagatgattaaagttagctaccttcacgttattgtacttgcatatatttttaccttatagattcagaataattccagtacattcttaattcagtaaacaatttgattgaagccaacacacggaggcactgttccagtcacagattcagcagcaaatgagacaaactctctgccttgtgaagcttatattctactgggagcatagacagtaaacatgaaaaataaaacatggtatattagtaaaagtactcaggaaaaaaataacgcaagtaagggatagaaagtgtggggagtacaattttaaaagaagttggctggagaaatgcctcactgagaaggtgttctttgagtaaagaaaaaaaaagaggcaagagaataagctacgtagatgtcttggaagaacattccaggcagagagaacctcaagtacaaaggccatggggcaggaacaaatgggactgcagaagaatgttccagggaaagcgtactaggaggtgaagtcagaaccttggggtaggggaaagactatatagtcttgtaggttgtagtaaggacttcagcttatattctgggtgagtcatatgggaattctttgaaagattttgagcagaggaatggtatgatctaacttacattttgagaatagtactctggcttctgagtttagaatttattgtaggggtatgagatggaagcagggagactagattggctatcccatttatccacatgagagatgatattggcttaaaccaggatggtaacagtggaggtggtaagaagtagttgaattagattcaccttttttgtaagtcaaaccattaggatttgctggtgaattgcctgtggaatgtgtgagaaagagaggggggtaaaagggtgaatctaaggtttttggtcaaagcaagtggaatatatagagatgggcaagactgggtgagataggattgtggaaggatgatctcagttttgaacatgctaagtttgaggtatttaactgacacctaagtggatctgttgaggaaacagttggatatacaaatctagtgtttaaggcagacttccaggcttgaaggaaaaatttggaagtcatcacgacatatatgtggtatttaaaattgtgaggttcaaggaccaagccccataccatttagaggccaggaatgtgaggaagaagcagaaaaaaaaaaaaagactgaaaaggaatagccagggaagtaggaagaaaacctgaagaatatggtttcctggaagctaagtgaagaagtttaaagcagaagagggctcagctgtgttaaaggctgccagtgggtcaaggaagaagagaactgagctttaattgacctttggatctaatagcatggaagtcattggagaccctgatgaggagaacaagtttatagagtggtaggagacataagcctgattgtagtgggttcaagagaaaataggagagaactgggagacagagagccatagacacctctttcaaggagtgccaaagagatagaaaataaatgggctatagctgaaaagaaratgcaaaggagggaatgttttttaagatgaaagaaataacagctggttatgatgctgaagggaatagttcagaagagcagggaaaattaatgaggaaggacgagagggaagaattggtagagtagcacttccgtgtccttataaagacagggtgtaatgcataaatgaaggggttggcctcagcttggagcatcaacagttcatccatagtcacaggagagaaaacagcatgtggccacagatttgattaggtgggtagatgtagcagtgagagtctgtggaaattatctttggattgttgctgttttgtctgcaaaataggtcagctgctgagaataagtctggatgaggaatgttggtggtctgaagagagtaaagtatgaaatccagaggagtgggccagtgagtggactagtgcggtgtggtctctctgcatcagggagagtccatttgaggtagcaatcacaagtttaaagtgagacactcaacacagtcatgtgtttctcacagcaaattcagctgcataggtacaggtacagattaggtggagaattggataggatagaaccaggctgtggttgagatgattaagtacaaccaagtgagacaaccaagagggactgagtatgattgcctatggaatttaagaggaagaagacaaaggtttctcacaaaagcactataaagtaggtaatataagcagtattcctgttttacagatgaagccactaatatagagctttcttttttaaatcatactttaaattctgggatacatgtgcagaacgtgcaggtttgttacataggtatacacgtgccatggtggtttgctgcacccatcaacccatcatctacgttaggtatttctcctaatgctatccctcccctagccctccatcccctgacaggcccctgtgtgtgatgtaaccctccctgtgtccatgttttctcattgttcaacttccacttgtgagtaagaacatgcagtgttaagttttctgttcctgtgttagtttgctgagaatgatggtttccagcttcatccatctccatgcaaaggacatgaactcattgttttttatggctgcatagaaccacattttaaacccagatctgttagcctagaaaatttttgttgtttctcttatgagacattatattttgcctaatgatgggtacgatgctcagcatcatacccttaccaccaactcttctttttttgaagtgaaatgaaatgtttaaatcttttttgaaatgaatttatcaatagactgagtataacccctgacaaggaagtattatagtttaagatgataggcaaaactgggcagaggctggctagtgtacttgaaagagcactgggtgctcgatttgtgctctgccattcatttgcttctctgtaagatgagggctcagacaatatcagtggttcaaatattcagctgaactggaagttccaaggagtcccttcaggggctgtcatagcctcctctaccagagcagctatgctttttgctttcatctacgcttgtgtttttatatctatataagattttattcaaatggatgacccatgaccccctcactacctgcagaaagaatttgaaaacctctagactaaatgatctctctggtttcttctcacctgaatgttctttgagccttgcctackgtgtgtgtgtgtgtgtgtgtgtgtgtgtgcatgcgtgtgtgtgtgtctgtactaagcactatgaggattacctagaaagcatttctctttctctaagacttaaggcaaatatgtataaaagattaaatttatgtaacatcaataactaaaaaacatacaatgcattttaaatccaactaaagtacaggctcttcaaaagctattttctgtttctttatatattttcagccttaagcctgaagatttctcaattgagggtaaggtggtactcaccccttaggggcattttataaatctgaagacatgcttttatgtctgctaatattgtctctgagaatgtatgtattgaaacaagtattttgttaaattttaaattagtttctttatggtactcttttatattaccagtaagaaatcattttttaaaatggtgtgttggtagattatgactatcctttgatgttgatgaagaggtatcacaaaatatttgtcataagaaagaggtactgggtttgatatggttgagaactactggtccgtgttctatactgtggtacccagaagtttggaagtgatggtagtataatcatgtatcagattgagtggtagatattgctaatgatgtgtgaaattagaaaaagtaaagattgttctggacttgggtagccatgaaatcttcagtgggaggagaggattgttagaggggatcttacattcagcattatgataaacccttgacatgacataccttatcttgaagaaatgaatgaccagacttgtccgagagactaagaaggtactttccaagtagggtaagtcatagaatttaaagctggaaaggccctaagaatcacctaggccagacatttttagttcagggttgttgccctttgaagttcatggatggatttcaaggaacttgtgaatcacttgacattgtgtgtatcatttagcatgtctttctgaggggaattgggttcctcgttctcattctcaaaaaggcccatcatctctaagaggttaaggcctgctgatctagtgtggtcccagactgaggtagatggtttgctcaaggttacacagccagttaggggcagagatgaggattgacacccagtgacttccagtttctttctcatttcactgtactcaactaaattacatgaacaaaggcacaggcaggattaagctaccattttatattagatggtataaaaacaatcaactagcctggggtcaattgaattaagtctgtcagtctgtttctacaaaagttgcagaaggatgggcttcagtttgtctcttcaaagtgaactaatattttgatttttctggttgaaatatgctacaactcaccgaagtagctttctcagttgaaggtaagctccttaaaaaatgttcctattcttgggccgggtgtggtggcccccgcctgtaatcccagcactttgggaggccattgagggcagatagcttgagtccaggattttgagaacagcctgagcaacaatggcaaaaccccgtctctacaaaaaatggaaaaaaactagccaggcatggtgatgcacatctgtgttcccagctactcgggaggctgaggtgggaggatcttttgagtccgggaggcagaggttgcagtgagctgagatcatgccactgcactctggcccgtgtgacaaagtgagaccttgtctcaaaaaaaaaaaaaaaaaaaaaagaaagaaaagaaatattactattcttgagcctgtttctgcggtttctttccaatggcactgtttttctaacctgcagcagcccccagctttccacataatccaatcaaaattactttgcctgatttgttagattttgtaactaccgtagcgtatttagtcaagcgtatttagcgtatttagtgtatgctgtgccccagtcagactagtgtccttgctattggtacttcctattctcccaaagtcctttcattcccaccttcgtatcttttttcatatggtccctgagcctggaataccttccattcctctttcatttctagatgcccaacataaggtccagcttaaatctaatctccacaaagcctctcctagttactcttggccattttgcacttcctctgaactccttttgcatttattgcttatactactgcctacactgcacatggtagttatgtattagttatgtattaccacaaggcttttcagtggaaatgctttagtggtcaccttgggagttgggattccgggaattctggggcaggactctggacatccccaaaccctgttttggccagagcaactccactttagtgttatatatgggcagtttccagtagtgtttattagaagagatggtttaattgcaccccctgtccccgttcccccaaacagttgcaaaaatactggatctatcttgtgtgatagttgactcataagtgttaacttataatggccaagggccaggaattaatactacttcagacttgtattaccactcctaggcaactggtgcagttttgagcacaaagtggacatgtaggaaatgattttacaattgtattgctcccatgtgggaaatagtagatagtaaatagcattacctgagaaatttaccttaatgaagaactcagaataaggtttctgggttgacctttgagaaataaatctaagttgatagtttctgccccacccccccctttggatataaacctaacactatttaaagatgtctagtttacatgcacatgtttaagagaaatcttattattggcataccctattctaccaaagttttgacaaacttraatatcatattcatgcatttgtgtaagcattaaggttgttattcaactcacagaatgatatgcagagtaccagtacacctagaaacctagaaaaaaataaattcagaagttgatgtgctcaaagacatttacgtcaataatgattacaaatggaaaatgccagcctttcagaccagttatttcagctttctgtaattaattgtgtaaactaataaagacctgagtatttaaatcaattgtgctatcaacttgttaatattcttttgtttttgttttttgttttttgtttttatttttcctgctctctgcttggttcattgtcatcacctacaggcgtactttattgtcggcttccaaagattactaacttttatctgtatcactaagattgaactgccttggctgtactgctattcttactgctgcttctattattgccttcttcagcacaataaggctttcaaaagccaaagaataacaagaaataagcaccattttagaagcctttccactatgaaacttaagctaaatgtgctcaccattattttgctgcctgtccacttgttaataacaatatacagtgcycttatatttattccatggtattttcttaccaatgccaagaagaaaaacgctatggcaaagagaataaaagctaagcccacttcagacaaacctggaagtccatatcgctctgtcacacacttcgactcactagctgtaatagacatccctggagcagatactctggataaattatttgaccatgctgtatccaagtttgggaagaaggacagccttgggaccagggaaatcctaagtgaagaaaatgaaatgcagccaaatggaaaagtttttaagaaggtaaagtattttggtgcttttcatttatgttttaaagaggaagacacatttgttttatcataaatcgagtgcgttttaagtatgctggcattctattatagtgctgtgtaaaactactcagaagccgctcatagcttctgtatgttcatttaagagcatttttagagttttatgctttggatagtattttaattgcttgtttgaatatactaatattagagaatgtatcactttaacagttaattcttgggaattataaatggatgaactatcttgaagtgaatcgcagagtgaataactttggtagtggactcactgcactgggactaaaaccaaagaacaccattgccatcttctgtgagaccagggccgaatggatgattgcagcacagacctgctttaagtacaactttcctcgtaagtgccttgtgtttttggaggggkgagaggagggtctttgcttgcatgtgagaattgttttgagatgctcttgttttcacagtaggtgttgtttagccattttacacattaattatgtccataatacggcatgtaatattgtggctaaaagatatccgatgactcctgttaagtatggtaacttgtaagaactaatatgggaattggcagctttaagggatgtgatttacacttttattttccaattggaaatgaattgtaactgaaagagttggagtttgggggtattttgggggggtgatatacaaagagtaatgattaaaagaacaaaaaaccatttctcaggataattcaaattcattgcttcactttgagacctcttatttgacttattctattttacgtgtgaaatatgcatgtgacagctggaattggcattagatatgttagaaagtaaaattgagtatatttctaatactcaagcatttgttgttgccattgtttaagaaataaacaatgtattgtcacatactaagtactctgttgtttgttgaatgaaatataacactgtaagttaggattatagagcttaaatttcaaacaaaaaatagataatatgaaaatgatcccctatgtacccattacccactttcaacgatgaacagcttgtgaaagtggctatttttaaccacattgtttctggttaccaatctagagctgaattttcagttctttctaagtttagcagatgtcctttgattctaactgatcttggtttatgttatctctggtggctcctaaggagtagatctccttgatctctctaattaaggtgtggaggtcaccaatcacattggacattggactcactaaaacagcttcttagaaggagtaagaacattatctgtggctgatcttatgacttaagatcctcaagattttcaaggacttatccattctttggaggctatggccaatgaaagtgtgtatcaagaagaagccctagctgggccagtctgacctgaattaagagttcagccagtacctattggccttgagcatctaaattgacagatttttgatcagctgtggcagtgcgagtgtttctgggtttcttcaggtttaggaagtgagagttctgggaatttgtaaggaaaactttgggctcccagggagtttgaagcaaggttgaaggatggtaacagagactatgaaatcaaattaaaatatacaatgtctttgtgtctctaagtgtaactattattaaagactgacttcaataatatccatttctaatagatgtttattacttaatatttgtgtttatttttattatgtagttgtgactttatatgccacacttggcaaagaagcagtagttcatgggctaaatgaatctgaggcttcctatctgattaccagtgttgaacttctggaaagtaaacttaaggtaaatatgaaattttcttttaattcatggttgcgttgtctggcaggacagaaaaatattcattcagtaagtgaatttttgttgcaggcttaagtttaatagctgtttttttttctttctgctcaacagactgcattgttagatatcagttgtgttaaacatatcatttatgtggacaataaggctatcaataaagcagagtaccctgaaggatttgagattcacagcatgcaatcagtagaagagttgggatctaacccagaaaactgtaagtaaagcagtaaaaacaattttatttacctattccaagtttgttattttggtaggttagggaaacaaatgacatgagtaaatccacaaaagttctttgactgaaaaaaaaaagttcaaaaatctttaaaaaccatcaagaccatatatgattaagattttccctccatttctcctcaaaaaaaataagttagtaaatttcactaagtggttgagatgtaatctgtggttcagacttcatggcagttgctgccaaatgtttcttcattttttaaataacccactataaccttccaatttgggcctcataaaagaaaaatatttcaggccttccattcagtaaactttctgaaataaatgcttaatgctagttatcttaaggatgtttcagaggatgcaaagctgtttaccaagattaatgcttggatttattttaccactgaggtggtagttggtatttcatttgaaacaagtaagtgtaccttgtagcaaaatgtcagttggccatcagggcagagagttgaggaaattaatactccatttgaagagttttcttattatgtttaatgcgatggtcaaaataccatactataatgagaaaaggattcatttttgcaggagaaaatgttggtcgaacctctactcagcttctgaacattttaccattagagaatgagcatgcgtttataataacaggtgttattatacacatctgccatgtgtccagaatggcagagagtcagattttaccctgcttgccggcaaacagatgagcctgcaaaacttcctggtgccatagacttttgggtctgagatgagggacagttttttactcacaacaatagcagtagccagagtatcatatcagcatttgtgtcataagagaggaactctgagcttaaagagcctgaatatcttattatcttattgtactggacagtaagcatgcctgctgtttgctctggggagagacactatctctgtgcaaatatccttgtaaagatagtctggaacaaagtcaatgtctctgcttgcaagatgtgcagaacatgagacccatagagaattgtttttctacactaggttgaccctgtaagattgggataaacttgactgagaagtcctgattggtagggatcagttacagttctgctgattgaccacaaagggtgttggcagcaagctaaggggtcagcagtcttcataattttgtgtgagcaataatgtaataggccacatatcccacttagttctactcatgtctgcaatagataggatacatatgtttttgtggtacagacagttattgtgatgccacttttttgcatatttacttaaaagtgggcagaagcaaagtatcacatgtgcttagattaagaagaatttagctactgctgttgctttggttaatcatcagaggaaatatgcagtccttatttgcttggtttataaactatgactatatctttaaaaagcattaaaattagccagtttaagtgtaactatctttgtttcagtggtatagctcactgttttaaaaaaatgttattttaactggtatataaaaatgtaaataatttgtgtaaagatttttaaatgtgataatcctgttaaacttgtatttcattctgatgatatatatgtggcttcttagccattttggtatattctcggaaggaaaagtggttactaggctagcactatacactgycttgaaagtggaagctccagggttctgtttaaaacttatcaccttcaaatgttagcattgaagtcaccttaaagatcagatccagtggttttcaatcaggggcatatatgagaatcacttgtggagctttgttctatcccagacatattgaatctgaattttcagaaagggggttcagaaataatattttatttaagttctgcacgtgattctgatacccactagtggttagtaaccacaatctgtccagctgtcttattttagagatgagaaactgaggcctaagaagtttatacacatactctgtcctcctgatactccaaagtcccagaaatctttccacaacattgctctgtatacaacactgtggagaggcaatgcacagacagagattaggttaaacatccagaaaatgggccaaattgagtccaaaatgctcactgtaatcagaatttgataaacatttttgttttctagcccaggctggagcacaatggtatgaccatagctcaccatagcctcaacctkctaggctcacccagtcctcctgccttatcttcttgagtagcaaggactgcaggtgcatgccactgcatccggctaacttttttagtttttgtagmgacagagtcttgccatgttggccaggctggtctcgaaatccagggctcaagtgawcctcccaccttggcctctcaaagtactaggattacaggcatgagccacctcacccagctcgttttgatgatttaaagcaaatactgtctattgatagcttatcgttatgcaaaatctaaatatcctattattctttagtaatttaacttttgaactgaagtaaatgtgatatttttcattcattcatttagtgggcattcctccaagtagaccaacgccttcagacatggccattgttatgtatactagtggttctactggccgacctaagggagtgatgatgcatcatagcaatttgatagctggaatgacaggccagtgtgaaagaatacctggactggggtaagataattctttaactttcttcttagaaatcagagttcatgttcagcattctctaaactcaatctatattaaaatgataaagctcttggtatttctaacttcaaatgccttttcaagaatggttaaaatatttctcttattttgttttagaccgaaggacacatatattggctacttgcctttggctcatgtgctagaactgacagcagagatatcttgctttacctatggctgcaggattggatattcttctccgcttacactctctgaccaggtgacaaacttttcagtatattggcatgatcgtatgatgctgcatggtttggctgagaacatattactaggactcgagatattttaattcagctaaagctttctccttgacctcaaaatagcttccatgaacaatatgtagctataggagattaccctgtagatttgttagcattgctttagctatatattttaaaattattttttttttcttttcttttgctctgtcacccagactggagtgcaatggtatgatcttggctcactgcaacctttgcctctcgggttcaagcgattctcctgcctcagcctctagagtagctgggattgcaggcgcccgccaccatgccctgctattttttttgtatttttagtagagatggggtttcgccatgttggccaggctagtctcgaactcctgacctccagtgatctgtccgcctcggcctcccaaagtgctgggattacagatgtgagccactgtgcccagccttaaaattatttaaaaatgaataattacttttatctttttctactagatttttactcttgagaactacgatagagaatataaatgcaatgagcctttttgacacactacccatgagcattggtgggtttctgggaggagatatgttagggtcttggcccagttttcccgagatttttctagagcagtaccgtctgatacagtagccactaggcagatatttaaataaaaattaagggccgggcgcggtggctcatgcctgtaatcccagcactttgggaggccgaggcgggtggatcacaaggtcaggagattgagaccatcctggctaacatggtgaaaccccgtctctactaaaaaaatacaaaagaattagctgggcgaggtggtgggcgcctgtagtcccagctactcgggaggctgaggcaggagaatggcgtgaacctgggaggtggagcttgcagtgagccaagatcgcgccactgcactccagcctgggcgacagagcgagactccgtctcaaaaaaaaaaaaattaagtaaaattgaaaaaaatttttttatttgctttagccacatttcaagctctcaatagctacgtgtgaccaacggctaccatattaggcagcaaagataaagaatatttttatcatcacagaaagttctattggtaggggctgaggcatctccaaaggtagtctcagctcaccatactaagttaggattcttccttctctctgtagttcatagcagaaatcccaacaatgggtggggctaactcatatatgttatacccatttgaaattacacacctaatactattgtccacagttctgttttatgtcttctttggaatagttgctgtagaaaagcttcaaccaggcttaggggaaaaaaaaaaagagccactaaagaagctgtggggttctggatgctgaaagacaaagcaagtataggtaggaatgacttgtctatacgtggctctgctcctccaacactgggggcccagctgttgtttttcagaccgccccccaccaggcaatgctgccttttgtttgagagtctccatggagcatgtagttggtaagatacgtcctcagtgttcacagttagaaattgtaatactttatttgtagaaataccattttagggagaggctagataggttgtatactattaaaacaaaaaaagttaaatagttttttttggacttgagattccaatcacctttgtgttttttttttttttgatatatgacttaaagtgcacaaatattaagtgtactgcttgatgagatttaataagcatatacacatatagacctctgtgatcatcaccgtctagattaggaaaacaaagaacattttcagcacccgtgaatgtcccttgggtcccctcctggtcattaccacattggattctctttgaaggaagaatccagccttcttttaaagtggctttttctgtgagaacgcattctgttccaaacaactcctagctttgtactttaagaaacacaatctttgtatgacagggtgctgctgtgtttgactataccactcagctataaattcacacttaaaatctgctagaatagtaatggtatgaataaatacactatccgattgatagcagaacttgacctggtgaaatcaaagtagacctatcaataagactaaggcttaaactctaaaacaaatttagtaaaatctctgatcattatgttttgttgtcatgggtttttcttatgctcagagacattatcaaaatgtagaaaacatttcagtaaactttgagtataatttttttttccctttgtgaatttggaagccaggactagccgttctttgatttttcactgcctttctgagaacaatagcctcagtgtgggaaaggagggacagttggagtctgttgctggtctgacttaattcttgctgtctcttaggctaagctagtacattagaagcctgttcagtaaaattcacacctactttttaaatgaactttactgtaaagactctcaatcttactaggaatctaaaacactggaacttgcttcacataggaaatcagaaggatgcaggagactagaagcaccacatttggagccaactgatgatagcaatattgtcataaccaggattactatgatcacaagaagacaaaataactgataaaattactaagagtaaaaaaaacaaagaagggcttcttgtggcttctgctatcctggaactgctctctgtagcaagagctggtcagtagcatgcagagggcaactccgacctgaaggacatgagagcccattttgtttctgcagagcagccctcctgtgtgtggtgtacatggtttctgtgtaggtttccacttgcaaatgtgcacatccttgcacatatgtaaaatgagttattttatctcctttatccatattaaagaaaagtaggagaaaggcaacttagttctatcgggagaaccatcctctatatggccatttgtgcacatttatgtgtatctctactttgtccctggcagtgttctcagtatcttaccaactagaatattaccaaattagagtttcagtatgatgttaattgatgttcatagtggtgtcttcaggatgtggctttgcctattgttaatcaaagaaagttaaaatcaccttcaattttgttttagtgttatatctgtcttaatcaagtttttttgaaaatgtagtaatagtctgtgctatatttgatagtatgttattaataagaatgtttgattcatcacaatgtcattctcttgttatcctggatcaaggtttctcctctaaggaaggtgaaatgtgctagaagcagttatctgtagcactaaaatacttacatttgagacttgtaggttatgatagttgttaacagataatcacagagcaataaaagctcaaattccaagtgtaacttctgtatttgtyattaatacttgaattrcaacatgttttaaggttggttttcctgatcatatttattttttctttaatatagkccagcaaaattaaaaaaggaagcaaaggagactgtactgtactgaagcccacacttatggctgctgttccggtgagtacagaatatgaatrtgaacataagaggattgtttatataatttattgatcgtacttggaccttttaaaaagtaatactcttagatatgtctacattttaaaataattttaccttgttgaaatcacagcaaatgtgttcattaaaatcttaggtaccatactagggaagacaaaatggcaagattttgaaatgcacgcctgtttgagtttgctgatacatgaaaattaggtgatgaaaatgacctagttcaggttacctactgtgagaattggtcagaccgttttaaggtagaatatattctaaagatcatcttgtttaatctcttaattaaaaaaatgaggaaactttaggccatcctagggagctgaagaatcgtatacaaggtcaaggatctaagccctcccaactctcttatggtgattaagtaaactgaaaattggagagagctcccaaaggaaaaaagtttaattctatatattcggaatcttcatgtgaaatactgccttaaaaaaaaaagatgttacattttatagccttgtaatgatgaattttgaaacatttaacaccatgtttcagatttgtgtaatcaaatatgttctagctttttttatgcttcagaaacttcagaaagactatgtatcactactgcttatattatgatcagacttgaaatcttaccccaatatctttcacagaattacttttgtatatggaaactctgagattagataagaaagtgttcagtccaagttgttctgagaattacagatggaagatactttatggtccttttagcttctaattgcaaaattaccaaataacaaagaagtagaataggtcagagaagactttgcctttttatttagaggttctgtgtaattcataaagttttcaaacagaaagaagaggcatctgactaaaaccataaaaaagttgctaataatagctagtgcagtgcttcctatgtgctaggtaggcactgtgcaaaatgccttagataaattatctcacttaattctaagactgcaaggtgggccctgttactctatcttataaagaaggaaagttgccccaaagccacacagctcataggtgatggaatcaaagtttgaactctaccaatctgatactggtggagtatcagtctatcagtcttcttaaccactatggctgtctatttaggactgtttcacattcagaattccctagcaaaccttatcagataacataggaagaggtaagagctgaggtgttaaagaagtaatctccgattttaggcctgaaggataagcacagttagcacataggctccttatcctctaattgcccattgtccattcttccctgctttactttgtgtcttgaggggctatgttctgtgcacgaattaccagtgcatccttgccttatgacttctggttgggttcagccaattggagggcctcatgagagatcagagggcagaaagatagagagtctgcacacttattacctttgctcctttcctgctgggctgcaaattttagcagctgtcaggagaccctgttggatagtctccttcccgttggttgtaaccaggtctttcccatggctagagtcctcatccaggttccaatgacacttgtcttatgtcttgcggcctcgagatagtaatgttctcctatgttgctagtccattggcacctcatcaaatattattgggtttcctttttagcccctcctgtttctccagaaataggccatttaaaaaaaaaacaactctttattgagaattatttttggtagagtctgttttttgagtttgtttctttcctgggtcagaatgaaagattgattgaatactataacattcacagtgaaaattcagaataagtcactacttatcagctgtggctccattgaacatcatgtaatgttaggttgagataaagggtgacttaatgtgctaacaataaactctgccaatgtgttacaactgtattatgttccttactcatcaaggccttgctgatgtctatgattagtatccagtgctggaaggagcagtagacatggttctcacacatctgtctcattcccaagcccctgccccctctcccctccccacccccattttttttttaagatctcatatactttttaagaaggatggatataggatgctcaagtcctgctagggaatgatgggggattctgtcacagatgtagagaaatatttcagttatataatagtgattccttttgtggaaatggagaaaacaatattgtaccatgtttgagtgctatggtaactttttttttttttttttttttttttagtatttattgatcattcttgggtgtttctcagagagggggatttggcagggtcataggacaatagtggagggaaggtcagcagataaacatgtgaacaaaggtctctggttttcctaggcagagggccctgccgccttccgcagtgtttgtgtccctgggtacttgagattagggagtggtgatgactgttaacgagcatgctgccttcaagcatctgtttaacaaagcacatcttgcaccacccttaatccatttaacccttagtggacacagcacatgtttcagagagcatggggttgggggtaaggttatagactaacagcatcccaaggcagaagaatttttcttagtacagaacaaaacggagtctcctatgtctacttctctctacacagacacagaaacaatctgatctctctttcttttccccacatttcccccttttctatttgacaaaaccgccatcgtcatcatggcccgttctcaatgagctattgggtacacctcccagatggggtggcgacctggcagaggggctcctcacctcccagacggggcggccaggcagaggcgcccgcctgccacctcccggacggggtggctggtcgggcgggggctgccccccacctcccggatggggtggctggccaggcgggggctgccccccagctcccgggcggggcggctggccgggcggaggggctcctcacttctcagacggggaggccggtcagagacgctcctcatctcccagacggggcggcggcggggcagagacactcctcagttcccagacggggtcgcggctgggcagaggcgctcttcacatctcagatggggcggcagggcagaggtgctccccacatcccagaggatgggcggctgggcagagacactcctcacttcctagacaggatgacggccgggaagaggcgctcctcacttcccagactgggcggccgggcagaggggctcctcacatcccagacgatgggcggccaggcagagacgctcctcacttcctagacggggtggcggccgagcagaggctgcaatctcggcactttgggaggccaaggcaggcggctgggaggtggaggttgtagccagccgagatcacgccactgcactccagcctgggcaacattgagcactgagtgagtgagactccgtctgcaatcccagcacctcgggaggccgaggctggcagatcactcacggtcaggagctggagaccagcctggccagcatggcgaaaccccgtctccaccaaaaaatacgaaaaccagtcaggcgtggcggcacgcgcctgcaatcccaggcactcggcaggctgaggcaggagaatcaggcagggaggttgcagtgagtcgagatggcggcagtacagtccagcctccgctcggcatcagagggagaccgtgcaaaggggaagggagagggagagggagaggagggagaggagggagagggagagctttttttttttttttgagacggagtcttgctctgtcacccaggctagagtgcagtggtgtgatgtcggctcactgcaacctccacctcccgggttcaagcgattctcctgcctcagcctccctagtagctgggattataggcgcctgccaccacgcccggctaatttttgtatttttggtagagacggggtttcaccatcttggccaggctgatctcgaactcctgacctcgcaatccacccacctcagcctcccaaagtgctggaattacaggcgtgagccacyatgcccagcctgtggtaacctttttaagggatggttctgctgtcttcatttgtgagtggctctattctaatattgaaagaactgcccattaagttattcattatagcataccttaatttgtactgataattgatattttaagtatttggaaacacgtatttataaacagatgtgctttatgtaataattcttaatttgtgttaaataatttcaagaaaacatcatttagtggtagtctgggctgtttgctgtttatttttttttgttttgttttgtattaaccttagagtcggtatatcttaaacctggtcctacctccagttttccaagtttgtgtgagcaagaatcgtgttctttgcttccgttaaaatgtaatagaaatgcttaaactatagatacttaggattttaagaaactaatgctttctgccatgctgtaagaaggtcacaaagttgtagtaaaaaaagagaaaagcatcatgaatagattcaacatagtcaggtattttggtactgtttgagaataagtgaatatattgtaacagagattaatttttttttctgcgacagctgagtgaattctctaaactcgagctaacatttcttaaaaatttagattaacttggctgggcacggtggctcacgcctgtaatcccaacactttgggaggccraggtggcggatcacgaagtcaggagttcgacaccagcctggctaacacattgaaaccttgtctctactaaaaatacaaaaaattagccgggtgtggtggcaggcgcctgtagtcccagctactggggaggctgaggcaggagaatgggatgaacccaggaggtggagcttgcagtgagccgagatcccgccactgcactccagcctgggcagcagagtgagactccgtctcaaaaaaaaaaaaaaaaatttagattaacttaatgtatagaactgaagaaacccctatatctgtccttagtctttttgaagtagtgaacaagtagtcagtgaaattaattacataattaaagaaacaaatatgtccattatgctaaagacttttacccaagatgttgcaagtaaggtatcttcaactaaagactgtctccattcctttcagattattgaatattttgtttaactttcaggaaatcatggatagaatttataagaatgttatgagcaaagtccaagagatgaattatattcagaaaactctgttcaagatagggtatgattacaaattggaacagatcaaaaagggatatgatgcacctctttgcaatctgtaagtacatttcataggctctgtggtttgagcctttaaatttttttatgcttttaaatccagaagatgaataaataaatggcaagttaattcatttgaatatcaccaccatgatcataaggttgaaattctcttttattctaagtcttattgtttatacagcaagcagaggactctgatcttggcaatttaacaaattttaataattgagtgtatatttaagatttatttataaaatttagtttcatgaagaaaaactaaaatagacttttgaatcaagacacttgagcttaaaaaatgtcatttctaactaaaaaaagtgacctccattgcatgaaggtttctgatttattgtattcataaaatagtgtagtaagtatatgaatataacttattttaaatgtgatgctgaggagtggggatggggaagcattttttattggaagtgagataagataggtgattaaatgttccaaagataattaaaatttttttwcctctgatgtctgttttctttcatttacttgtgtcagcatagtttcccgatgctacacattatctttcttcatttttaaagagttttttctggcatttttacaaggcgttactagttgttgccttgttaacctctcattctcaccgtgattctgacattgagatgttcaaccagttgaggaatctttcccagagcttataaattagtgtgttgccaagaataatgtatgcgtacattaaaatcatttatcctycctttattaaggttactgtttaaaaaggtcaaggccctgctgggagggaatgtccgcatgatgctgtctggaggggccccgctatctcctcagacacaccgattcatgaatgtctgcttctgctgcccaattggccagggttatggactgacagaatcatgtggtgctgggacagttactgaaggtaagcattattaatgtggtaaatattctgtatcagctgctactaataaaatacattcgcattacctttggaaaccatggtaactttaaaatacctcttaactaatatcagattcattgcaaatcagtgtagttttggtttatgaattcttaattataagtatcatgtggaccctttcattttaagccttataattttttttttttttgagatggagtttcactcttgttgcccaggctggagtgcaatagcataatctcagctcactgcaacctccacctcctgggttcaaacaattctcctgcctcagcctcccaagtagctgggattacaggcgtgtgccaccatgcccagctaatttttgtatttttagatggggtttcaccatgttgaccaggctggtctcgaactcctgacctcaggtgatctgcctgcctcggcctcccaaagtgctgggattacaggcggtgagccaccacgcccggtcgccttataaatatttatgccacacagtcggtcctcaaaatcctgtcaccctggtcctttagtcttctttctctaaatgatcacttctttggagaactgtactattaaaaatgaagtatcacttttatgctccctcttaaatctgtgttcctgtcctaacttcttctttggtttcccttttgttattttcaacagcctgaagcgaggtttcccaaccctgacactgttcaaattttgaatccgataattctttgttgttgagggctgttgtatgcattgcagaatatttagttgccaaagcagatgtttatgggctcaccccagctgtgacaatgaaacatatccccaaacattgccagatatcccctggggggcaaaatcactttaggttgagaaacactggggtataggaattgtttttttggataatcttattttcgctttaaactcattgtgtccaaaatcaatgccattattctaaactgtctctctattgacaaattatttgtttgtgtcaatggtgataccatccttaaagtcattccaggtatcagctttgaagtcatctgtttattttaaaatatctttaaatgtcatcagatcattccttcattaggtttctcctttccctccatatcacctctgtcgtccaactttttattgctccattctgctccgacctaacagcctttttatttttgagacagagtcttgctctgttgcccaggctggagtgcagtggcacaatctcagctcactgcaacctccgcctcccgggttcaagcaattctcttcccttagcctcctgagtagctgggactacaggcgtgtgccaccacacctgactaatttttgtatttttagtagaagcggggttttaccatgttggccaggctggtctcgaactcctgacctcaggtgatccacccacctcagcttcccagagtattaggattacaggcgggagccactgcgcctgscctgacctaacagccttgtaacagctgtgtctgcctacattacatcacttctgatttatcctgtatccttctattagatgcatccacctcatccactgcttgatacctgatgtatcaaatctaaacacctctttacctagctttgacatctttaatctgatgctagtgtacttatccaacatcattttccattattccccacatatacacaatgcctggctcttctctccagacccaccagtcttcttactgtttcttatgaaggcattcttggtctcacctctatgtattttcttttcccttctcttggaatgtcctttttgcttattgatcacaaccatcttttaatgcccacttttcaataatgtctttcctaactacttcattttacattcattgtttaagtctctaagctactattgtgcttaccttcagtgcccatgcagtttagtrtttaaatgttctctgaattgtttcacatgcatttcttcccagttcatttgtaaggtcattgagtgcagggtctccttatctctcatgtgctgtttacataatgggctgtccataaatatttgtttattgctagcaataatcacaaattgcaaatggatatcatcatcatgatgatgtttgacaacagcagctaacatcttttgaaggcttagcttgtgccaagaagtgttaagcattgtccatgtatcatctcatttaatcctcacagcatatccctgtatgaagtaggttttgttactatctccatttcatagatgaggaaatggaggcttagagaggctaagttacttgtccatgttacatagccaatgagtggtagagcaggaattccaatcaaaatctatcttatgacaagcttaggtagataacggtggagccatctctcctcctttaacagatattttgtacttaattacataaaatataaccatgaaaagcaaaaatgatgtaacaacaatggaatccattgcactattgaagtggagttgaaatactgaaaaatgatcacactttgcactccttcttttgtcatttttctgactctggttctaactctaatattcccagtgcattggtacaaatctggaatgtggtatgctaatatctctgttactttttccctcacagtaactgactatactactggcagagttggagcacctcttatttgctgtgaaattaagctaaaagactggcaagaaggtaagaattttatgaaaagctctagtgattcaagatatgctgaaaactactgtcagctttatgactttcatttctttaaagtctggggaagcaaataattctctgctgttttgctgttgcctgtccccatgcattctttttcctcagtgatatctttaggttcccaagaggaaaataaaatctctagaatctaggattaatgattctgaacttgacaatacttgaaggtaaagagaaaaaaaattcttactggagctttctgggtttggagaaggtgaggatccttgaaacttgactttactagtgagaatgtttgggctgagaaaccccagatttttaggggatagaatgatgggttgcactcatacacacaccaacttcttagatcttgatcccagaaaagattttcatagttgagactcaactgtccagctatttgtatagttgaatttttatatgtacctgcacagacaagccacttagaagaaaactagagacattgatgatcatcctttctataaattagctgaaggcaaatatcaaccagtcttcttaatgaaagatactaaatatacacagtaactacaataaagtagattgttaaataaaacaaataattaacagcctagccatgtcagataaaggaagagtaattaaaatgcttaagattttaaaagagaatatttaccttaggatggaacacggactaaaaatttaaagtacaagttaccgtgtaggatgcaacccttaggttgtccaaaccctgagaaaatgaatacgtttttatctaacataaactttaagtttctaaagcattttttattatgtgtgttattgtcagtgctttatgagcaaatgactatttcttttttaaaaacacattttaaaaagccagttgcattcccaagagttttacaccttgggacttagtcttccctttttccatggtaatggcattccaattttaccatgaaaatctgaagaaaatagtttgtgtgtatgtgttttggacatcaacatcagaattattttattaggtaagtttttaattgttaggcagtggaatcagagaaatgtttaaaggcaaaaatctccttaccaagttttactataatttttattttctgatttcctggtactgggccttaatgtcagttttggggagtaggtcccttgttgaacatgtatttggagttttccttgctgtgaagactctttggctttatactgtatgaatgatctcagtttttttttaacatacaatgggttttatcatgttgaaatattgaatagttttaagtttatcagagcagctaacagctgaaaggaaccctgattttaatccttttatgacacaaaatctagtctatatcttattttgcaaatttagatttttgtatattttccttaaagtaagcttccttcagtaatacagaggtaatgagtagtgatgaaatatattagtatttattatcaattagtttagtgtttgaacttctaaagtcatgactggccacaggcaaaattaatacaattttcttcctgtttcccatagtcccccctttccctctcactttatgatgctaccatttttgggtacttactgcatgttctttttggttaaaacctccttagaaaaaatttgaaatgcattgatatcagtatgtcagtaatttacttataacagcttcaagtgttactcttcctgggggtgattttatcttaacagaactctgtgaacactaagctctaatggtgttctaagtgtgaaatgttatggtatgggaaggtttgagatgggtgattgttggtggtgattatcattgagcctttcttggtgttcttaaaatcacagtcacccagtatcctcatgtaaattttagtaaatataaactaatgttctctcataaagtgatataaaatctgatcagcagaaaaatactaacatacgtataagctttaagaattaatgaaatttgttgtagaacaataactaatttacttttatgatttccaggcggttatacaattaatgacaagccaaaccccagaggtgaaatcgtaattggtggacagaacatctccatgggatattttaaaaatgaagagaaaacagcagaagattattctgtggatgaaaatggacaaaggtggttttgcactggtgatattggagaattccatcccgatggatgtttacagattataggtcagaatgttttctttttatggttttctttagtttttataacttcagtatatatgaaaggtaatattgatcagtcattaataaagttgatggttccattagttcaaactttggacaagttatttaacttatgtatgagcttctccatcagcaaaacaaggacaataccaacctcatagggctgtcgttaagattaaatgagttgatatatgtaaaatattctaaacagagcctgaaccttagcgtaagtactagcagcactagcaacagcagcattgagtgtagagagaatgggcagggaaatagcaaacaggtaatgagaaaacaaaaagagctcagaggacgtctttcttggtcaaccacatgtgattttatataactgtttcctrtaacatactctatgctaggccttcctcactcttcacctctccacccaaggggcagcatgggcacatatatttttttttactgttggctatttatatgtgtctaacgaggcctgaaccttagaaaattaatatcaatccttagcactagtcagttctgagaatgtcagttactttggcattgtcctcattgagtctactgaagtggacctttatgttcaaaaaatgactccaaaatgggcccttgtgctattcacttggatgaggcaaaagttaaaacttgctgatgagaacccctcagcaagatcccagtcaggtcttttttaagacatagagtttcctcacctatatgtagtgactgatttcaatccatcgctggacctcacgatatctgacctgaatatagttagagatttcctgggaaaattggttcttcatctagaaatttgaaccaggaaccatggttcagttgagaaacaataagcttttttcccccttgttccttaattgcactggaatcaaaggttatttctgtagagtgggttcccaggctacgggtaggcaaatcagcactcatactcattccaaggccatgtgatgattattcaagctgtgccatcctgtgctagcactttcttagagaactgtcattttaacaagataatgtcaaaagtggaaaaggagaattaacatgtgttaaatgtgttctatatgccagacattgtgggatatgtctgtatgaggtaggcatcattatcctgataaaacttgaggattagaaggttaactgacatgccgaggatcacttagctagtaccaggcagagttaccattcagatagaatgttccaaagtcctagttccctctattaaattgattataatatttaagattataataagatgctaaagctttgggtttaaggtgtaacttttagccaatacttacttaagtaggcattttatttttaactggtgtgtatgggcaacattatatatatgcagtttttgccattttaaaagtaatggcaaaaaccacaattacttttgcaccaacctaataataattttagaagaagtagttttgtaaataacgattaaggcaatgatattcaaagaagacagtcagaattgcatataccttagttaaacagacttaacattctttatgacttaacagatmgtaagaaagatctagtgaagttacaagcaggagagtatgtatctcttgggaaagtagaagctgcactgaagaattgtccacttattgacaacatctgtgcttttgccaaaaggtaactttccaaagttgtattttttgtttcrtaagtcaaaagatatttagaaaataatgtgattacatattatcataagggtaacatagtcttctcttagaattttcatcagatctggggaattgtacatttatgtaagttagtgaattcaacagcttaaagatcattttagataactcagacgtgttaactatttattggacacctgcatcttgctaaatacttagctatgcaacaagttatttcatttaacatccatgacaactgagacttagtataagtaattttcccaaaaatgtaacacaactactacatgttgagatgaattttgaacccaagtttttctaaatcaaaagcctaagagattgagccattttctttatatgttgatatgtcttatttttatgggttttattcttttttaaaaattgtaattgtggtaaaaagcatataacgtaagatttaccatcttaaccatttctaaatgtacagttcagtagtgttgtgtatatttacattggtgtgcagccaatctccagacctttttttcttgcaaaatggaaactctatacccattaaacagcaactcctattcctcctccctccttcccctgggaaccaccattctactttctgtttctatgaatttgacttctctagaaatctcacacaagtagaattatacagtttttgcctttttgtgattggcttaattcccttagtataatgtcctcaaggattatccatgttgtagcatatgtcagaatttccttcattttgaaggcttaacaatattccattgtatccatataatgtattttgtttatatattcattgtcagtgcacattttggttgcctccccctcttggttgttgtgaataatgctcctaggaaaatgcgtatgcaaatatctctttgagatcctgctttcaattatgtggatagatacctagatttagaattgctggatcatatgacagttctatttttaattttttaaggaactgcaatactgttttccatagcaacagcaccatttttacatttcctacaacagtacacaaacattctagttcctccacttcttcactagcacttgtttgttttatatagtagtcatcctcatggatgtgaggggatattttgttttagttttgatttgtattttcctaatgattagtgccactgagcaccttttcctatgattgttggccattcatatattatcgctggagaaatgtctattcaagttctttgttcattatttaattgagctatttggttttttgttactgagttgtggaaattatatattctgtttattaaccccttatcagatatatgatttgcaaattttttttttctattccatagattgcctttttactctgctgattgagtcttttgatacacacaagtttttarttttgttgtagtcccagttatctgttttttgcttttgttgcctttgcttttggtgtcacacccaagaaatattgccaaatctattctcataaagtgtttcttctgtttttttttttctagcagttttatagttttatcagattggtgcaaaagtaattttggtttttgccattaatgtcaattacttttgcaccgacttaatagctcttcgatgtttagatttttgatccattttgagctaatttttgtatatgttgtaaggtgaaggtccaccttcattcattgcatgtggatatccagttttcctagtaccatttgttgacgagactgtcctttcctcattgagtggtcttaacacccttgtcaaagatcgtttctccatagatacaagggtttacttctagtttctctattccattggtctatatgtccttctttatgctggtactatgggttttatcatttcctaatgaaactttaataaataagagaaatatatatttggaattatctgtactgtactatgtcattgactagtttatgaataacttttctcaatgttttcatttctattttattttctgtttttttagtgatcagtcctatgtgatcagttttgtggttcctaaccagaaaaggttgacacttttggcacaacagaaaggggtagaaggaacttgggttgatatctgcaataatcctgctatggaagctgaaatactgaaagaaattcgagaagctgcaaatgccagtaagtaagaaattgctagactggtatagtccctaaaagtcatctaatgatgtcttttgcattaggctcttcaatatgtttgctttaataataaaatacaggattttaagaaacctatttcttaaatatgtataatggatttccatgttggaaggatccttcaatgtcatatagtagaataacctatgtagttctttattgcatgtttcaacatctttcccaaagtggtcatctagcctgtgtttggaatggtccatctttgggtagatctgttatataaatctactttgtgtctgtaaagcagaaattagtaactctaagtttagtaaatagtgttataaccatgattatgctttgtgtgtatactgtggctctgtaaatggactatcttcagatggtacattaataaccaattggagaaaatctgcttatatagtatatgccaggaattgtgttacacactaggaatacagaaagtagtaagactcatttcttgctctcatgtagttcattatcaggtgagaggggcacatgagagagacaacaatcttaacagcaatagagagatgaacagagaatcatggtaccacagatgagggtacctaacctacttgggaggacatggaagagatgtcacttcagctcatccttaagggttaattagaagttaactaggttgggcattctaggccaagaagcaacatgagaaaggcaaataggtatgaaaaggatgatgtgtgcagggaactacaagggagtctggtgttaccggtacagtgcaaagtatgaggtaaggctgtagaggttagcagaggccaagttgtgtagtaccttctatgcttgttcagaaatttggatgtaatcctgtagacagtgaggagccattggcaggttttactaggttagtgatgtggtcaggtttgcattttggagagatgcagtcactctggaggccatgctgcagatgaatttgagggggactggactgaggcagaaggccagttgaagaggactgtaggagatacctagactggggggtggtgagtaatgagggcgtgaagcagggaatcaggaaatgtttatgaagcaaaattggcacacttcagtgattaattggataacatagataagggaaaagaggagtctaggatagcccccagatttgtagctgaagcgacaaggtaaatactactactgattgagctagaaaatacaagaggaagagctggcatatacaagaagatgatgaggtcagtatgggatacatgtagtttgaaacacgttttgacaaccccatcaaaaagtgggcaaagaatatgaacagacacttctcaaaagaagacatttatgcagccaacagacacatgaaaaaatgctcatcatcactggccatcagagaaatgcaaatcaaaaccacaatgagatgccatctcacaccagttagaatggcaatcattaaaaagtcagggaacaacaggtgctggagaggatatggagaaataggaacacttttacactgttggtgggactgtaaactagttcgaccattgtggaagacactgtggtgattcctcaaggatctagaactagaaataccatttgacccagccatcccattactgggtatatacccaaaggattataaataatgctgctgtaaagacacatgcacacatatgtttattgcagcactattcacaagagcaaagacttggaaccaacccagatatccatcaataatagactggattaagaaaatgtggcacatatacaccatggaatactatgcagccataaaaaaggatgagttcatgtcctttgtagggacatggatgaagctggaaaccatcattctcagcaaactatcgcaaggacaaaaaaccaaacaccgcatattctcactcataggtgggaattgaacaacgagaacacttggacacaggaaggggaacatcacacactggggcctgttgtggggtggggggacgggggagggatagcattaggagatatacctaatgttaaatgatgaggattaatgggtgcagcacaccaacatggcacatgtatacatatgtaacaaacctgcatgttgtgcacatgtaccctagaacttaaagtataaaaaaataaaaataaaaaacacgttttggataatcaaagttaaaatgtccagcaggcggttgtgtgtagtccaaatcttattgggagaggcctggactctgctatagactcggggataattgaaaccacgaaagtagatgggccaaccttgggtgagattgtaaagggagaacaggaggctgtggatgggtctctggataacaccagcatataaggaatggatgaagaaagagatgtgtgtgggaagcatgattggcaagatgccaggagagcaatgcccatgcagaccactgctaagagagtttcaggaaagagagtaatcaacagttttacattagcagaaaggactgacaaagcttattggaacattgattggaaaattaaagagattaaaaattaatgctcaagttcaatagtaggctttttttttttcttttttcccaacgagggattccatgtgggtggctgattttataacctttttttaagtttcagttttatcagtataacaagtatatatagtttaaaaaatgtcagtattaaggacttgcaacaaaaagcagcccatattgtatccctcttttccccaagtctcatctgtcttcaactttagttgtttttttaaagtttctggcattcgtctccatttttctaaagaaaatggttatgttgctccttcttgaatttttcatttgcgatgttatggacttttatggacctctaaccatagaagatgatttacctttcttatgaccattctccttgccttccctaccacactttttcttttccaatagatagtacaatttgcattttacacccaggtttccgttatgattatgaaaatattcacagctgaactacatagtgttttatgattatatttcctttcttggacaattttttgtgtttccctggatcttaaaatttcctctcttcattagttttttgtatactattcttaactcttccactaaactctgttaaaattgtaaaaattctccctaatacaggaaaggatagcatgtctgtatttttgttctcggagacatacttcttagagccctttatcctcatgctgaaatttagactatttgcttccaaaggcttccctttactatcatcctgggaatttcctttgcttctctcctatgttggatcctgtttcctggatctcatatctgtctctttcctggtttactcgccggtttgggtagagcacatccttcagcagcttcctgagaaaggtgcatgggaggtaaatttttgagactgtgcttgcgtgtctgaatatgtttttattctgtcctcacccttgagatgtgtcttggcatattttagagtgataaattctaaatcatttttcctgaatactttgcagacttggctttgttgtcttccagctccagtgttgcatcctgattcccattcctttgtgtatgatctattttatctctcctagctttcagagtcattatgttaatttctggtgttttgatagttcataatgatgtatcttagtgtgggtctttgatcatttatcattgtgcatacttgctgtgggccctttccatatggagatctctgcccttcagttctgggaaatgttaatttatcttttgtttgttcatttgtttttttccccataattccccccaccctgtgtgtctgtttctgagactacttttatatggctgttggacttccagctttcatcctctaattttattatcctttttaaaattttctatttctctttttgttttatattctggcagagtctctcaactttatcatctcttctgtctactgaatttccaatttccactatcagaattttaattttcaagagcttgttcctgtcctctcagtgttccttttaatagcaccctgttgctctttcatggatgcagtcaatgcattgtctcttattcctctgaggatattaaaaggaatcctttttatgtagttttcttctcctgttattgtctcttttacctccaagttgcactttatgcttgccttggtcattgagtcccaagtgtctgctgatccttgtatgtccatattcaggaaccaggtactaaaaaactgtttggaaagcttactgggcttcactgaaaaggcattccaacgttagtgtctttttctcttaagtcattctgtttctccaaaggagatttctccagtcttttgcccgggcaatattagcctgactgccagaattctggtagccaaaagaggtaaaggagttattgagggggatgggagagcagtgggtctcaccctcactgaatccttctcttttcagccttactccctccttctgttgtacctaatgtccatgagtcccgagtctctgcttcagtttttccaaaaagtagacctgcctacaaatggctttgagaagagcagcatagggtgcgggagaacttttctctaaacaggctggagaccagtgctgctctttccagctttacccctcatctcttatcttcagaggcacaggcttagtgggcacttgcccgggctctactatgagggcagtttgctgcttgttggcaacctcttttgttggtagttgctttggcttcctcagccctaagttaattaccacaaattcctttgctttttgtcttctaagattttgttgcactttctcattcagtgcccattttctcttgtttcactttttgccttgtggttaatacctttttcatttttaaattattctaaacaatttaaattcttttttaggcagaacagagaaaaactatatactcttcgtgttttgttggaagctgttaacctaatttcaacccattgtttttctcttacaaataaaaatatcatttttctgattataggttatctatattcattataaaatattggacaacagaatattacaaagaaggaagtaaaaatcacttgagagtagtttatctttgggtggcaagattacattttggtatatatacttaagctgtcaacataatcgaagtttttctgtgtcagtaaatagaaaattacggtatcattttaaatactaaatagtcccagtgcataaatagccatttaagtccctattagatttttaggtgaatttcaccttcttccccatcactgtaaacaaatataacacgaatcttgtatactccattattttcttatgtgattattttcttagtgtgaattcctagaaacagaatttctgagtcaaagagaatatatatatatatattttttcaaataaatttttttaaaaattattattatactttaagttttagggtacatgtgcacaatgtgcaggttagttacatatgtatacatgtgccatgctggtgtgctgcacccattaactcgtcatttagcattaggtatatctcctaatgctatccctcccccttccgcccaccccacaacagtccccagagtgtgatgttccccttcctgtgtccatgtgttctcattgttcaattcccatctataagtgagaacatgcggtgtttggttttttgtccttgcgatagtttactgagaatgatgatttccaatttcatccatgtccctacaaaggacatgaactcatcattttttatggctgcatagtattccatggtgtatatgtgccacattttcttaatccagtctatcattgttggacatttgggctggttccaagtctttgctgttgtgaatagtgccgcaataaacatacgtgtgcatgtgtctttatagcagcatgatttatagtcctttgagtatatacccagtaatgggatggctgggtcaaatggtacttctagttctagatccctgaggaatcgccacactggacttccacaatggttgaactagtttacaatcccaccaacagtgtaaaagtgttcctatttctccacatcctctccagcacctgttgttccctgactttttaatgattgccattctaactggtgtgagatggtatctcattgtagttttgatttgcatttctctgatggccagtgatgatgagcattttttcatgtgtcttttggctgcataagaatatatattttaaagacttttttcctcattgccaaattgctgcctctccccaggaaaactgaaccggcttatattcctatcagagatatatgaatatacctatttctctaactgggctcctattatttctatttattaaaaatgttaactacttargttacattttggtttaaaaatatagtttatagtaatagtttttctacctgaaaactaatttctccccaagaataattttctgaattctagacactgtgaagttttaaataacaatggcctgttaacataatcagattgaaaaagcttatttattttatacctataaaaacagtgtgacatgtattttatacttacaaaaatagtgtgacataatatttccttcttcaaggtggttttgttacaatattattgatataacacacttttatattaatgaaccaggctcccagaaccttttttgatacaaagcctgatttgctctcaatatagtatttctaaaaatatatagtattttctttaggtatttaagtatagcatttcaaatatagtattttctttaaatatagtatttcaagaaatatatagtatttcaaccaaaaggctaatcatcagaggtgcactgtagttactcttattcatcctctgaatatattaatggattagaatgtgacttgaataattttccattgcatatttaattgtgtagaagcaacaatgggggaagtcaaactgtatcccactttgttagaaggcagaataaaatcctaggacccactaggttctcataactttcctgtgcttagagtgaggcatgtaactcatgatttggataatgagtggtaatcatgagctaaatgtataaatcataaaccttttgtgccacaaaggatttatcttgccaacattttgcaaattataatttcagagacttatgcaaaaaagtgtgaaatagttttgattgtattcagcaaatctgtcagaaattatacatctttcatagcaggcctcttcatattttaagtataattgtgaggtatacatagtatcataagaatgcaaaatacttgtttttgggtgatttgagcaactactaatggctatgaaaattgctatttgctgccacctgcaagtcacatttcataatgttctagttaattcggataaaaatgccacatttttgtttgttttgtttgtttttccttctcctaacctttctcacttgttggcaatttattctatttacaggaatctgtgatagtccattgcttcctatggcttggagtattagataatgtttaggagttttcaagatgaaacttctatagcagtctttatttttttggctttaaagtaggaatttaactaagattgttttcagcctgctttcatttgcttgtgtgcaactgaaataatgtgtttgccttgtcccaattttgtcagtgtttctggactaggacctatgtatgtaagaaaagtaaaatgaaataaaaaattggggggccaaatctgtagctgagaatttaactgtttccttgagttccaaatgtgacgttgggagcagataagcttattttatgaaactctgtgtaactgagctgtactttaataacagagtagacctggttaattcaagcaagttttatgttcctttacgacccattcaggcattatttttaggaagttggttgtaatttatatttaaaagattatttttcatactcaactttatatttttctgtcattttagtgagaaactcactagttcaatcaagctttcataaaacgtagactagtactagaaaagaactttggtgaatgtgagttctttgtgcttgccactgaaaccaaatcatttctaaactcgtctaggctattttgtagtagtttttaaaaatgtgcgaatgtttgcttcttggcaattgctgttttaaataatcacataaaataacattttatgttgattaacataacatctgttgattaatattactgttaataggcctccataatttaaagaattacccttgtagtcataataaataacttgatggcatataatttatggaatttaaaagtattaatactgtattaattacctttatgtccttccttatattttgccaatatgtattaagttgtataactcaaatacaatattcattgcatcagtttttataccatttaaagatatgaaattcacaatccccttttttatctgcatttgaatatatagtaaagtttataaagaatatttgtctagagacttaattttctgtagaatgaattaataaacttgtatgtatttatggagggctctcaaccctatggatggcagtgaaaaaatcaaagaccttgcttttatggagcttacattttagctccatggtgaaacaaatatataatatgttgggtggtgataactactttgaacaaagcatagtgttaagaaggtatagagagacaaagggacttctcttttgtgtatttctttatttattattatactttaagttttagggtacatgtgcacaatgtgcaggttagttacatatgtatacatgtgccatgctggtgcgctgcacccactaacttgtcatctagcattaggtatatctcccaatgctatccctccccccttccccccaccccacaacagtccccagagtgtgatgttccccttcctgtgtccaygtgttctcattgttcaattcccacctatgagtgagaatatgcggtgtttggttttttgttcttgcgatagtttactgagaatgatgatttccaatttcatccatgtccctacaaaggacatgaactcatcattttttatggctgcatagtattccctggtgtatatgtgccacattttcttaatccagtctatcattgttggacatttgggttggttccaagtctttgctattgtgaataatgccgcagtaaacatatgtgtgcatctgtctttatagcagcatgatttatagtcctctgggtatatacccagtaatgggatggctgggtcaaatggtatttctagttctagatccctgaggaatcaccacactgacttccacaacggttgaactagtttacagtcccaccaacagygtaaaagtgtccctatttctcgacatcctctccagcacctgttgtttcctgactttttaatgattgccattctaactggtgtgagatggtatctcattgtggttttgatttgcatttctctgatggccagtgatggtgagcattttttcatgtgttttttggctgcataaatgtcttcttttgagaagtgtctgttcatgtccttcacccactttttgatggggttgtttgtttttttcttgtaaatttgtttgagttcattgtagattctggatattagccctttgtcagatgagcaggttgcgaaaattttctcccattttgtaggttgcctgttcactctgatggtagtttcttttgctgtgcagaagctctttagtttaattagttcccatttgtcaattttggcttttgttgccattgcttttggtgttttagacatgaagtccttgcccatgcctatgtcctgaatggtaatgtctaggttttcttctagggtttttatggttttaggtctaacgtttaagtctttaatccattttgaattgatttttgtgtaaggtgtaaggaagggatccagtttcagctttctacatatggctagccagttttcccagcaccatttattaaatagggaatcctttccccattgcttgtttttcttaggtttgtcaaagatcagatagttgtagatatgtggcgttatttgtgaggcctctgttctgttccattgatctgtatctctgtgttggtaccagtaccatgctgttttggctactgtagccttgtagtatagtttgaagtcaggtagcgtgatgcccccagctttgttcttttggcttaggattgacttggcgatgctggctcttttttggttccatatgaactttaaagtagttttttccaattctgtgaagaaagtcattgatagcttgatggggatggcattgaatccgtaaattaccttgggcagtgtggccattttcacgatattgattcttcctacccatgagcatggaatgttcttccatttgtttgtatcctcttttatttccttgagcactggtttgtagttctccttgaagaggtccttcacatcccttgtaagttggattcctaggtattttattctctttgaagcaattgtgaatgggagttcactcatgatttggctctctgtttgtctgttgttggtgtataagaatgcttgtgatttttgtacattgattttgtatcctgagactttgctgaagttgcttatcagcttaaggagattttgggctgagacaatggggttttctagatatacaatcatgtcgtctgcaaacagggacaatttgacttcctcttttcctaattgaataccctttatttccttctcctgcctgatcgccctggccagaacttccaacactctgttgaataggagtggtgagagagggcatccctgtcttgtgctggttttcaaagggaatgcttccagtttttgcccattcagtataatgttggctgtgggtttgtcatagatagctcttattattttgaaatacgtcccatcaatacctaatttattgagagtttttagcatgaagcgttgttgaattttgtcaaaggccttttctgcatctattgagataatcatgtggtttttgtctttggttctgtttatatactggattacatttattgatttgcgtatattaaaccagccttgcatcccagggatgaagcccacttgatcatggtggataagctttttgatatgctgctggattcggtttgccagtattttattgaggatttttgcatcaatgttcatcaaggatattggtctaaaattctcttttttggttgtgtctctgccaggctttggtatcaggatgatgctggcctcataaaatgagttagggaggattccctcattttctattgattggaatagtttcagaaggaatggtatcagttcctccttgtacctctgatagaatttggctgtgaatccatctggtcatgggcttttttttgttggtaggctattaattactgcctcaatttcagcactttttattggtctattcagggattcaacttcttcctggtttagtcttgggagggtgtatgtgtccaggaatttatccatttcttctagattttctagtttatttgcgtagaggtgtttgtagtattctctgatggtagtttgtatttctgtgggatcggtggtgatatcccctttatcattttttattgcgtctatttgattcttctctctttttttctttattagtcttgctagcggtctatcaattttgctgatcctttcaaaaaaccacctcctggattcattaattttttgaagggttttttgtgtctctatttccttcagttttgctctgatcttagttatttcttgccttctgctagcttttgaatgtgtttgttcttgcttctctagttcttttaattttgatgttagggtgtcaattttagatctttcctgctttctcttgtgggcatttagtgctataaatttccatctacacactgctttgaatgtgtcccagagattctggtatattgtgtctttgttcttgttggtttcaaagaacatctttatttctgtcttcatttcgttatgtacccagaagtcatccaggagcaggttgttcagtttccatgtagttgaccggttttgagtgagattcttaatcctgagttctagtttgattgcactgtggtctgagagacagtttgttataatttctgttcttttacatttgctgaggagagctttacttccaagtttgtggtcagttttggaataggtgtggtgtggtgctgaaaaaaatgtatattctgttgatttggagtggagagttctgtagatgtctattaggtccacttggtgcagagctgagttcaattcctgggtatccttgttgactttctgtctcgttgatctgtctaatgttgacagtggggtgttaaagtctcccattattaatgtgtgggagtctaagtctctttttaggtcactcacgacttgctttgtgaatctaggtgctcctgtattaggtgcatatatatttaggatagttagctcttcttgttgaattgatccctttaccattatgtgatggccttctttgtctcttctgatctttgttggtttaaagtctgttttatcagagactaggattgcaacccctgccttttttttgttttccatttgcttggtagatcttcctccatccttttattttgagcctatgtgtgtctctgcacgtgagatgggtttcctgaatacagcacactgatgggtcttgactctgtatccaatttgccagtctgtgtcttttaattggagcatttagtccatttacatttaaagttaatattgttatgtgtgaatttgatcctgtcattatgatgttagctggttattttgctcgttagttgatgcagtttcttcctagtctcaatggtctttacattttggcatgattttgcagtggctggtaccggttgttcctttccatgtttagcacttccttcaggagctcttttagggcaggcctggtggtgacaaaatctctcagcatttgcttgtctgtaaagtattttatttctccttcacttatgaagcttagtttggccggatatgaaattctgggttgaaaattcttttctttaagaatgttgtatattggcccccactctcttctggcttgtagagtttctgccgagagatccgctgttagtctgatgggcttccctttgagggtaccccaacctttctctctggctgcccttaacattttttccttcatttcaactttggtgaatctgacaattatgtgtcttggagttgctcttctcgaggagtatctttgtggcattctctgtatttcctgaatctgaatgttggcctgccttgctagattggggaagttctcctggataatattctacagagtgttttccaacttggttccattctccccatcactttcaggtacaccaatcagatgtagatttggtcttttcacatagtcccatatttcttggaggctttgctcgtttctttttattcttttttctctaaacttccttctcactccatttcattcatttcatcttccatcattgatagcctttcatccagttgatcgcatcggctcctgaggcttctgcattcttcacgtagttctcgagccttggctttcagctccgtcagcttctttaagcacttctctgtattggttattctagttatacattcttctaaatttttttcaaagttttcaacttctttgcctttggtttgaatgtcctcccgtagctcggagtaatttgattgtctgaagccttcttctctcagctcgccagagtcattctccrtccagctttgttccgttgctggtgaggaactgcattcctttggaggaggagaggcgctctgctttttagagtttccagtttctctgctctgttttttccccatctttgtggttttatctacttttggtctttgatgatggtgatgtacagatcggtttttggtgtggatgtcctttctgtttgttagttttccttctaacagacaggaccctcagctgcaggtctgttggagtacccggccgtgtgaggtgtcagtctgcccctgctggggggtgcctcccatttaggctgctcgggggtcaggggtcagggacccacttgaggaggcagtctgcccattctcagatctccagctgcgtgctgggagaaccactgatctcttcaaagctgtcagacagggacatttaagtctgcagaggttactgctgtctttttgtttgtctgtgccctgcccccagaggtggagcctacagaggcaggcaggcctccttgagctgtggtgggctccacccagttggagcttcccagctgctttgtttacctaagcaagcctgggcaatggcgggcgcccctcccccagcctccctgccaccttgcagtttgatctcagactgctgtgctagcaatcagcgagactccgtgggcgtaggaccctccgagccaggtgcgggctataatctcstggtgcaccgttttttaagcctgtcggaaaagcacagtatttgggtgggagtgacccgattttccaggtgacccgtttctttgactaggaaagggaactccctgaccccttgtgcttcccgagtgaggcaatgcctcgccctgcttcggctcgcgcatggtgcgcrcacccactgrcctgcgcccactgtctggcactccctagtgagatgaacctggtacctcagatggaaatgcagaaatcacccgtcttctgygtcgctcaggctgggagctgtagaccagagctgttcgtatttggccatcttggctcctcccccttctcttttgttatgagtggtcagggatgtcctctccggggtggtggtatttgagcagacatatggataaagtatggaagtgacacacaactttattgagaaagaccatctcaggcaaatataaagtctctgaagaggaagatgtgtgtgtatgtgtgtgtgtgtgagtataaataatgtgtatatgtatgtatattttaataaccacatagactaaaactatccaactgaaacaacttaggtatactttgagaaatataaaatgaaattgtaaggtagaggtagcattaataaactatctagtataccattaaataagtttgtggtgattggtgattcaacacccgaatcatctaggtaaatcctgaaaaactcatattttattaattgcttctccttccccttctttccccgtccccactcctttctcgtctctttccccccctctccttttctcccatctttcacttctaatttcagtgaaattggagcgatttgaaattccaatcaaggttcgattaagcccagagccatggacccctgaaactggtttggtaactgatgctttcaaactgaaaaggaaggagctgaggaaccattacctcaaagacattgaacgaatgtatgggggcaaataaaatgttgttgtcttattgacagttgtgcaggaggtagcctggtggttttcaacytctagaattttaagcctttgttgaactgttagaatgtaaggtatatcattctaaagatagagtaaaaagaaaacaaaaccaaaagttattaaaattgttgtccrgtttactttaacttagttttgcatagttctagtgcagctgaaattgaaaagttatttccctttagctgtgttattatagagcagaaattctgtttttaaaaattagcctaagatatacttgtttttgtaaagaaaaatatttaatgttgaacaaaataaattggagttggagtagaatgtagtttgaggaaatttgcagcttccaatgcctcttgtcttcctatttcagaagtttaaatattaagcatgacagaaaatatgtattaacactactcaaagcaaaagtgctgcagggctttaaaattctcttccaaccatttatcttgaaggaaaaattcaatagtaatataatacacaaaatcaaataataccttagaaggtattaagattataattgttgcataggttagatatagagtcattgtaatgttgtgaataattacagtgcctaaaataagaatagaacaacatatacaacaccaaaaaatatctagtaatatatttaaagggaaattgagctgctttttttgaaactttgagatctaaaaataactgtaattatttgaatgactaagaggaaagtacattttttgaaatgctgaaaattgcctttctgtgtttattcaaactgaaaagctgagaccaagagcaaggaaggtaaaaagttaacaggcaaacattttctcttagaaaaggtgataaaatcataagtatttggaattagaacccttgcacagcactgaacctgggaaagagatttaaactctgaatttatctttgataacagggattgattttaaaatgtacatgtattaaattacatttgtaatttaaggtctgtttgctgttgctgattttattcttgatcagtagtttgcatttcagaaagcctttcattttgctttaaktttagcaaagcgggttataatgaatgacttccccaatatcttgcttgaacttacaggtgattaacttggatgagttttgggaagttaaagggaagaaaacactgttatcattttttcctgtttgggaagagcttagaaactggaaatactagatttgggagaagggcagagttacttgataagggactgatgtttgtgcagtaacttgggagtgtggtttctttttgaatctttaattaaaacctgggattatatatccctgataaatattcacacttgaaccatagttactgtaaaatgcaaaaaatcttaatactgttattctttgcactttttcttaatcattttttatatatatgcatatatatatgtgtgtgtgtgtgttgcttatgttgttttgtacagatgtgggccaccattgcaacaaaatacattctttttgctctaaaatatttatgaagaaaatacttaaatgttatgtatatggtggtaataagggaaaaatcaagtattataaacaagaatgaaggtttttgtaaagatttctgttcagcgttttgcaaggtaaaattttaggcaagttttccctgaagttatgtgtatgtgagtattctcattcttcccaacttgcctttgaagagtgaaataccattattatcaagtagactactgttcagcttttattcctgccctgctgtttatcccttaagaatgagtttcttagacttttccaatatgtgattttttttcccatttagaatggtgattttaaatgtgtgagtgcatgtactatcttatctcagatatttgcacccccaatctgcccccaactcccaaaagctagaacactgccaactgatctgttataggtcctttagaaacacataattaacacttaaggttgggtgctgctaattctttgcaaaaatccaaatattgttaagggaccagggagatgccactaccccttgattttccatctaaaaatatacatgtttatgtaaacaaatctttccatatccatagtgacttttcaagtatttaagcctaaagattttgatctcacatttttatacctgtttaaattgctcacagttattacatacacatcagccatcaactaaagttgtactttaaaaatttactacaatatgtacatttctaagtcaaacacttgtgacttttgctttaattccatgaatgttcctgcctccttgatatttgtatttattctttttttctctagagtagaggtataattgtgtgatatttcagaaatacagataaatgattcaaaaagtcacagttaaggagaatcatgtttctttgatcatgaataactgattagtaagtcttgcctatattttcctgatagcatatgacaaatgtttctaaggtaacaagatgagaacagataaagattgtgtggtgttttggatttggagagaaatattttaatttttaaatgcagttacaaattataatgtattcatatttgtactttctgttaaaatgcatgattgcagaattgtttagattttgtgtttattcttgatgaaaagctttgtttgttcttgtttttaagtttgcactcaaatcttaagaaataaatccacccatgttatcaagccaatttgtacttcattatgcattgagataaaatctccaagtttgaagattattaaccaaacttttaaacacatatttttaaagtactcatctccaggtttatggaattgcattaagcagttaaaccggcttgtatagtcccatccattagttcagagtatttgaatcccaaactgttactttggtccagtcaatagagtaaaacccctttgtaacactgatactttgggacaaaacatggattatcagtgggcgctaccaaattataactgctacttttaggctaattaatattttagagagaaattaatttgagttatatgagggtgtgtataaaatggcattaagagctctatttcctggctttgccactgtagttgtgtaaccttcagcaaattaattaacattttggagctgcatttcttcatctggaaaaattgggttgatggataataggatctgcctaataggattgttgtgagagttaaaatgtaaagtgtttagaacaatagcttatgttagctattattatcataattattattgtacctagacactattcatcagtcaggttgtttaaagtattgactagcatactcagggccttaaagaactgactgcccctgaagattttgtgaaaaaagttctagatctagaggtcaggagacctgggcttattgacactagctttgtaaccatgggccaatctcataaccttagccttagccttagtttcttcttcccattaaaaaacaaacaaacaaacaaacaaaaattcaaaaatgatgccttttgcaaaaagggaaagacaaatgacaaaagaaatagggaacatgatagtccttatggtccatcatgtctagctttagtattgtgatattactgttccaagctctattttcttaaatgatgccctaggttctgagtttcctatagggctatgaggctatggatcacaagaagttgaggattctactaggtataaggagtctgtgactcttttttttttttttttttaatgtatttttgtcttgagatagagtctcactctgtcacccaggctggagtacagtggctccatcatggctcactgcagccttgaactcctgggctcaagcgatcctctttctcactttagccgcccaagtagctgggactacaagcacgctccagcgtgcccagctaattatttttttttttttagagatggggtcttgctatgttgcccaggctggtcttgaactcctggcatcaagcaatcctcccacctcagccacccaaagcgctgggattacagatgtgagccacagtgcctgacccttaatgtttttttaaattttaatcagggttttgcacacataatgtaaaggagtgcttccaaacttctttttattgtgatccacaatgctgtgcacacatattttatgaaaatattttgtgaaaaaacaatactaatgagatgcacactggttttctattctatttcatttatttaaatgttggctcttactcactaaattgatttaattaccctgtaaaatagtgctgttcaatagaactttctgtgaagttgaaaatattcagtatctgcactatccactgtagtagctgccagccacatgtggctgtggatgatttaaaatgtggttattgttggccaggcccggtggctcacacctacaatcccagtactttggaaggccaagatgggaggatcgcttgaggccaagagtttgagacaagcctggttaacgtagtgggaccccagctctaaaaaaaaataaaaataaaataacaaaaatttaagagatctttaaaaaattaaatgtcgttagtatgaggaactggatttttatttttatgtccatattgggcagcatcactccagagagattgtaagtcatggtttgaaaagcacaggtttaaaggctgctattctacaaagtctctgaaaaacagctatccactgccttcatcctccccatttcctctgcctcagaggcaaccacttttaactcttaattgattgttttggtgtttaccatcttgtatctaaataacatgcttgtatccctgcttcttgattttatcaacttttcagtgtacacagggacacctctcatcctctcaatataaatgcatagttagatcaataagtctttacattataataactgctattcagagctgaaatgtagtgggaaaacaagtgattcattttcttctgcacttttaaaccactggagctaataattgtgtttctttcacttgcttggttttctatgtacttaccgctaattctaccgcaggctctccaactaattgcttaaatctctgtagacttccagataagaagaattctaacaatttcatctggaagaaatctctcctagaaccagacgatttgccctcctttccctggtgcagggtcattatcttggcatctaccttcaccgtcatcctgagacttaactttacctttgtcgtgttggatctcttgttttctgtattccacgtctttttctcacttggattgttacttctccttgatagaatatattctacagtagcttactgagaagggataaatgggaaataattggagaccttaattgataatttgttgggtataggattgaaaatttcctctccatgttgaaagcattattccattgtcaataagctttccgtcttctctctccaacaggaactttccattctagtttcttttttttttttttttggcctttagaccaatttattttatatccttttaaaatatcatccaacaaaaagcaatgaagtttacatctagggcagatacacgtaactcaaggcacttgtagtccatcatgcccattgaataacaactttgctgttgaaacttcttaaaacttaccaagttaaaaagctgagtgatgcagaaggagtagtattttagtgtaatctgtaaattggcttttctaagaaaggaaatacatcctgtttccctagatgggtaaataagcaagagctacatgcagcagtgtcagtagtaagacatttctcaagtcttttcaaatgaatcaaaggtgggtatgggataggagagaaaactgatagaaaaacattgacaccataacaatatatttagataatttaacatttgaaaaggcaagaggtggcatttcagcagcaaagtgcttaatgaagagtacattgtggagagtcatacaagaaagtatctcatgccagtcagaatggcgattattaaaaagtcaggaaacaacagatgctggcaaggctgtggagaaataggaacacttttacactgttggtgggagtgtaaattagttcaaccattgtggaagacagtgtggtgattcctcaaggatctagaaccagaaataccatttgacccagcaatcccattactgggtatatacccaaaggattataagtcattctactataatgacacatgcacacatatgtttattgcagcactatttacaatagaaaagacttggaaccaacccaaatgtccatcaatgatagactggataaagaaaatgtggcacatatacaccatggaatactatgcagccataaaaaagaatgagttcatgtcctttgcagggacatagatgtagctggaagccatcattctcagcaaactaacacaggaaaagaaaaccaaacactgcatgttctcactcaagtggtagttgaacagtgagaacacatggacacagaggggaacatcacacactggggcatgtcgaggggtgaggggcacagggagggagagcattaggacaaatacctaatgcatgtggggcataaaacctagatggcgggttgataggtgcagcaaaccaccatggcacatgtatacctacgtgacaaacctgcatgttctgcacatgtatcccagaacttaataaaaacaaaaaaaggggctgggcatggtggctcacgcctgtaatcccagcactgtgggaggccgaggtgggcaggtcacgaggtcaggagattgagaccatcctggctaacatggtgaaaccctgcctctattaaaaatacaaaaaattagccgggcgtggtggcatgcgcctgtagtcccagctactcggaaggctgaggcagaagaattgcttgaacccaggaggcggaggttgcagtgagccgagattgcaccactgcactgtagcctgggcgacagagcaagattctgtaaaaaaaaaaaagacggcacataaatggttcagcagcgggataggtaaaggcctcaaaggaaaaattatgtcctcggtgtcattgttctgggaggaataacacattctgaatctttaactgtctggaataaatttagttcccttgtatttacatatttgaagacaatgagtgaagcaatatttccacaatagcagtaattaggaaatgtatagccttcgtgtaacagaggtgtatatagcacctctgtagatgtgctcagcagaagagttttaagttgttgatataacaaattcattgtgatctttactccagtatgttctccagtatgttaaactcatctctcccagtggttcttcaccctggctgcacttaggaatcacatgggaaggttaaaaacaacaacaaaacagaaaaacaatttccatacctcatcctccctcactggccaatggaggccatcctgctagatatttcaattcctttattagcatttatctttaggattaaataacaaaataattcacagaggagtggacagtcttcacggttaaccaaggaaggaggctcctagttaactgttggctcttctaactcttccttcttggtaggatcaatttttctttcactttggcaggtgtattagtctgttttcatactgctataaagagctacctgagactgggtaatttataaaggaaagagatttaatcgactcacagttcagcatggctgggggagcctcaggaaacttaaaatcatatcagaaggtgaaggggaagcaaggcaccttctccacaaggcagtaggaaggagaagtgccgagcaaagggggaaaagccccttataaaaccatcagatcttgtgagaattcactcattatcatgagaacagcttgggggaaactgcccccatgattcaattacctccacctggtctctcccttgatatatgaggattatggggattacaattcaagatgagatttgggtggggacacaaagcctaaccatatcagcaagttagctagctatttcctttatcactaaaaagaatgagagattctgagaggatgagatatagaatcagaacatttcttggaagacactcctaagggtatcacaaattaaaaatgggctctagtggtggtggagggacacttgggagtgctaaacaccaagtttcccatttcatatttttgccttgaggttataataaatcaatcaaacaaaaacaaagggaaaaaggaaaagagagagtatgctgaaattcacccacgcatgtgtctctccagagtgacttttgcagtagaaatctgaaaataattattttgaggttcaggtatttatttttgcacctggctatttgctagcctatgaagttataagaagcttcaaattagatatacatatacgtacatataaattacagacatgtcgacatatactttcttctttatggccaactgctcttcttacatatggctttctcaccttagctgtatcttcgacattccttaccatagggcactccatgccccacattcagtttcggatgttgaatagcatgtatcaacataggaaagtggcaatgtggctctccaggagtaggtgagggacaaggccagagagaaaaatcaagaagccctcctgcctagatactgactgagggaggaatatagaaaaacgagctgaaatcgctcaagtgtgctccccagccttcctctaggtggcatcatttctcacccagatctacattttattacccatcaagattcatggtggtgacagg

SEQ ID NO: 94884 - DNA, 121157 bp, Homo sapiens
  misc_feature (1)...(121157): n = A,T,C or G
tgttccaaaaagttcctaacaatttacaggcaggaatttaaaacagggtactgagtacttacaagattgctggaaggtctaacggtctatttcacaagcgtagttccagaaaaatacagaactgaaactttaagggaattactatctttgatgtcaccagtagagctctgccagaatcaaaaacctgctcttttctcctctgcagctgctgcagctgtttctgaatacctacggatctagatgaagagcatccaatagctgtgacccagtgattagaaaccagatggggacgctgctgttgttgactttggtgggggtagcacatcacttcctcttgagacctaggaaggtggaaaatgagcactgcagaaaacctcatatatacacatagtttttcagcccacttttaactgccaaacttcatatgagtgcatctacttggtgacatctaatccacatggcaaatcttaggtacagaagattccggggtgtaatggaagtgaagcaagccaatccatagtattagcacagtttataagcactatatagtattattaactacctgattctgcataagactgtgcaaagacactaattttggggaatcctctgtctaccactggaccttagaagcagggaaagagacaaagagaagattcacaaagcagaaaatgcatatggcttataaaattatgagaaaataatttttaaataactcaatagtaatagaaaaatagacgttaataccaaatatctttttctggcctatacaattgacaaatgtaaatttgagacaatctgcagctggtgacagggcaataaaatggacacttttattttattgaccattggtgagagcataaattggtccaaatattttggaaagtcattggacaatacatgttaagaaccattactgatattcatacactctgactcagtaattttacttctgggactctatcataaattaataatcctattatattgaaaagaggtttatatttaatgatatgcattgtagcatcatttataatagggaaaatttggaaacaacctaagtactagaggaatgattgagtacattttggaacatatacaaaattaaatattctgtagccataaaataatgcataagtgaagtggtaataatgtttaccagattcttttattttaatccattgagcactacaaggaaaatgcctaagacctatgaacttcccaaggatctgccaaaggggtttgaagcctgacaaaagttattggcttcaaaatatgaagataactgcaaaattaaagtctataaatgtctaagtaaatgtcaaaaaatgtaactcatcatttttatagattatttcattttgtgttcagaacaattttgacacattggaaaaatggttggttagattgtatcagttggtaagaattctttagtatatataatctctgctaagaagcataactgataataaatttcaaaggcaaaattttaaaatcgtctcaaatttttagcaaaatatatacttatttgacatgggatatggggtgtgtacatgtcaaagtatatgtgataaaatgtagagtggagcttctaaaaacaagagtgccatgggattagcatggtctaaagaaatgccatgttttgagcacccaccgtgtgcgacacttaatgtacatcattctttttaatccccacaacagtgctgggaaatagttctgtttatcataatttctttcatttgaggaaacctagggctttagggaaattaagtaattaacctcaggtcacacagctagggaatatggtgatggggtttgaaggcaggtcagcttgactccaaatcctgtgcccttagtgagaacataggtatgtttccatgtcaaattaaaaaaataagtttacaaaattgtatacctggtttgagtataactttggaaaaatacaggattcaataaaagcaaaaatttttttctgttttttactgttctgaattttctaacatagttttacaacaatcaggcaacccgtattaatttctaaaaaaaattgatcttagaggagtttgataataatgttaaaatattgacatcttgcggccgcgtggtgtcattacaaccttggctttactttcagtgtgggagctgactactagagggcagcactgaggtttattcgggtcacgttttctgggctgaatgtggcagaaagctgggtcacttctccactcaaaactgaagaaaagcaaactcatttataatgccataaatacacacacatatatgtcaacaaaataacgtatactgtaaatatacagcgtaatacacttcaataacttctttgcatcctgaagcagtatagcaaagttattcagcgtcaggcccaggaactatgctacctgaatttgcatcatggctccaccatgtatcagctgtgtgactttggccagagcacataaacttcctgtactttattttttttttctctatctctaaagtgagaataagaattttccctacctcttagggatgctgtgagaaataaatgaagtaaggctaacagtgccagttgaaaggagatgctcaaaaattggaaattatcattttgcctgttgcccaaagctattctacttttatgaaacaatatatgccttgttgagtactataagtatttgtttagtactataagcagacggagaattttgttattactactgaatcagaaaaataactttctgtcaggtagggttaggtgaaaaatctaaaggaaggtcgagaatcacagttcagagccctcactggaatgaagcaaaatgtgtaagtttgcctaacatcctttcttgtagttttcctctctcattctaatttatctttgtccatcacctcccttgttccccaggttctcacttcccccaggacaaggagctacttgtccaagccttattctggatgattaactagaagcacaccattctgaatcatttttatacctcatgccccagccctgcatcttagtctccaaaggaatgcaaggatcctaggctaatattatgtaaggccatttcccatgatgtatgtaattaggagttccctgtagtgtttagtagtaatatatgtatatataaaatgtaaaagcgctactttttttctttgcaactaatgttaagaggaaagctcaatcgatgtgactggcttcacagttttgtggagggagagggtgctattttggattctttcattccatggcaccttagggagtaaagatcatacagagaagatgaaattttgtaaattgttaggctttgatattggaaacatagacaggaactgatacgagttccaacaacatgtagtagaatccgtgaacattctggtgttgtaagtccatgagaacactaaggtcaatacttaatcatacagtgtgctgatgtttctgacatagcagttctaaaaggtgtataggaataattcttaagtttgtactcgtgaatggatttgaagtatctgtataattttagattcatgaggaccccaaatggttttagatttctgttctaaaatcatctttaattatactataactaaaacttagagatctaatgggaattcttgagtgtatggataaatccaatgacccccatactgtgattaagaggcagtggttaagagtcctgactctaaagctagagtacttattttcacagatggctccaccagaaactagctgtatgcgcttgggcaaattacttaatctctttgtgcctcagtttttcatctataaaatgtggatgataataatacctaccccataggacagttgtgatgatccattgagctagtatatgtaaagtccgtagagcaacaagtgtttgtggaactcttaatcaaaagaagcaaattcactttagaaattttatttatgtgctaattcccagctacttctacctataaatttagaatcttatgtctattcaggattttggaacattccttgaatgatggtcccttgaacatcctagtcctcatcagaaccttctcataaaatccatactggggttgctcatggcaccatgcagcactacatagagaatgctaactggggccctcacttgcaccagtatttccatcaggtcacctgaaattctacaattagggattgtttcctttgggtagtcacggtgtgtttctggagactctattagagtgcaagcagtctttggagggatagcacaagggtgcattagtggaatatatcaaggataaacgtgagctttcttggagccaaatagtcttgcgtttaaattttctggctctattacttactagaattagagtgtctgagttcaaattctgtctctactgaccagtggctgtgtgatttttggtaagttactgtaacctctctggatgtctgggaattcaaatagtatctatctcgtggggtcactgtgaagatctaaggagacagggcttccaaaaatgcctgtcacatcattggcactcagtaagtatgattattgcctaatttatctcagtcttggcatcctcatttacaaaatggaaagaatgggtaatatccaccttcatggttgttgtgaacataaagatgtacatataagtataatgtacatataaaatgcctgtcatacttaaataaaaaactgatagatagtaacaagtgttggtaagaatgtaggcaaaaaagaaccctcatatgttgctggtgggaatgccaaatggtgcatatactttggaaaacagtttgccaattcaaaaaatgttaaacatagagttattatatgacccagcaattccctgggtatatgccaaagagaaataaaaacaatatgtccatataaaaacttttacacaaaagtaataaaagcagtattcataatagcccaaggcggaaacaacctaaatttccatcaactgatcatgtggtatacccaaaaaagtggaatattatttggccacaaaagaaatgaagtactgatacaggctagaacatgcatgaaccttgaaaacggtttgtttttcaaacaaagtgtgtttggttttttgttcttgcgatagtttactgagaatgatgatttccaatttcatccatgtccttctttcattcaaacaaagaagccactcgcaaaagatcacatgttgtatgattccatttatatgaaatgttcagaataggaaaatccatagagaaagtaaattagtggtggcctggggctaggaggaggagagaaatggggagtgacttttaaacaagaatggaatttctttgtgggaataatgaaaatgttgcacaagcttgtgaatatactttaaaaaaaccctaaattatatacttttgtggtagataaattatatctcaataaaactattattaaaaaacatttctcatttaatataagtcatttttagcccttaacacctcagttctcacgttgggaatccagaacagggccctgagtgaatgatgcccaggacagagagggacttcttaaggaaaaggaatacatctaaagtatggggaaacaatgtctctgtacaaaggtgtagagggaagtagggagtctctcttgggaggaaaggcagtgaaggcacttaaggggaataggagaaggagacaaaattcacctgctttgaattttgcagggagccagcctggatcaccttttatattctgggctggaatcacagctgatgaatgttttggcatttagaactgtcctggagaaagggcgattggtggttattagacagaatggaacaaggaagaacacagaggcaaaatctgagagtttgtgtctgactttgaaaggtaaaagaaggcagtagtctgtggaggacgtatttatccagaggactctatttgtttgttaatctctgggtcattgcatttaggtcagcactaactctgctacaggtgggatcaatttaaaggattagaagtgtcactctaaatcctaatccaagtcttggtctgcggatgctgaagagtgattttcaaaacatttactaacgctttcaattatttaccccattaatggaatttgtcaacagactggagtccttgacaggattgtgaatgcatagaggatgcaaagaaatggacacactgaggtagctatgccagtggtctgcatgygcaggcagtaaactgaagacatttgagcggtgaattacttggtgagtagttgacagctcttgtttataagaaagattgtaatggggggaaaaaagacacagcccacctgggagctgagacgctgattgagatacattagttttactgcaatatgtagtaaaaaaaaaaatttaaagaatgaaggaaagaaggaaagaagggttaaagagrgccttcgagatactttaagtcaagatttgagctcaaaggctctcatccaagctttcgtttagtttctctcatgattctttttttattgcttcctgatgttgtcwtatacaagctgttaacttgattcaggctgtaattagaaagacaaatcaatctttcatagaagtcctcggcttgacaagctggtatgaggagccatttccctcagagctatttgtcatagtctttctttgtacatgtttaacgaacggtggttttctgtgtgaagccaggcttcccatcagattgtaaaaactacctgaaatgaaattatgcatccctatgctctagccrctttccatggaagtctgatcccatgcaggtgttcacacctgagtaacctaggcaatggccccagaacaactgtgggccagtagtattctatttccaaaatttcataccttcaaactttgttttagttatatccacatttcccattaaccccaggaaagactttagtgagctaatttttttccttaaaccaaaatcagcaggtggaggtttagggcatcctccccctatcttgcccctttctttccctccctccctcccttccttccttccttccttccttccttccttccttccttccttccttccttccttccttccttcttctctcccttcattcctccctccccttctttccttccttctttctcttcttccctccttccctctcccttcctcccccttcctcttttccttccttctctcttcctcccttccttcctwccttcccttctttttttcttttttcttttttaaagaataagtttccttctgtaaaatcttgagttgggggatcaagactaaatcctacagcaacataaaactttctggttgtccagggagtcctaacagagttagaaatatcaccaaatgcatcacatcggtaccagaaaaaatgtaagggcagaccttcagcttgggaaatgtttatcttgcagttaacaaagggaaaagagcaacaaaaactgagagtgaatgccaagggacactttgtggcatgtggcctgaggagggacccgtgttgtatgaattttagaaatggtataaaaaatctaactttttagaatttggggtgggcattgtgcttaggagttacctggattataacacaaaaatgccagccttacacctagaatggacagttaatcactttgatctgaggggcaccaaaagtttcttcatttttttgctcaaaaagtagtccatcctcctttgcctacctgcaactgatgcttgaaatagacattatattattagagattaattattttggcataaacttctccccagcccttaagagagaacaaacaccactggttggggaggaatacaggaaagtgtcaaatattatcattcatttacatattagtgcaaatcatttaaagagtttctttctttagagttgttttctctccattaacgagagggcagagagagctgtgctagaagtctgaagacaaactttaccccttgataattttgccaaaggtgggtcttgattaaggcctaaaatagagcattttaaataacatggtaatacaaaacattttatttgtgctccatatctcctcttcagtattaattcaacatatattttttgcgcacctactatgtgtcaggcactgcgaagggcactggagatttaatgttaagcaaaagcaagcagggaacttactaacttggttttctccctcctgaggtacatgcttgcttttcttgtttagatttcttggccaggcccttatactctcccattttttttttgtagttagtcttagcacagaccaacttctcaacgtgtgtttgttattaatgataataagataaccagtgattttaggagcccaggttttcagtgtagcataactccagcattgtcggggagtggggtcttcacatcacagaagcttgacagaggattccaggccaaaattaaaaatgatcaggaactggatctaccagatagaagcaagtactttgggggaatccaactccagtgagaagctaattagagcagcaaaggctagaaaatgttgaatgaactcagcagtttcaaagtgcagaggtttagaaaagtaactgcctagacaaagtacagaatcccaggatggatggaggtcagagaataaagggacttgctgatctgctagtccagctaaaggggaaaaaggagagacctagagtaggcaacaatctgttcaggtcacatggtgagttggtgcagaattgggtccaggaccctggccttctgattcccagtgcagtcctctttccaaatagggaggaagaaccagtgtttattgaaagacaactgtgcacttagtattctaatttatttacttctttatctcaaaatgattaaattaaatttacccccactttgcagatgaggaagttgaaaattggggctaatatgctgaagggtgtaccctcaagatttccattctcaaagattaggattagctttacatagaatacagtggaactggtgctccccacccccagctgtgcagcactgtgccctgagtgaggagtcagtgggcagtcccagggctaggcttgaacactagtagcaaattacttctggttggataatgaatttcttggtggctcctcccaatttactctgcccctccccaactctacctaatttattctttcatgggtgactggggaacttctttaaactgcaaatgaatgattcgaactcagtttgagtaacatagcaggtataataatggtagtctcattgacttcatagatgaggggctatctgcagaacttctatctagcacagggctcaatcaactggggtgcaaatctccattctaccgtggtttgcccttaggcaagttacttaccctttctgagcctcagtttcatcatctgtaaatagtgatgataataacacctacttcaaaggactgtgatgagttttttaaattcagtttttaaaatgagacaatacayggaaagagtgtagcccagcatttgacacacagcaagaactcagtatatcttagactttgttagtctaagtgctaatttctggattaaatgcacagatactgggaaggaacccatgaaactagtgtgtttggggaagaagaggcagtatgtcggctttcttgccctgttgctgtgaatagggttttgtttcccatatagagctgtcctcactgttgcacattcctagtggtcaaaagagtgaggcctataaggacagagagataatgtagttcaatatccttgtcacaatacagaccagaaatagagatccttcccatattactccagatgagtggctcctacagtgtcctgcctcccaaattttgccatggcagagaaaagagggaggctggaagaagctggaagagaagcttgtggctcttgactagagctcagctctgggttgggagctctttgaagcctgagtcaacacctcacacttcatccatcctgtatctcactctcatgcattcaacatagtgcacagaatagatctaattttttggaggcaggttagactggattatctttgagggcctaggaataaatttgaggctcttatgcatataatcagctcagaatcatctttccactgtccccaaagcaaagttagaagtcctcccccatcccacacacccctcagccactggcttatgttgttttgtgaactgtttgctcccccaagactttcttgactctcattcaaatcagctttcaccaatatacgaatgttggggcatactatttgtggtaggtctttaagattcactagatatgcctcagattggtctcttcaggagtcaaggtttctcataaaattaggagtgagagtcaagataataaccaacagggctggcacagacagaattgttgctgcccataaacaaccagtttggcctgattggtgcacaccagcgctgattatcagccctgaagaaagctatgccattattttgatctttgattagaattaaggatttactaaggattctccttattaacatctctgtgacctatctttaagtgttgtggggtctcagggttttgtcctttgtcttctttctttactccacaaaaggcatgttttaaattaccctctatcaattgattacactcaaatttataactcttattcagctttctattaagaatttataactcttgttcagctttctatttttttcctaggccctccagtatgtgctgttatctactggatattgccacttgttggccaattcaagatctctatcagaatgcatcgtctctcccacctccttcctccagtgtttcctatctcagagacttgtgccattttccaatcagtttcctaggtctgaaaagctcaaaatcatcctagagtcctcctttcttttcacttaccttctatatcttgtcagtcaccaagttcttgttatttctgttttcttaatcttgatatttttaatcttggaggagatgatcccattcctctaggtcttcactaccactctcttggtctgtcatcatttctcatatggattattgtgacagactccaaactggtctctttgcctccagtcttgctttcttccaactcattctccacattgttgctagagagatcctttaaaatggaaatctgataatactatttccctgcttaaaaccattgggtacagtattcaatcatggcatatcttggtgatctggcccttgccttgtctgacatcacagactcaagcagaacaaatgctttagaattctaagaatccatatatatatgtatacacacacacacatacatatatacacgcacatatatatatacacatatatatacacacgcacatatatacacacacacatatatatatagtctgtctatctatctatctatctatctatctatctatctatctatctatctatctttacctctgggtctttctgcatgttgttccttctgtttggaaggctcttagcatcttagcaccaaactactcctgcaacttcattcacctggctaacttttcttcagtactcaatccagagagactgttcttcctcccttctctcctcccctgaaatctgggtttaggtgatcctctctgtctctctgtttgggctacctcaatcatagcactttttactctgcattgttattatctgtttacatctatttctctccaagagagctgtatgggagagaaaaatggacatattgaaaactataataatgatactatgtctaatataatgccaatgacttgccaggctctgttataagcacttgccgtgtgttaactcatgtaattttcaaaacactgtaaggtgggcagctattactgaagttgaataaataggaattggtgatagattgaatgtgggggaagagaaggagtctcagtgatttccagttttctgaaagaagcaagtgggcaaacagtggatggatgtgccatgtactgagatacggggtacaggaagaggaggagttttgtcaggatgggggaaagaaacttttagtttgggcactgccatttttttttttttttttgccattctttcacaaccgatgatttccagaagcttcagaaataatgtgagtaacaaaccttttcctctgattgacaggcatttggaaacaccaccgtctgtgtcgggaaagcagaataactctccagtatctcgtcattagcttgctggaagcaggagggctatgttcctgggactcgggcgcttttctcgccttgttctctggtttgcggctttcaggaaactgctgggacaccatggccttgcatctgccaagttcctgtggtgcttgtgccttctgtstgtcatgtcccttccgcagcaggtgtggacactcccctacaagataggggtggtgggcccttgggcttgtgattcgctgttttcaaaggccctgcctgagsttgctgcgcgattagccattgagcgaatcaaccgggacccatcttttgacctgagttattcttttgaatacgtgattctcaatgaagactgccagacttcgagggctctctccagtttcatttcccaccaccagatggcctcaggatttattggacctaccaaccctggctactgcgaggcagcctcgctcctgggaaacagctgggacaaaggaattttctcttgggcttgtgtgaattatgaattagacaataaaawtagctacccgaccttttctcggacactcccttctcccatccgggtgcttgtaactgtcatgaaatatttccagtgggctcatgctggagtcatttcctcagatgaagacatttgggtgcatacagccaatcgagtcgcaagtgctcttcggagccacggcttacctgtaggggtcgtcctgaccacaggacaagacagccaaagcatgyggaaagccctccagaggattcaccaggcagacagaattcgcagtgagtgctttctcccgctgaaatttaaacgtgacttcagggaaagagattacaatctccaaaaggtttcctaccctcacaccctagggtagcacatyccttcccatttctttacacatttgccctttttcactcacacacaggtcccaagactgccctgcttcaacagagcctattttatgaactgaataacagtacaaagaactctgtgcttcatatgcctgtgaatgctagtgcctgctcttagcgcctgagtgaagaatggtgtcaagagcactgtagccatacatcctttctttctgcccttaggaccttggtagcttcgaaagtgccaaaatggtatggggaggcgcgggtcttcttatggcttcatttttgtttgttctagtcactgaggagagatttacttttgactcccttctggatactttccttcaacggtacccagtgtccttgtgggacacttacttagaatctgtcttctgtggactccgaaatgtccataccttctgccttttctcaaagcagggcttttctttttgcagcacacagttagttgatatggggggcacctagctgatgaatgaaagcatattaaaatgaaaagactgtctaaattttaagtttccccttccaatggaagcttaatgttcaaagacgattcttgcagagacgatagacaaaatgtgaagcaaaggacttgacccactaaagctatcattctcaaagttagttgggtgcattttggcaaaagggggccctttctggtcctcttgaatcagatctcttttactcacacttatggcaagcccttgtgacacctagttttgattttttctattccaattttttaacctccattttaccttcctctggagatggctatgattcatgggaacgctgctcattcccccactgcagccactccaccactttaggatggatatctcagaaactatttgacaaactgattccttcaaggattagtcctggtcccagtcatttccttaaccattgttaaggaaatgtttgttagagaatggtccagcttaggcctggcctataatcagaagcctgttttaagtttcaagtggcttcagtattggaccttaattatgatgatcacaagaggatgagggcaagaggagtttttagttccagaactacagtaatctgcctccagctccagttgacaagattccgtgatgtttagcaatcagtatggctctgattacttcataatagagcttgatactttcaaagcagagcatagaattattttgaaagacataaaatcatttgcaggaggagccatgccagaaacaggctaatatatttagtatcataactttataataggttacaaatcttcttgaagcccaatgtctcctgcaagtttatattccatgaatgtttcacatcccacccatttgtatactttgaaatgacattttggcctctaccataaaatgttaaataaatccaggccctgaagctctttgggctgccagactgagaagaattaggattgagtgctaaccacccacaacccstttgaggcagggagggagcaaatgcacatattattgccctaccattagagattcctttacgtcaagggttctcagtgtggctgcatgctagaattacctggacatcttttcaagaatactggtgccacagcgccacctccagaaattctactagaattggtctgtggtgggtcccagcaaaggtattttaaatagcttcccgggcgcttgtaacgtgcagccagagttgagaaatgctgctttcacttaataataatcaaataaatatttcttgctttaagttcccattrttttaatatgacttcgcttagtcagattgttttctttattacagtacagatctgctcactaagggaatggaaattttgaggatgcagagaaaaaaacccagagaggatggttatggagcaaacgaagaccttgaatagcaaggacagcaacaggaagtggaggagggattcagaaagagagattaaagggagtgaagacaaaagctctgcactgcaggattttcctttgttttttgacaaaacataggcagattcagatgaggcatgctgggacctcagtgacatgagtcagaatgtgggtggggtgggggcaggggaactgagccattggttgggctgtggcctgagtacaacctcaggcagctcactgtgctttgttcaaaggagtgtgtaatacccatacatggtacaggcacatgtctgtatctgagggcatgccaactggtgggtgaggtgtgacagggggaatggtggaaggggagtgagtgttaaagtaagatagaccttgcccttgttgtccacttgatcatttgttggaaacaatgccccaacccatgggaacatgtaaagcaggatccagagaatgaacaaaaatagattatcagagctttagctaagtggcctaagggtcaggccacatcttttgtcccattagaaaattggagatttggtgagaaaccaagccagaagccagtgagtacagattgggtcaacacatcagtgaggaagactgcaacacaccatccgtagcacataccggatcaaatctttagctaattttccagctcctctcaactgctgggactgaggctgctaagtattcctggatgttatctatctggactgagaagaactaaaaagacaacaaactttttgtgtgatctcagctgagaaggtctgaggaaggcagagcctgacttcttccctacttggctggatttgaggctactttttaacactgtggacccccaagcaaaccttcagagaggacactttgtgacatacaaaatacagtggaaagggaccccttcctttggaggggcctagaaatatttggaagtagtaggaataattgggaggtttttttttttttttcctgatctgttcgcaaaagcagtgatggcattgccacgtggccgtagcagtggtggttgtagtgatggtgtgggaggggagagaagagcagcctattactggctggtatgacacttctggttcttataagttaatatttccaattaggaactctcattggcaacttactggagttagaggaagcgcctttctcagaaacaggtctaatttgcacttacataatatcaatgcaatgatagatttaatagtaggcaataatagcaataataatagccatgcactcttgggtgggaaaacagcagaggtgttactatatgctgccatagagacaataaaagcaaccatactattactttacgtgtaaacagctctctacattttacaaggcatttgcacatagatctcaattaattctcaggattatccaggagataggcattttctttcaagttttacaatacctgtgagtctcacagtaataagtacatatgtgtaagcactatcaacactaaagaaggaataaataaagtctcagagtagggggattcagcctctcccagattctcaactcaattctcttaagccttgggagcaactatttctttgctttgacaaagtcaaataggagagttattaatcaaagacaaaggccttaatttatagtcagggctgctgtgtgtggttatgtaggttgtgccctgcacaaggaaacctagctgattggacttgagggccaaaatccagtccagtctctgctcctcaaaccatgaaccctgttggaagtttttgtccaatggcacaaaaggtcatttacttaccaagcagggcacctgtagggttgcattcattcagraggggttcctcttctaattcctgcgaaggttagcaggaggccctacctgcagctctttagagaacttttcaaatggctattctaagccctctcttctcctcgccttcttgctgatcagccctgtgcttggctgattgtataatcctttcaatctgggcttaccgggatgttggaccatttgggatttcctttcaatccttccaaattgggaatgcttcattacaacatgatgttaagtaaatatgacaccattggaatagccttctcttgctcttccaaaattaggtacctgattgctatcttattgcctgggacagaatggcttcttctcatttattgaagattcttgtatataagaaaaagatagcaataaaaataatggtaatagttaatatttattgggaatttactatgtgctagtaatttttcaagggctttgtatggactatgtcatccaattattgcatcacccctattaagtaagggcaattattgtttacctactttatgaataagacttccgaagctaaaaggggttaaataacttacccaatgtcatacaactggtgaatgagaaagccaggatatatattcggagtagtctaaagcagtggctctcaaatctcagtgggcatcagaatcccctggaagacttattaaaacacagattgttgggttcctcctcctgagtttctggttcaggaatgctggtgtggggcccaagaatttgtatttctaatactgcacattctcaggtgacactgctgctgctggtccacggaccacactgagaaccactggtctattgatagaccaatactatactacctcctgaagcatactcacttgagatcctgtgttctatatgtggcatataattcagcccttccacctttctttcttaacttttggacccatagatacaattcttttatgtgcctcaacgtaccaggtgtcagccctgttttcctatactgataacaacagtgatactgataatactatgactaggagccttagcatcaatagggaatttggtataggatttggtataatgtaacaccaaatgtaagtaaatataaatggcaagaggacaactggctttcatgaatggcaaatgatcactaatgatcaaattattgaaggcttgacacaagaggaaatctctaaacatctagacttcttgcatttaagaggccttatgtacatagcagtttaggaaaaacaggaggaaacatatgtttcaaggtatggagaaatataaaaccttatctcaagctgggcagcaatgttaaggcaacattgctgtacaaattgcaatacaagtttgagtgtggaaaaaaacatggtctgatgcagatggaatagtctttgaatgttatatttgtgtgccatcatgctgagctacttggaccagttcaacaccagtggtagttaagtaagtggtagcttcaggacttatggccaaaaacgtgtggggtatccttagctgatagagatagccacacatcacctagtatagtgttccaaaagtctactttgagagcctcctgcactgagtcacagttggggatggggcctgggaaacatgcactttccagagcctcccacyttcctcttacacagccatttattaggctgggtgggagaaaactgagagggagagtgtaggaatgtgcttctttcacaatatggccagataggaaagaatcctgagagaagatgagacttgggataaatctgcmtgctgccctcctcctctggtctgcctcccctccccgccctgttagcaactgttcaaatgaatgacagtggcaggaaatatcacaaaggggttacaataaagagcaaagacagtagaatgggggggtgtctctgtggactgtgagcaatatcgatggctcacaaatatgaatatggctcctaaggactyctttagcagcagcaagtggaatcatttccatcttgcaaggtgtgaaactgggcccagtttcctccatggaggacaccatagccagtaatctgagagaaataagtgacctttgccttttcagaaacacagttactctctctcaagaaaatatttgatataatattttaatttaggaagagaaataggaattgagtgacatggaaattggcttctcccggagtttcatggcatttcctgctgctagtgaaagaaagggtcctrgacagcctgctatggttggtgccacaatataaagacatagacactagacagctcaagtagctcagagaaagtgctggtgtcatatcctggtgagatgcgatctcagaagggtgtatttcctggtccttgttttgactataaagtagcttgataggatggaaacttacaaattagtattattcagtgaccacctgttgacccaggccttgtttaggatttaaggtttctgtacactaatcctttcctgacaacaacttacaggtcaaatcccattttaatgaatgtaattttaacataataaaactatttagtaaaattatcttgtagaacagatgtatctacaaatccctgttcacgaagcactcaatctattaaattaagatgctgttgtttgaattcagtatttatgctttctactttaatcatgttcaatggcaagatcttgccaggcaaaaaatagaggagcctgtgattattccctgttgagtttcctatttcttcttctataaaatgatggggacaggttggcctacttggtcttaaagggtcttttcagttataaaaattcggaccctttgaaatatggtcagtatgggtcaatgaaagaaaaataaagaggagagatttagggttgagggtaaggtactgggcatagttaatgatagtaggcatgaacaacaggcatggcagtatctacctgcccagcaaatatcacttccaattgttcctccatcctaacaatcaatatatgcccatatctcatatctcaaggaacccacaaaaaatacccaagtgtacaagctctcttcctgaagaggctgttagtttacaaacattcatctaaacaacattcattgtgtgcataatatgtacaaggatatggaaataaataagacacagttcctgacctcaaggagctcacagtttggtagtagaagctgatataggtaaataacagcaataaatcttgtaagtgccaggataaaaattatctcagggtaaggtgggggctctaatccagtgtcacaagtcagtttccctggaaagcagcctgttagatggagctttgagtgcaggaagcttactgaatgagtattttcaaggagaacacctgtgaggaagagaagacagtaggattgggcagagagaactgaactgcagtgcagccacaacaaaggcctcagccagtcttagaggggagctctagagctggtatgacccttcagagttgtccagaattgagataaggagtctgggctgttctacctccatgtggaattgtcattaggttcagtctcacccacagaaaggggcacagtgtgtaataataattgtttaacagtcagatcttcagatggaaaaaagttttgatttgtagtgtttgctgatttccatagtgtaatcactcccacagtggtcaatttcaagctaataacatgatgttaactggctcacaaaatctctgaaagttgaaccagcaaaagcgaaccccagcacactactgagaggatgtaaccttgagagaggtgcctttccttagctgaggccaactctcagagaaaagtcacctatcagctactaacacacccagcagctggtggaatgagtgcttcagtgctgaagtgtgtatcttgatggcacatcaccatagcacctactacgtgtaatgtatgttaaagtatttgctgtattgcaatcagcaccaaacactagttctatttaacattttccatgcagtaaagtcattttaatattcctttaagtaaattaaatcaaattgtatcactgttgagtaaccttgaacaaatcactcaatctctgatttgcagaagaaagatgctaatactgatctacttgctgaggatactgttggacaaactggccaaccgaagcctctgactaaactcattttccccgcctcaatggacctatgactatactaatttgaccaaactaatttacttttaatggttcagccaaatgtagagagtgagaggtcttcagttctactttctttttctaaatccaactcttgcattgtcaaacatctctggcactccattttcccatgatacaatgtgtgattataaacaagtgaggctgaattccttgtggggctcatgaactagctccaaagatatccttcgagaattctaaggaaggtctgaacatcagaatacatgtagaacctcttagcgtaattattttgaaggagttaatggtcatttgaaaactcatgtcatgttgtggtgtgtgcatatgtgtgtggtatgtttaaataaacttcataacttattagttacactttaaaaactaaaaggtaccagctctagctcaaagggaaactttctaggggtgcttagcaagtgtaaaaaggtgtttgaaaatagatgaaacaatatgcaaatgccaaagacaagtcattgaatgtagttaagcacccttagttcttgagattaaaggttccatataaacatgtataattaatatttaccagtagcaatagagtctttgcctttcttcaaggagctcagaatgcttgccaggcattatctaattaaactactcagtgtacctgtaaaatgcattggaatctacattttaaagatgtgggcactgaagcacaagtgggcttaaactaaacttatttagcatgccaagggtaaaattggatataagactttcagtctcatgatctagctgccatttttcaaccgtggcccccttgaatccactctattctagcataaccttgccaaacaacatagtttcataagtctaggaagaattaaattgagtccatagtaatttcaattacagggaagttagattttaaaaagttggacatctcacccataatattacacagagtacgtccttaatctgagaatctgaaatccgaaatgctccaaaattgaaaacttttgagcaccaacatgactctcaaaggaaatactcattaaagtatttcagatttcagatttttggattagggatgctcaacaggtaagtataatgcaaatattatacttaatatcccaaatctaaaaaaagtctgaagtctgaagcacctctggtcttcaatagtttgtataaggagtactcaacctgtagtaacatttataggtgagtgagttagtgcttttcattgtctataatgaccttggtaaggatgagaacaattggtcaaaatgtattagagtgcatgtttgtaggagatggacaataaaaagcaatagtggctgtggtaacatctcccatcctctcttactattctctcttctaattcttaggtatatagtagctactatttattgtgtgctatgtactaagtaaatgacttgtctcctttcttcaatcatcactaccatcccataagtatatattgttatctccattttatggacgagacagagagcggttaagtaatttaaaaaagggtacacagttaaaactggtggtgttacgatgtaaagctgatttttccaaccctaaagcctcttttgttatgctactccccattgattatactagttcttgttcctgtctgagtattaggctctgcagcctgtaggcatctctctcttgtcactatccccaatccagagtccatgagcatacctcagcctcagctcaggacaacatcttgcttatcttggaggcataagaaaccacttacaaattggttagaacacatttatttttcctctctgtagtttttggtactgtgctttactaacagtttgcttccataacctccttgctttgttggtttcagtaatcatcatgtgtatgcattcagctttgattgggggagagactcagatgcatctcttggaatgtgctcatgatctgaaaatgactgatggaacctacgtctttgttccttatgatgcccygctctacagtttaccttataagcacaccccctaccrggtcctaaggaacaacccaaagctccgggaagcctatgatgcagtgttgaccattacagtggagtcccaagaaaagaccttctatcaagccttcacagaggcagcagcaagaggtgaaattcctgagaagctggagttcgatcaagtaagtacacattcataggttgtcatgagctgagaacctaaaacatcagcatggtaaattattttcagaccaacagtctcaattccatagkaggcccagtcaatggcaggcaaccacagacaaattaaaaacatctttagtttgctgaaaacatttgtgaaacaaaggcatattatttgagattttgttcttttatctttaagcagcccacgatgacattatatagtcaggaagaataaatgtatttaagaacagataaacaaaactttaatatatactggtgctgttcaagggagcctaataaaaataagtcctgtttgtggtgtaagttctgaattaatttaacaataaggcaaaagagctagtatataagaaactatttcctttatttttgataacactggtattggaggatgcggcttctacctgtaggcatttgagcttcccaatactgaacccaaggattaaacaaacttctccatctggccaatggcattgctggaccactgcagtcctgccccatgagggcaggtcttttttaaaatgtgtagtctggagaggaacagcagagcatttgcttcttttaggtagtctgctcccaagagaaagaagacaggaggggctgagctacacatacttacttctccttccaaactaaccagtcagattaattcatttttcctttgtggggaggaatgagtaagtgggtgaagacaggccacttggaatggggaagaagtcctcccttctgatatacaagaaatagtatttatatgtgtgtagataaatgtatgtataggcatatttcagattccaatcatagccactgaaggcttagagaaagaaaaaggagtgaggaggggaagaaagtagagaaaacaatggagagcaaagacaaaaacaaagaggatgaatacaaagaagacgaggaatatgagaggaagatggggagacaaaagaagccatttagattggaaaaaatacagagggacgtttctgtacactggaggtcagatgtagaaagcagacattttcaaaagtacttagaacaacatacacataagtttaaaagctctggcatttgctagaatactgcattagtcatattgcttccagctgtaagaaatagctcaatacaaaatggtttaagtaataattctttttcaaaatttgaagatagggcttcagggttggttaattcagcagtcaatgatgtcatcaatgaaacatgttcatctttccactttacaagccatagcatgctaagcttgccctcatgagctggttcctcttatggtcccaaggtggctgccacagttccagacatcacatacgggtggcaatgtccagaggtgaaagtagagactgtctttcccttgtgtctctttttaagagtgaggaaatcggccgggcatggtggctcacgcctgtaatcccagcactttgggaggctgaggcgggtggatcacgaggtcaggagatcgagaccatcctggctaacacggtgaaaccccatctctactaaaactacaaaaagttagccgggcgtggtggcgggcgcctgtagtcccagctactcgggaggctgaggcaggagaatggcgtgaacccaggaggcagagcttgcagtgagcggagatggcgccactgcactccagcctgggcgacagagcaagactccatctccaaaaaaaaaaaaaaaaaaaaagagtgaggaaatctttcccagaatctccccaagtagacttcttcccataccttgtttgtcacgattgtgtcccatgcccatgcctaaaccaataatctggaaggaggaatgtgacaactgtgattgaaaagtgtgaacaaaatatatagctgctggaaaaatgtgaacaaaattgagattctgttagcaagaaagaagacttaggtaggcagttgattgtgtctgatattcatattcttttttatctgtcctttatttcatcattctgtgggctgcttctctgtctgaatagtgatycaaatgaaatttaggtttatgtatctctttctgctcggaggatttatatcaaatatttkgctgattcttgttctaataaaaaaattaataacagagatattaacaatgctggatttggactttattgttactgataagtttataataagtattactgtcttttaggagacacacacatgcacacacacacacataactgaaaacaactggtcagtttagtcaagaattgcaaaactcaaattgctaaaaatggtcggtcaaaccagttgtttgatgtgtttataggcaagcaacaagatggtaactttttgtactttttagccaatgatatggcatcacatagatacaattaaagtcaaatttctattttaatcaaaggatcaaaggaaggaaggagagggtgtatgtgtgtgtgtgtgtgcacatgtatgtatgtgtatgtatattgttcatatatatgaacaggtattttgatataaaaactcagaccttcttctcttgatatttgcatcaatccttttgagcttgtggaaaacataaggtaattaaggcaaaaaaaagacgccattagcttggttgctaggcagcctgcactctgctttacacaaggaaatagaatagctacaacaaagaatccagagcttatgaaaaagcctgtttggatgcatttgtacccctcagtttgcaggtgcccagtctggaccttcataactgaagaatgataaaagggtgagataattatcttcatgtctctgataaacaaaaccccaattttccttaaattatcttgctcaaaggtactttagaaggcagccagtatagcagaaactgcatgttaagctctcacttttactagctgtgtgcccttcggcaagttacttagacatttgagtctcagtttctctatgtgtaaaatgggtaagtgagctatatcttctaggactactgtgaaaattaaacaaagtaacatgtaaaaagtgactgtcagagtgcctggctcacagctacctttctttccactttttctcctttgaggctaggatgaccttattgattggtggtgacctagcatctaagttacaatctttagcttcctactctcttgaagttttctgattactggcagagagtctctcaatatttccagctttcaaaattataaatggcatattctcagatcaaattatgtagtttgatatttgcctatccctgggcttctgttgtttgttccctatttggtcaacaggtcaacaactatttattgagcacctctgatgtgctaggcaatatgttgaacccaagatagaacactatacaagacagacagggtttctagcaatggtatgttagagccagtccagaaaagttgattctgtgcatcttttcccagctctccattcagtgacatcaattggtagcttgaaatcaggcatgatagtagtagttacaccgcagaaacaggcaaatgctacaaataagagttttttttccctctccatatagctgttgtcaaacacttactagcacatcactcattgccacccttatagaccttagattttagtgagagagacagataataaatggttaagcaaatgcattaacaagatggctgtatttctcccttgcccaataactttcaatgaaatagagatttctatgtacaaggagcattgcctacagcagtggtctgcaacatctcttaatttgtacccttgcttctttaacaagtaaaaaatgaaatgaacaaaaagctatcaaagcgatacaaacacatagttttaaaagtcaagaaatgctaaaaggtttatatcaataacaaagcagtctataaggcctcctttcttcccttcatcagaagcaaccactttcatatttttttagctctttattctggtatttacttctatgtttctaaatgctatgctgctactggtgactctcgattaatcaattttgagcattatttgttgtattactattatagttgaggagcactcttagtctttttgtacttccttactctcctttaaaccttaaatatggttatgtcccaatttatagttaaatccatatttagtatttttaacatagtaactatgtaaatatcatttattgctaatccacatgaaataatatggttataattcttgtcacatgtaacttcatttttaccggggttaataattacttcaatttttaatttgtttaccttaatttgaatgtctaagtctttccatactttctgataaggctgtaaaatcctgtcaaaacaattttatgcatagtaaagcctattaaataccttatgaatttcatttgtttttgctggggctctctgtcttcctattccaatctaaacattttgctccctaaggctgctgcacagctattaatattatgctagttttctattttcataattcttaaacgcctctttctttctcttctctgcaggatctatgttttatgaatctcatgacctatattcttggtttaatctgtcatttttgtggagcacatcctgtagtagctttttacaggaggtaaatttttgagattttgcatgtccgaaaagtcattatttcatcttcactattgattgatagtttgaatgagtatacaaatctagggtagaaatcattttccctcagtcctttgaagacatgtcacattgtcttccaatttccactgttggtgttgagaacaccaatgtcattcttattcctaatcttttgatacaacctatttccattcctctttgtcctctcagaaacttttaaaatgttctgtttatttctgatgctatgaaatttcatgatgatgtatgagtctttgacacatgatatgctgtattggtggagcctttcaatctagaagctgattccttctgagaaattttcttctattgtttatttgataatttcttcaacaacattgtctttcttctctctggaaatactataagatatataagatataagatgtccttggttgatcttttaattgtcttattatttatcttatatggtccatatttttgtttttagttttcctttctgggagagtttctcatctttgtgttctaacacttttactaattcttaagaatgatttagttatatttttaatttccaagagttcattcttgttgttatcaatatagtatttttcctattttcttgaggtactcattatagtttttttgaagttttcttctgctctctattttatccgttttttcctcagttcctaatttttcatgtttttatttcatgttgaaagttttccttagatgtctgcagatttgaaggtttatgtgcatgatggatatgttgacaagtgggcttcagtacagggcaattggctaaacagttgctttttgtttgcttcttttggtcaatatctgtaggccttggctcttgagctagtctttttcttcagagaagagtcttctaatcttcttgggagtcataatcatagctgtcagtattccggaagcaatgttgggaggagactgggattctcaccattaagcatgaaaactttaacttcatcactgtttttttgtgctccacctcatttccaacttccttttcgtctagtgccccagctctggagctgctctgaatcaatttaatctgtttcctatagacgtctgcacctcctggtagaggtgggtatgggggatgtctacatgtttattacacagacattcaaagagcyctcgctcttttagtgtttggcctcaccttcacttctacagtacttggtggttgtaattactctttccaggattcttaaggggcagatctgcttgttgcttatcagtaattccctctgcaagcacttaggtttgactgttcyccactttgctaaatcagttgccatgtttgtagcaactttttattttcagattctgtggtacagggttacagatgtttcctaataccattagatatggagatttagtgtttctgttccttgttctctttgtttgagagtgatgtttgagaggagaaagagagtgaagtaaaaaaaaatcttgatttcattatttttaatcaggaagtctatggaaagtcatgaaggaaaaaataagtcacaaaagggtgcatgtgatattattttactggtgagttcaccaaagcctattaattaagttagtaagtatttattaagctcagatttaatatgaaggttaagatcatgggttttgaaggcagactgccttaagtttacttaagctctccatgtcttcttttcctcatttttaaaattgaaaataacaatagtacctaactaayagggttcttgtgaggattaaatgaattaacacactaaatagtttgcctggcacctgataacccctcaattaatgttagccattattattattaaagttgtggttattattattaytgtgggtcaggcactctgcaggggatataatagagatcaaaatagaaatgagatctttcccccaatgaaggagaacagtttttccatttcaggtgctaaggaaattggatctaaaattgggactctagtacttcttgatcaccagttcaaaactaggacaagggacttgaacattatacttccaggataatgtttccagagccctgtgctcctcttctgaaatacaaataatagcagctgttgtatattcagtgtttactctgtaccaggtcgtttacataaatgatccaatgggatcctcagacaacacctacaaattagatattaatatctacattttgtggttgaggaaactaaggctcaaggtaacttgctcaaggtcatacagctgggaagtggcagagctgggattccaacccaagtctgctaccagatcctgatcatttaaccacacattaggcttgttgtgttttattccactgtgctaataatatctaatgccaatgctttactcaggcaaagtaacattgctaagtgactaatactttgatttgaatagatttattgaattgttttcctgtaatataggaggtactagggccttatgagaacctgtgaaaagagaacaataaatcagaatagggagatctgaggggtggggacaccagtgatgaacttcttaatttagtctcaggatgattgggcaaggattataactttgtacctttatattttggccaaattagaattctgaattagggtttgatgcctacattcttccttttcattgtattcccaatgcttgttttcagttaaattctattggccacaaatgtatatggctggaacacatattttggatatttttccaaatgtacagttatttgattaagcaaaggaaatcctcaggatttcttagaaagcttggggaccttatgctctttattgctattgttttctattaccctaaatatgggtgcctggcaggggaattctaggctgcagcagatgtggttaggactggaacattccagaatggggcccaccaaacaaggttgtcagaaaaggttgcctgcagctcacagtggctaagattgtctttctaccccattctatacaaaataagggttttgtgttgatgtgcatcacatcaaacacattggtcttttatccatctcttgactatgcccaagggttgagatcatgcattattggaggtactgccgttaataacaagaattcaattatcctttggtttcttgatctgtgcatgtgcctgactttttgttcaaaattgatgtgccattttgtccttcaagtgatggcttttcaagctaggcatgttttaatgtacacttctgaggataaaattctttggaaggcggttttgtgtcttctcagacacagtaaatctgaactgatggtagtcaacttaaaaacagcacgaaccattatgctgaacaaattcatatattactgttcctgatccagaccttattctcttggataaaaactttaaaagcctcaggtagagctatctaaagtaacagaataaaaaccaatgatatgttttaattatcattcataactaattctttcaggttcaggtctatacagtaggcaaaaacaatgggcttaatcatcagtggtctcaccattttggactgtgatgtcaacaaggtcatctctctgacagaagttcttaccaattctgtcttacttttttggagctgtagtgagaagctggatagaggcctgtagagaatgcctcttcttcctgtgttccaccctttaccttttctctttctcgttatttgtggcaagtgcaactagagaccttttgtgagtgatgctaacattgtgtgcccttgatgtttgggaagaggcaattccctttgctgaagggcaccatgggtgaagcaggaactcaaaccaactacagcacaactccaaggccttgaagtgacagtggaccatcgtgacagcccctcttttgcaagtcaatgctgttgctatagctatgctataagtctctctaccatacttttgtggctgtgagtacatgtgttgtctaggctagagaatcctgaagaacaggcttcaggtttcagtcgtcttggggagtttctgtcagtcagctccaatgggtcaatcagagcacaaagaccagcacagcctggccagctgaaaacccagtgtgttggatcaactcagaggtgggaatgttgtttttgagttttaatcttcacttttggctstaggtagatgcagtttctttctcagaaggctctgtgcctttcaaaacagaacactagcattctgtttgctttcaggagcttgctgccctgtgtgtgtgtgtgtgttttcacttatttgttttactagtattgattttatactccactttccatccttcacttattgtcataacctaccaaagcccccagaaaacagtcagggttttgcagaaattacaaagacaatcaaatacagcatccaagaatgtcagkagagggaattagtgaaaacctcttaagggagctcagcatgtgctaggcaactaagtgtggataccttggtggcagcacatgccatccattcatgatctgtttctacagagtacatcttgagacagggtgatgaaggaagatcattggaataaaaccctctggagactgaggtattgatttctgctctgctagtagttaactctgttatgtggggcaaggcttttggcctgaacaactagaagaatggagtagctattaacgtagactgacaagactcgttgtagatggatcaggaggatttggggtgaatatcatgagttcaacattgggtatgttgatttttaacatccaagtggagatataaaagtaggccattgactatatcaatctggaatttaggatataggtctgaattggaagtatgaatctgagagttatggcatagatctagtacttaaggccatgagagcaaaagagatcaccaaggaagttagtgtggacagagaagaggaccaaggactgagctgtggggcactccagtatgaagagagacgtcagcgagatgaagaacccttaaacaggctataaaaatgtctacaagctaaattttgtccctgaactataccaagtattaggaattttcacaggagttcagagccagaagggaccacaggggacatatattccaatcaagaatgctaaactaagaaacaggagacctggattttactccttattttatgctcaggtaggtgaacttgacaggtcatgtaacttctctgtgtctccctttcttacttataaagtaagatagttagacaagatgacttctaaagtttagacattcatgattctgtattctcatttcacagaggaagaaatggaagcacagagaaagctgataaatgactttctcaaacattctggcattaggcactgatcacaggacagggtatcatcttctatactgatgtcttaaaatcctgcatgcatattagaatctttgaggagcttttaataatgctgattactggggtatcaaactaaaagcatctctttttgttggtctgggttcggtttggcattgctatttttgacactcttcaggtaattctaatgtgcagctggtgttgaaaactcccactctacattaacaagacatggcagtgtcttgctatctgctacacctctctgcatcttgacttttatttctaataaaaaatgattcactcaattttaagcccttttttttcacatgaaggttgttacaggagcttagctttctagatcttgtgaaaccaaagtagcaagtatcagctttccctgatgctcagtaaaatggcatgaccatrgctttcttgaactccatcctakaagtgaagtgacatggaaaaccatgaagccatggccgcgtgtgtgaggggccatgtcgggggaggtacagagaagggaggaattgtttgctcatcctctctacctttttggaaaaaaagatacaagattttatccaaaaataaacttacaaggttaatgggcagtgcatctgggcatagtatacaaaaacattgttgcttttaccatatttatttagcaggcatagttatgctatccaccttagcagtcttactgttttaaagtggcttcttgttgaagctttgccactttgcacaccaataggttttctgactaaaattcacattctctatactctacaaactttggctctagatagctgggtgcgtaygtgtcagggtggatgtctgcgtgtgcatacatgtgtgtatgtgtaggtatgtgtttaaaactgaattctaatgttcactttctctggggagcatgtgtctagaaaaatagccattttgaactaagacaggatacagacatggactgtggagacacattatttacagtctttccacacacacctaccactctagtagtgccagcaaaatgattttaccatgcatagtgcaccagtaattaacctggcatatttactttgaactccccttgtctattctatacttgttttcttaagtgccctttataattccaaatcattttcttagtttaggagcataaaaatatattatgtatgacttggtttgctcataaaattgtcatatttgatatatttaaagatgtgacagcctgggggaaaaaaaaacagaaaaattcaggggagaaaccaagcaagtccttagaaacaatttttttcctctgggtcttcatagctctacttcactcagatgtgcagaccataataatgaacacaggcttggaatatactctgagatcgctctagggcgaccagggctcaagataattgtaatttttaaaaataggtttcaccgttgtttggaaccatctacaattcaatttactttatcgcacaagccatgaataatgctatgaaagaaaatggacaggctggtgctgccagcctggttcakcattccagaaacatgcagttccatggattcaaccagttgatgaggacagattcaaatggaaatggaatttcagaatatgtaatcctggacaccaacttgaaagaatgggaactccatagcacctacactgtggacatggaaatggagctgctacgtttcggagggacccctattcacttccctggtggcaggccccctagagcagatgcaaaatgctggtttgcagaagggaagatctgccatggaggtaaggaatgcaaaatcactagtagtcaatttggctcagcttgggttacaagggaacctctttaggagaaggcacattttaatattgaaacactcataaaatcagttatttgcattcgagtgacatacacttcttggcactctatctagttaatttaaaataataagaacaatgagaggtactttgcagccttgaataaccatccacaatttaaaagcctccccaccactcttttcaaaaagaatcccactctttcccaaagagcttactctaaaaagaggaagacattagccttcttcttgctcttttgtaggctatgacctatgattgtttctcctgctttcaaggtcccctatccatcccttgatgtttccaaatcctgccaatcaggtcctaccacagaaataccgtacctatactctctcctctctgaactcccattgaagtaaaagtctgtacctcacagcttagcacaaaattgcttttcaattgtttcttgtgtactgattgtctctccacttccactcccaaatatattgcttgttgagggtagggaccatagctaataatttttatgctgcccaactgcccaacacagtaggtatccagtaaatacttgcagtttgattgactggtggaactcctctagcttgtggaagaggggaaactttgtccaatctctcagagccagaggggatcattggaaggacccatattgttattatgcaactgtataccatacacttttaaaaccaaatgcatctatttgaaaggggctttgatttctactttgctttaacatgatatacccaactacctcttcactcacatcatatttccctaaaaaatcttactaatctatccaaatatttagattttatggagactaatttacattctgatgaaaacactaattatcaaaaccagacttaccctcacccttgaaggagaagtaccacgtttttcatctataactcatatgggctcaggtgaattaaaaaggccttttattttatgaaggcaagataatacttaactttcacaggtgagataacatatttattctcaagaactctattgctgtccaacttaaattaaggtactcaaagttttccatttgtggactctttcctccaaagaaacactctggtcagccttaattcatgtgatttgttattgtcagagtggttagtggttttgcttcacaacagtgaaattgctttctgtgtccataaagtcaacaagacagactgtgctgagaaaaaatggaattaggttaggtagatgtggcttgatattagagtcaccagaaagcatgaggagtcactctgtggtgccctttatttactgcctctctctgataatgccattcttcctcttcctctcactctctgcaggcatcgaccctgcctttgccatgatggtctgccttactttgcttatagccctgctgtctattaatggatttgcttactttataaggtacattttttgttatttttgtatataaaaaatacaagcccatattagccttgttaatactgatttccaggaagtcctgtttcggtacrattgcctcattacatgacccactgattttcttttttccacagtggtttaccattcctacaggccccatttagagtgaagtgttttcatgatgccaagaataacttcctcagctgtgttgtcagtgttgttgcctgtgaatagatctggctctcaacacaatggtgaaataagagaactagtactttagggcctgtctactccctatcgttgttctcctttctcctagcagagtctcctataaccatctccttgcccaaatgatatgtgatgatagggaatggaattgagatattttaatgaattccaagaattaggcagattttgctagaatccaagctctagcaataatggtatgaactcataggattataatggggattaagtaaactaaaataagtaaagcacctagaacgatatgtgactcatagtaggtgctcaataaatggtaaaatctcaaccccttcccagacacaaggaactctcttgctgattgttggaagctcaggatcttcactttgatactcatgccttttgtccagggtatcacattctagatttctaccatcttgcttccttgggcaaaagttatcctgtctaatcatcaacatctttattatcatcaagttttgtcttcctctctcagatcccttagtacatgatcaaataatctaatgagctacttcagaatcagggataagtggctgaagatggcctaacatgacacctctttcctataaactttgcattttaacacttggaccctctccatactggaataattgggggaaagtgaaaaataaaataaattataaccatcccattttcccattgctaccctgcaaaccacatcattgtcacctcttagtaagggtggtcctgacaacaatatgtcatggattggtagggaatggagtgaggctgttttggtgagttgtaagaaaaaaatttctatagtgtattaaatagctgtgtgaccttgggtaagccccctaacctttcttggccggaattttcttatttgcgcaatgaagaaattggattagatgatgtttaagagccctcccagctctgatattttaataagtctgggaaatcctggattgaaaccataacagttgttactcttagtgtttaaaatgttagcatagctgtgaaaacttctattatccaatttccccagtattagaaatttgataaagtcgcacagagtcgtaggtaacttatgaattgttaaaacacttgataaagacactagttcaaaggaagtttttcttttaatttctgtaactgggacatattcctgctaagaacagaaatttaatatctttaacttagctgctgccaaagaataaagtatttaattaacatcattagattcttagcaaaaataaactctatccaatcaaaaagcttccctctctagagagatttgaggagtgacagactctgtctacctaatgccaaaacatcccatggcaatgtgggaaatggaatcactcagctgtttatgttacttgtcaaccgccgcaactgacagttttcactggtctttcccactgtatggactggttctttgggctttgagtgagcctagtctgcaattcttggaaaaggaaggaaaaaagaaaagaaaaaaacagtggggaggggtttgtttgaagcttgtgggctgaagggcaaagattggagaggaaaattattggagagggacatgattagagaggaaaatgattggagaggaaaatgagtttgagacaattcgtacttcaaatggtcacagaaaactcagagatgggaaagaggtacatcatttcccagactcacttggtccttggttcttcagctaacaaagcacaaaagataccccctctttgctgccttcctccctctctctgcccaccacggctgcaatcagaagagctgagcagctgatgagattctgtaatagacggtgattacttgcaggagagtaactctctgttccttccttttctgtatgttttgattgtttaagttttttttcagaaagaaagacatgcaaagaacccaaccaccccaaaacaaaggattctttgaactcctcctttctctctactcctctggaaccagattgcatcgcctttctataaagctctcccgcgctttgttatactaatgatgataatgataataacgatccctcatacttttataatgctttatgcttttcagagcactttcacatacattatctgatttgattttcaaaacaactctataaagcaggtaatgcaaggactattatcctgctagatagatgaggacactgagccatgaagaggataaattatttatccaaggtcacctggacctggctaattaatggcagaatctgcaccacaccccaggtctctggattgggagtccagtttgctttctactagagtgtactctgtagcatgattatttttacaggtgtgcctgttttaagacaattcaccacacatatgaaacagatcagttagggagtgatgctgtactttgccaaaagattcatgtgctctacccaagaatccactacagggctcttttaattttctctgcagggcagcagctcccacagtgataagggacatatttgttggcagacaattagaaacacgttaattgtttgtttacaaaccagtggaatcactgagaaaaactgagttgctgatacttaaagctgcagtgacattgtaaacttctccttaaagcaacttgacgaagcattttgattcagtggttgttttctccaccatggctcttggctttaacacattccacagagtaaccattatggggttatggaaaaagcaaagccaaattgtagctgtcagagcccccaagacaaaacaacaaaacgagcataccgactaatcaagattccctccaggtcttcaagttacccagtcagacctacctgactgcgtgaatacacatcataaactcctatatgtctagtaattgacctgtagaaaataattacattcactacaaattaatgggcatgtttagagagaatcgggtttaaactgtgtctgtaatgctcagacaagagaccaattcagtaaaagaaaaaaactcagtcagcctacttgtttggaatcatgtagacaaagcaaccaactgactgaatttttccacttttcaacctgttgctttggcaacacatagatgcaactttacaagacaagtgtcttatgggcagaaatctgggcccacagccagggagtaaggattcaagttccagctctgcctcaggctaggagatctcatgccaatttgctcaattttgttttgtttctctaatgtgtttttgtctataaaatggagattaatgattcttggccctggtattattaggataaatactatggcatatgagaaagggtgttgagttccttaaatgtattcagaggtgttgttttgaatgtgtccttgatgtgggatcaccattttattagcctgagataccattcccatgcagagccttcgcacctctcttttggtgcctcttcaagagcattttaatttttcttttttggtctttgtaactgcaagttgtgcgggccagggttgcttccttcttttcctgtgggtactatggtaaaaatccatgtgtgattatcctcccaattaccttgtataccttgtatattctttaagtgctatcttagggcaaattaaccctggctttgccaaaacacccagtcccttgtgaccctctgatttcatgtttgttttaggcgtcgtataaataaaatccagttgatcaaaggacccaatagaattctactgactttggaggatgtaacgtttatcaatccccactttggcagtaaggtaaggagtatcctcttcttttgctgccctgtccaacatggtagccacaagccacaaataattactcagcacttgacgtgtggctagtctgaattgtgatgtgctataagagtaaagtactcagtgggtttagaaaacagtataaaaacatgtaaaatatcttattaaatttaaaaaaaaaattaaaaaaattaaaaatgttaattaaatgtcaaaattaaatattttagatatattgggttaaagtatattattaaagttaattttacctgtttatttatttatttattttttattatactttaagttctagggtacatgtgcataacgtgcaggtttgttacatatgtatacatgtgccatgttggtgtgctgcacccattaactcgtcatttacattaggtatatctcctaatgctatccctcccccctccccccaccccacgacaggccccggtgtgtggtgttccccaccctgtgtccaagtgttctcactgttcaattcccacctatgagtgagaacatgccatgtttggtttcctgtccttgcgatagtttgccgagaatgatggtttccagcttcatccatgtccctacaaaggacatgaactcatcattttttatggctgcatagtattccatggtgtatatgtgccacattttcttaatccagtctatcgttgatggacatttgggttggttccaagtctttgctattgtgaatagtgcctcaataaacatacgtgtgcatgtgtctttatagcagcatgatttataatcctttgggtatatacccagtaatgggatggctgggtcaaatggtatttctagttctagatccttgaggaatcgccacactgtcttccacaatggtagaactagtttacatcccaccaatggtgtaaaagtgttcctgtttctccacatcctctccagcacctgttgtttcctgactttttaatgatcaccattctaactggtgtgagatggtatctcattgtggttttgatttgcatttctttgatggctagtgatgatgagcattttttcatgtgcctgttggctgcataaatgtcttcttttgagaagtgtctgttcataaccttctcccactttttgatgggattttttgattttttcttgtaaatttgtttaagttctttgtagattctggatattacccctttgtcagatgggtagattgcaaaaattttctcccattctgtaggttgcctgttcactctgatggtagtttcttttgctgtgcagaagctctttagtttaattagatcccatttgtgtattttggcttttgttgccattgcttgtggtgttttagacatgaagtcctttcccatgcctatgtcctgaatggtattgcctaggttttcttctagggtttttatggttttaggtctgacatttaagtctttaatccatcttgaattaatttttgtgtaaggtgtaaggaagggatccagtttcagctttctacatatggctagccagttttcccagtaccatttatgaaatagggaatcctttccccatttcttgattttgtcaggtttgtcaaagatcagatggttgtagatgtgtagtattatttctgagggctctgttctgttccattgatctatatctctgttttggtaccagtaccatgctgttttggttactgtagccttgtagtatagtttgaaatcaggtagtgtgatgcctccagctttgttctttgggcttagcattctcttggcaatgcagggtcttttttggttccatatgaactttaaagtagttttttccaattctgtgaagaaagtcatcagtagcttgatggggatggcactgaatctataaattgccttgggcagtatggccattttcatgatattgattcttcttattcatgagcatggaatgttcttccatttgtttgtgtcctcttttatttcgttgagcagtggtttgtaattctccttgaaaagttccttcacatcccttataagttggattcctaggtattttattctctttgaagcaattgtgaatgggagttcactcatgatttggctttctgtttgtctgttattggtgtataagaatgcttgtgatttttgtacattgattttgtatcctgagactttgctgaagttccttatcagcttaaggagattttgggctgagatgatggggttttctaaatatacaatcatgtcatctgcaaacaggcacaatttgacttcctcttttcctaactgaataccctttatttctttcttctgcctgattgccctggacagaacttccaacactatgttgaataggagtggtgagagagggcatccctgtcttgtgcccgttttcaaagggaatgcttccagtttttgcccattaagtatgatattggctgtgggtttgtcataaatagctcttattattttgagatatgtcccaaaccaaatccagcagcacatcaaaaagcttatccaccatgatcaagtgggcttcatccctgggatacctgtttccttttgtttattaattgtgactactagaaaacttaaaattacatatatggctcatgttacacttttattaaatagtgcagccttagaacagtgttgtggaagtgaatgcagtgcacttggagcaatagtttagctttgactttatgtagttctttgtttatttggactcaacatttgatggctatttcttcaagggcaacaatatattttttaaaatgttagcctgacataatgcttataatatagtaggtgcttgtgaaggtttggtgaattaawcaactagtgaaagagttggatttcaccaaaaggtcttctctggttgtgattgtaatgtaattggtgatcttcattaaaggtgtgcctctatgtcctacccctggggctaggccttgtgaaagatgacatgtagtcccagatttcaagaggattacagttaagttagagagacaaatcataccacacaagagagacaatgagcaccatgttgtacgaagaaactagaatgtggtaggacttcagaggaggcatatcagtggagggaggcttttcagaaactcagcacaaaaactgagtcaatgaaggaatgatagggtttatttaggtcacaaactggtaaccacctttgtttcaccctcacagttatttaaaaaaaagccagaattttgaaattgtgaaattacatataaaaatctggatttctgagttttctttaaaagttttaagatctgtcaaccttggatctcatcatgacaatcggctataactcagtagtagttgcgttttgtggaaaaggcrtgttctttgcagtttgatacaattcccaccactctatattgtcttatactcagcatatttcacgtctttatattacctgtctggccccataggcgaggtgtcctaggcagaggaaacagtataaacagaagcttggagaagagaatatgtagggaagagtactgtcaaagctagctagtgtgtcttcttgtgctagtatatgtggccacagtaaagacactagactgtaatttatagtatggtagtggatgtaggaaaagtatdcaaatacattatgttgtcttcatgtgccgtttactcttgctacacaactgtgccagatttgagaattaattgttgtctcagtgaccaaactgctcttctgcctgaatgtgaaattgaaaggtatatttaattagttggctgggtgagaatggatttacatggtactaccctgagcagttggagtcaaattaattgttcagctgtttgatttaattttcaattataaccctaattcttacttatttaaatcatcagatctttttgtaaggttaatattgtgttcctggaaacatattgctgaaagccaaaactgtcactgtggctgaagcctacattccacccttgtgacataaaaatttgttgatattagtccccatttttggagacaccaaaggaccctaggactcatggtagtggaatttgtctggatttgccatactcaacatgccttgtataaaatttcctgccttaagtagaaagtatagatgttaaaatacaagctaggaagcaatcctaatatataacccaatactaagaaaaaagtattcacttttgtgacaggatgttttatcgagaaatggatgtttagtagtaaaagtagatgactagaagttattgtctaaatgtagcaaaatatagtaaagtttcagtcaaaagcaataaacctatttgtaaaatcsccacttctttggtggtatccatgtcaaaatgacagttcatatcaattgcctagatgttttagctctaacatatcaaaatgatacacatagctcaattttggattgaatgaggcttttatttgtataggctttgcaatagtccagtgtagtctataagacctccacctatgcctcctcttttttatactgggacataaaccatatttgggtgactaaagcataccaggcctcacaaaattaccataaatagctaagcagtgctaccttcaggtaaacaaagtacctagggctttaaaatcttgctcaccatgatagtttttttcacttgtgcataaattttgacatgagaataaaaagtcatcactttttaccatatgagtgagaaaaatgaatagtaagagggctattaccgttactaagggattggtatactsttataagggatgggtagccttatagtagggaatgttcttttgtaaataaaaaaaaataaattgttttatttcattttattttttttactattttggccgaggtggaaaaggatggcattaccctagaagaacatagctcttggcctccagatcccttttggcatttggcttgtattggaggttctgatgggaaaagataggggaagcatacattttccttaattgctgtgtagtcacaaacttgcagctggctgtgcctaatcagtcaagaagccaagccaagaattccatccaaacggaatgtctgaaagtgtaaactcttagtgaatataaaattaattctgtctagaaaaattggcaggttaggagaagtcaggttaagaaaggaagtttttagaagaaaatgaatctgaagtcaaaatgtgtgtggattttggcaattctctcactttctcctttgcccttcatggagaggtctatatctcaatatacagatctaggtactcctgctgagatatgaaaataaagaatgaaagggaaatagattcctccctgaccttgctctgttggggagtgttcaggttgatacagaggttatgtgaagagtcaagttttacatcttgtctgaattttgagctgttgagatttcagcacattgcgggctgggtagagtttaccactgtcttggaactttgtgatagtcttcatagaaggagcttaactctgggctaactcaggtgtaatctttagttgatcaaagactactaaggtgtaatctttagttgatcaaagactattaaggggtagagtgttgggaagtagttaagattaatttttattggcaagcaaagtaaaataaagcataatgtagttgtagagagagcacaggactagaaaatataataccaagattcttgtcccagtcccgatgtacttctctaggtctttgtttcctaattataaaataaggatgttggagttgagggtaggggcactcctagacaataccaaaaggtaacggctagctctggattgctttaattctaagaaaggcacatttggaggtatggagaatatgaggaacctgttgacttatatgtcttcatgtgaaataagtctactggttcaattgaagatacagaggttcaattttaaaggttaacacagattgcaggtaactcttcctcttgtcattcaactgtgcagttccgagccctttcctaccagacttatgtgtgcaagttcaaaaatcaagaaatagagaatgtgacctatttaagcatcagactcataaattatatataggcatgtgatctgctcactctctactattattgctttctgggataccctctgccgttaatcttatctgcacaaagaagtatgccattcagcatagtatcacaaaaagagccactcctgagagtcagcaaggtgggatgctgtcctaggtctgctatagattttttttaaatgtcagatttttacaaacaataatcttgtaactaaataattgactagctatatgatattaggaaacttatttcatcttttttttttggtcttacttttttgtctataaagtgagggtcccagattaaattatgactggcattctttcttgcccccatctgtattttaatcctctctaggaggtggaagcacctttataattttttggtgctrcatggtggttaaacagggtaccaacactgaactgaaaaaaaaagttcagaaggatagggaaaatgaatcaatctcatgtttacagggttcaactcatatggttattttcttaggaataaaaaagaaaattcagataagctctgtgccaaatcatgagtattttggtcataacttttctttcctaatcctttcacagagaggaagtcgtgccagtgtaagcttccagattacctcagaggtccaaagtgggaggtccccaagactctccttttcttcagggagtctaactccagctacctatgaaaactccaacatagcgatttatgaggtaagatattcaacagctgtctaatctactgctttcttggatttcaaaatgaggcaatgatttagtaattagtctttgggtaaaaatactggggcttttggcaagtctttccagtttggtgtctgtgtttgcttatggactcgtttggttgacattcttagcaattattttcctcagcaacaaatctacttatttataacttcactgatctttcaactccatgtatttactatgcatgtagaaaaaagttcttgagacccaaacatttaaatgtgtctgtcactccagaagatatatagataacaatagaagaaatgactccctgagtctattgtttgtaatgagatgtctagagacatgcgtgtgcatggcagggtttggggtacccttctcttcaaattctagttgttcttcctgtacttgttatcctctgatactgagactttaaaatttattcagttatttatttttcttcacctgttctgcctcttggagtaacaggttactttctgctgctgaaaatagaaatcctttttattccactgaggtttctgtgtttcaagctttaagaggccaccctgtaccacctgatctaagatactagaatttggcaaccagaacaaatcttgcatcagagagatgaactgtttcttctcagcaggaatgagttaagcagggggtaaaagggaaactagactgcctttctgttccttctaagtgaggccttctcagtgtggtttccttgttttgtttgaagatactcccaagagcagcaaacactctcaacttaacagtaactacaaagaaagtccaaaacaggacagaatgagtttttagattgtcaaccacattggatttttcaagtgaatactcttctccattagataaataattgacagggaccttactatggtttgaatgtgtccctctcaaaattcaggtgttgaaacttaatggccaattgatggtataaagagatggggcctttagaaggtgattaggccatgaargctcctctctcatcaatggaattaaaacccttatagaagaggattcatgcagtgtttggctaatttgcccttctaccttctgctctgggaggacacagcattcctcccttctggagggtgcagcaacaaggcaccatctttgtagcagagagcagccctcactagacaaccaaacctgttggcaccttgatcttggacatcccatccttcagaactgtaaaaaataattttctgatctttataaattacccagtactaacagactaagacagaaattggtaccagagcagtgggttgttacaaaaaaatacctaaaactgtggaagtggctttggaactgggtaatggggagaggctggaacacttttgaagggaatgctggaaaaagtcttgattgctgtgagtggagtgctaagggaaattctggtgaggatttggaagaagagatgaactgtatggaaagcctgattcttcttggagattacttaagtggtcgtgaacagaatgaccacattggtaaaaatatgtacgttaaagacaattttgaggaagtcttagatggaaatgaggaatgaagttggaaaagaagcattctttttataaattggcaaataacttggctgaattatgtccatgttctaggaccctgtggaatgtagaattcgtgagcaatgaatgaggatttttggtggaagaaatctctaggcagcaaagcattcagggtgctgaatagcttaactgcttatagtaagatgcaaaaagtgagaaatgacttaaagacagaatgtatttaaaaaaaaaacaagggaatcggaacatacagagttgtaaaattctcagccttgccatgtgaagaatgaaaaagtatgtttaggagagaaaaccaagagtgtgacaaaaaaaaagtttgataaggagattggtatggatagaaggaagccagatgctattcatcaagatgacgggagaatgggagaatgaccccaaagacattttagggatcttcaaagctgtcatgtccattacaggcccagagtgccggggccttgagggtcaaactggtttcaaagtagaggcccaggacactgatgcggtccagggcacctgtgagatcccagggcttgttgcctggggctgactcaaatctctgcttcccatatttcagtgcagggctctttggccttcccagttgtgactcagctggtccaaggtgtggcttggcctactgctctggaagatgcaagccatacatctcggtagtatccacgyggtgccaactttgcaggctctcagagtgcaagaggtatggaggcatggatacatccatctagatttcaaaggatgtcttgtacagcttcaggacccaggcacagacttgccacaggggcagggccactgcagagagtccccattagaacaatacccagtggaattttggggtctgcgccaccgcaaagagtcctcactagggcaatactcagcagaactgtggagtcagggccaccacaaagatcctccactagtacaatgcttagtggggctttgggacatggccacccttgacaccccagacctgtaaagccaccagaatgcaatgccagtctgggagagctgcagtcatactggctccaacctgtgagagctgtggcatgggttgcacccagctaagccatgaaggtggaatccactggggccttgggggcccaacacccaccccagtgtgtctgggaattggaacatggagtcaaagattactctcaagacttaagacttaatgttgtttgttttgttggattttggaattactttggacctgttacctctttcttcttgcctacttctcatttttggaatagaaatgtttatcttgtgcatatcccaacattgtatttcggaagaacatgatttgtttgatttcacagattgatgtgatgatattaagatgtgaggacattaagaggtaattaggccacaagggcttctactttgtgaatgatattaaggctcttataaaagaggcttaatgcagccttcagctagcttgctattctgtattctgccatgcgaagacatagtgttcctcctcttgggagaggatgcagcaacaaggcatcatcttgaaagcagacaayagacctcaccagaccaccatacctgctggtaccttgatcttggacatcccagcctccagaactgtgagaaatatattcctctctttataaattacccagtcataggaattctgttatagcagcacaaatggactataggccttcaacaccaacattggcatggtgtatgtttgttcagtctatgtgagggctttgacttaaattagtrgcaggaaacctctggatcttgccttggacttaattcaatcaaagaggagaactgcttcaaatgtaaacttgaggtattggggaattgtcagctctactctctcaaagacctaagatagggtaatcagatggcttttgaatgtcaaatggaatgagctgatggctttagaaatgtattgacacctctgggattctgaagtaaatctccataaccttggtttttatctgtaaaatgaagggttgaactaagttctcaatcttggttgcttactggaatctccttggagaaatttaagaaatacctgctcccaggccccaccctcagcaattctgattcagttggcatgaggtggggccaggtattggtatttttttaaagttctctgatatgtgcagcctgggttgagaattgctggtctaacagatctctaaggccttttctggctgaatatgctatcattctctgattctgtggaataatttatgtgttaaattgtggtatgttttacttggtggggctggaaggttatagtgtagaattgagaaggggaaaaaataaacatctgtatgtaactggcctttaagagtctgtcagatcttttcacattttggaaggaggcagagagctaagttagttcccagaatgactattggtcagtcagatcatgagtatttctaaatggtgtaggccaaatcgtgtaggccaaatggggactttatttttacaaaaggagggtgttatgagaataatacctacacggtgaagtcaatattaggctgatggcagggtgtgaaggaaggcagctgaggctagaaaactggcctgactaaagaggactgactaaagaggttaaagaggactcaaagagggaacataagccaatcgcattaacagatgaaacaaagaagtagtgtgtcttctgaaacagtactctattaggaatgttttaaagaagacccattgtctagtttctgtttaaaataaatcaaattttctttttttttttgctgttatttcattattgtttattttcttttttttcttcttttttctttttttattattattatactttaagttttagggtacatgtgcacaatgtgcaggttagttacatatgtatacatgtgccatgctggtgtgctgcacccattaacccgtcatttagtgttaggtatatctcctaatgctatccctccccactccccccaccccacaacagtccccagagtgtgatgttccccttcctgtgtccatgtgctctcattgttcaattgccatctatgagtgagaacatgcggtgtttggttttttgtccttgcgatagtttactgagaacgatgatttccaatttcatccatgtccctacaaaggacatgaactcatccttttttatggctgcatagtattccatggtgtgtatgtgccacattttcttaatccaatctatcattgttggacatttgggttggttccaagtctttgctattgtgaatagtgccgcaataaacatacgtgtacatgtgtctttatagcagcatgatttataatcctttgggtatatacccagtaatgggatggctgggtcaaatggtatttctagttctagatccctgaggaatcgccacactgacttccacaagggttgaactagtttacagtcccaccaacagtgtaaaagtgttcctatttctccacatcctctccagcacctgttgtttcctgactttttaatgattgccattctaactggtgtgagatgatatctcattgtggctttgatttgcatttctctgatggctagtgatgatgagcattttttcatgtgtcttttggctgcataaatgtcttcctttgagaagtgtctgttcatatcctttgcccactttttgatggggttgtttgtttttttcttgtaaatttgtttgagttcattgtagattctggatattagccctttgtcagatgctggcaaaccgaatccagcagcacatcaaaaagcttatccaccatgatcaagtgggtttcatccctgggatgcaaggctggttcaatatacgcaaatcaataaatgtaatccagcatataaacagaaccaaagacaaaaaccacatgattatctcaatagatgcagaaaaggcctttgacaaaattcaacaacccttcatgctaaaaactctccataaattaggtattgatgggacgtatctcaaaatcataagagctatctatgacaaacccacagccaatatcatactgaatgggcaaaaactggaagcattggctttgaaaactggcacaagacagggatgccctctctcaccactcctattcaacatagtgttggaagttctggccagggcaatcaggcaggagaaggaaataaagggtattcaattaggaaaagaggaagtcaaattgtccctgtttgcagacggcatgattgtatatctagaaaaccccattgtctcagcccaaaatctccttaagctgataagcaactttagcaaagtctcaggatacaaaatcaatgtacaaaaatcacaagcattcttatacaccaataacagacaaacagagagccaaatcatgagtgaactcccattcacaattgcttcaaagagaataaaatacctaggaatccaacttacaagggatgtgaaggacctcttcaaggagaactacaaaccactgctcaatgaaataaaagaggatacaaacaaatggaagaacattccatgctcatggataggaagaatcaatatcgtgaaaatggccatactgcccaaggtaatttatagattcaatgccatccccatcaggctaccgatgactttcttcacagaattggaaaaaactactttaaagctcatatggaaccaaaaaagagcccgcattgccaagtcaatcctaagccaaaagaacaaagctggaggcatcacactacctgacttcaaactatcctacaaggctacagtaaccaaaacagcatggtactggtaccaaaacagacatatagatcaatggaacagaacagagccctcagaaataacgccacatatctacaactatctgatctttgacaaacctgagaaaaacaagcaatggggaaaggattccctatttaataaatggtgctgggaaaactgtctagccatatgtagaaagctgaaactggatcccttccttacaccttatacaaaaattaatttaagatggattaaagacttaaatgtcagacctaaaaccataaaaaccctagaagaaaacctaggctttaccattcaggacataggcatgggcaaggacttcatgtctaaaacaccaaaagcaatggcaacaaaagccaaaattgacaaatgggatctaattaaactaaagagcttctgcacagcaaaagaaactaccatcagagtgaacaggcaacctgcaaaatgggagaaaataaattaaattttcataagaattgtcattggaagacctggaatttccagataaggtgcccggagtagcagatatagcaaaagacaggtttaggacatgccatcacgttgtactacgctcacacaaattcacacttttattgtacacacagatgcataacctttggaattgtgtgggaaaatcagcccttatttcacagatagcctttgaaatgtgaaaggaaagccagatgagcggactgccaggcagaaagagctgtgaatggcagatgcagtggggacatgtcaggatctgctctaatagttacagtctgggtgagatggggtgtggtgggcagcagtgtaaccctgacacattcagagagaacccactgaattcaycttccctcttcattttctgactactctttcctctttgcttctccctgtgttttcctctttgtctcatctttctctctctccattcatctctctttctcagatcattttttctgtcttctcacattctatatcccttgtagctctctccctgccgcctcccttccgtcaaccatcttttctttcttatcacagaatcgcagatcatcagagctaaaaaatcatctagtaagtccagaaatcacctagtaagtcctaaagaatcatctagtaagtctagctttatcagtgaggaaactgaggctcaggcagattgagtggctgttctaaggccacccttgagtttgaagcagggccaggtctaggatctagtgctctttccccttattaatacaccgtggctttagttcaaaactgatggactttaaattacttctaaaaagtttagtgaatagagtttgatgtttcttgctcttaattaaaaagtgagtgatgagtgaagtattttatcattctctcttaaaagaaaaaaacaaaacaaatagtgcatgtgtggtgaagataaaacttgcccatttcctcccttttcctcattattcatgaagtagaackcacacagactcaataaaaatttgcttacaaagtttgtgagaattatttaaatcttaaaacaaacacacacaaatctcccaaaccaaagaaagcctaacgagaggaaagagcaacaaagtaggagatggaagaccttgggtcaatttgcggctcttttactacctagttttctgaccttgggacagtcacttaatctcttaagttttcagtttctttatcaaaatatgaagggattgtgttatggatacctatgaccctttccagctctcacagttgttgatttggcatgaaaaagctctgcttagctgctcgtggcacttaataagccagacagaaggctagcccatgtttgcaatagggctggctctaggaagaaggtatcaggtaccaggtttgaggcagagtcaggactgcgagtactgatgttcaggttgtgtactgcaaaagggaactacatctaagagggtaatattcacattgtaacatatgccaatttatgcgtgagtggtaccaaagtgggcacagagattctggcttcccagcctagttctggaatgaggtggtagaagagccttctcacatctacatctatactggcactcccagctatgcacatacatcatcactggtaaactcatgtgtagctgggtatgtactatcttgactatgttccagaagtttcttgaggttgcttttctctcctgcctaatattctcagagaaccaatttcgacttctcaccccctctcctaaagcctgactccaaaggtgacaaggaggcttcactgggcagatagaatttggtgatgtgcagagcatccatgctgctagtggaatgtgctccctggtgtctgggggatgtatccataaatgagagtatggtacttgtatgtatacagccagggtgtgctgcctaacatcacagggctgccacaggctgtatgatgatatactcacaaagttaagattttttaaatttgagagaaaataccctttctaactagcacaaaggtgccatagtggctagcagtgaccatgggctcagtaacatagctgcaaaggtgccgggaaggcttttttgttcaccagtctttcccacacataggctgattccataaattttcggttagagttttattctttcagcttaataggtagcctttgatcccgctaaaggacaaagttctctgaagggtaaaacttcaagcttgtgtcaggccctcctgacttctgtgaatgacttttcgatccctgactgagagcagattttgatgaaggaaacgtagtaagaggtaaatgaagagagtgtgagtgaggagagttccataaatacgaggaaaaggcaaaggctgggatggtgggtcacaaattttcacctgtattagagtcacgtggagggcttgttaaaacacagtttgctggacctcaccctactacgatttctgatttcgttaagtgttgggtggggcttgagaattggcctttctaaccggtttccaggtgatgctgatgcagctggtccagggaccacacttggagatttactggatcaaatgctttgaccattctgctgcaggcaggcactgatccggtactacccttctgaactctctgggcactgagcctggccagtgcagttttttttcttttttttttttttttccagctgctgaaggtctctgagggccatttcttagttaaaggactttgagctccttggctagtaaatgctaatacaaagtgctggcaggtaactcggaagcctgcagcttccattagcctttgcctctggcaggtttccagatgcagtgccatagctggatatattccttaataagagagtggttacactctttttttttttttttttccagacagagtctagctctgtcgctcaggctggagtgcagtggcgccatctccgctcactgcaagctccgcctcccaggttcacgccattctcctgcctcagcctcctgagtagctgagactacaggcgcccgccaccacgcccggctgatttttttgtatttttagtagagacgaggtttcaccatgttagccaggatggtctcgatctcctgacctcgcgatccgcccgcctcagcctcccaaagtgctaggattacaggcgtgagccaccgcgcccggcccggttacactcttatttttggaatttgactgcacagtgccctctgctttattatctctacttgatgacaagttggtgcagcccgaaatggaatctccaggctgtaggtaatggatgtgaaagcactttgaaaagtagagagcattgtgcaaatgtaaggcattattactattatggagaaaaaagaatctatattgatattttttttaaaacaatttgggttggacggaaactaaatagggctttatgactgatgaatccttgaggctatgcacgtagaaaaaggttatctatcaggcgctggtgttgaagtgaaaacaataaaatagttgttgtttttaacttgacagaagccttaaaatagcagttttttacttaataagtcagaaatagacttttggaagactctagattactcacattactatggtagtacattgagcactcaaataaaaaatatttaatctagattaaagacaattggattgtgactaaagcataagacagccccccctccatacacacacacgaatggcctgtcccacgagagaaaaatggatcaaggtaaatgcaggaaacatttgctgcactacatctcccaccctacatttccctctacagacgcctcaaggcagtgggaattgcaaccactaactatcaccattaatcgcagggaacctggtgctacatcatttagctatgaaaaagtgaaatgacctagcacttcctgcagttagttaagaaaggctttgcaaagagtggtatcattccgtttctggagtctacatacttgcaattgtttccctgtcttgagtaactgtaatttttaagtttaacttctgtgcatgacctcatttcagctcagaatgcagaatgtctgtgaggtggagggtgggagagaaggaaaatgtctrtttggatygctggtataggtataaaccctttatgtggaagggacatttttctaaaactgctggcaactaagtttcatcactattcattctcctccttttctttctagggtgattgggtgtggctgaaaaagttctcccttggagattttggagaccttaagtccatcaaatcaagagcaagtgatgtgttcgaaatggtatgagaamtcttcgtttatgtaaattcccactaaaataaatctgttctccaaagtaactaacatcagagctgtttaggaagaccccttaacaaatcagtgcagggaaactgcagggttgctaatgggttggtatgatcatatcatgcaatggcaaaggtatgtgctctggagtcaaagagacatgaagcactcaaatctcggctctaccatgtaagagctgtaataacttgggcaagtcatctaaactccctaagtcttagtttccttatttacaaaagggttatattaatgtctaccctttaggttggatgaggattttaagagacaatacacgtaaagcatcttgcgcatttcctggcacatagcttctttatcaagtggtagctattatgattattatcaagtaaatatcccatcaccattccaaatcttcattttccagtcacctggtaatttctatttgaaaagtggttatttccctaatcccactaattatgttcaaggagtccttggatggcttgcttaagaaagcagcctgtagataaggcagggatactgatgatccttcctaagccattttaaaatcttggctcctccttagactgagtccatacaagacttgtgaatactatcttgggtcccttcaggttcttgaaagtgcaattttaaaaggcaatcacagattgctctacatttatgaagtgagcaatttcaaatcattccaacaaatctgaatgaggcaactgctacttccagagcactgaacaagtgagaaaacaaaggaaatggaagacatgtggcctgtggaagataggacatgccctataggttaggaagagatgttatgatttggtatttttctttctttcttttctttttttttttttttgagctggaatttcgctcttgttgcccaggctggagtacaatggtgcgatctcagctcactgcaacctccgcctcctgggttcaaggcgattctcctgcctcagactcctgagtggatgggattacaggtgcccaccaccatgcctggctaatattttgtatttttagtagagacagggtttcaccatgttggtcaggctggtctcgaactcctgatctcaggtgatctgcccgcctcagcctcccaaagtgctgggattacaggcgtgagccaccgcgcccagccaatttggtatttttcttacacgtgattgtaatgcttggagatgaaggcaagataatgagacatgagtccagaagggggatcaaggtcagaactaaaatagacaattctacactggtttcgtaatccaaattatggtgccaaaacaggccaaacctgagacagctgatacactagaagtattgacccaaggtagagtgtgtccatgacatcttttttggggtagcttttaattttgacataatttcaaacctacaaaaagcttcaataataattcaaagattcagcaattgtgtacattttgcctagttgctttttattatctatttatatatttatgcacattatttttctgagccatttgagagtaagttgtagaccctatgcccttttacctctaaatacttcagtgtgtacttcctaaaaacactacagtataatgatcaaaatcagaaaatttaacattgctacaatattattatctaaactacttcccatattctaattttactaatggtcttatacaatacagctaatattcccacaggtcagtttccaatccagtctcacacattcagtttgctgtcatatctttttagttgcttttaatctgtaacggtttctcagattttctttgtttttcttcattttgatatttttgatgaattcagatcaattatttcatggactgtccctcaattttagtttgcctgtgttcctcaagatcgatttagactatgcatcttcagccggaatactacagaagttatgtgtctttttcagtgcactttatcaggaggcactttatcaggatgatgttgatcatcccattactggtgatgttaacctgattacttaatttaggtggtgtctgccaagttcctccactggagagtaactgtatttatctcattgtaattaatacataacattgggggagatactttaatctatgtaaatatcctgttcttcatcaaagttttacccaataattttgacatccattgataaatgtcgtattccatcattgtttctgcatttactggttgacattttattataagaaagaatcttctcttcttcctcatttatttattcattcaattatttatatcagtgtgcacatatggatttttattttattcaattagtatctataatattcatatcaatcaatctgtctatctaaaaccataaattcatactaaactctctaattctaatccagtgccacagtgttaattccgtttcttttttaacttttccatatttgtaatttccttctctgacagtgaaaaaactgccttcccattatcctcatgacatctgtttatgtgtttccttcactgacttgggtggccatgtcaggtatagagtgtaactcaaacttagaaagccaggattttctagaatttaccatgtagatgtgctttaatgctttttagttgaatgcttttttgaagctggaggtggatctgatcatagtgtcactgtgagtccagcactgccttgactacttatgtgtattcatgacctcaaaacgttagggctgggtaccaggatccagatggaaagcagatctttgtgagccagatatagaaaggagcagtgcacaatgggatggatgtccttgaaaaacaaacagctggagtcagaaggccacagagctgataatttccaacatcttttaagatcacaacttctgcaaaattgcgtgcaggaaaattaggctgtatctcttagtctcatgttcttccccataatgtggaactgattggcatattccctgtactcctataaaggcaaatggaaagtatcctggagttctttaaaggaaattctcagttgttagagagtgtctctttctttaagaaatgtgaagagaaggaaactgcagttgctgtgaaacaaagtgtttactttgtgaaaaaatatttggggccattctagagcctctattgagaatattatcttccctgtagccatttcttctccagtggggctgttattatgcctcagtacctcaagatcatgaccatgtggtgaaattgtatcccctgcttactgatgacgcttcccaaacaatgattcttttgcctttgttaaacacattcacaagcttttgaggctaatgccattctctgttttagcatcttctacacctcctgttacttccatctactctccatattcgctacccttaatttattgaatattttgggatatgtatcatggtcctcctctctactccaagacctgctgttatgctggtgacatcaattggacatggactgtggacaactatatatcttgactatttcattctttgccatatcatcctaataatcttctcttccattctactttggccaaacactgctaccattatattaataccttctgcttttccatcttctataactgctactgaaaatgcttcacctggccgggtgtggtggctcacgcctgtaatcccagcactttgggaggccgaggcgggcggatcacraggtcaggagatcgacaccatcctggctaacacggtgaaaccccgtctctactaaaaatacaaaaaaattagccaggcgtggtggccggtgcctgtagtcccagttactcaggaggctgagacaggagaatggcgtgaacccgggaggcggagcttgcagtgagccgagatcacgccactgcactccagcctgggcgacagaccaagactccgtctcaaaaaatagaaaaaagaaaatgcttcacctcccaaattatgaattcatcacactctctgattacaacctccttttatcccaactgtgcctatatttgactatatcaggtcttccagtctactgacctctgctttctccaaactcacaagcccttgttttatttactttattgtccaattcagagtctatagtctatcatttgaacatgttcttattaatatttctgtctttttggtcagacacacttgcaaaactctagttctgtatgatcccaactcttaactttctttgtgcttgcacttgaacagccaaatattgtagcagaaagttatgcagcaaagtatattgtttccactataaattcatggtttcttatatttaaatgtcccttactactacctcataattccattatacttcattggttaattcacttcctaccacccatacatcaaagcttctccattttccttgaagctccaatgtccttctctttctcgatttttactattagtatcctggtccaagcaccatcatctcccactagagctactaagattgtctttttttcttttcatagacttaatttcttaaaaaaatttatttccatagttttttggggggaacaggtagtatttggttacatgaataagttctttagtggcaatttgtgagatttttgtgcacccatcacctaagcagtatacactgaacccaatttgtagtcgtttatctctcgcccccctcccaccctttcccccgagtccccaaagtcctttgtatcattcttatgcctttgcatcctcataacttagctcccacttatgagtgagaacatacgatgttgagtttcccattcctaagctacttcacttagaataatagtctctagttccatccaggttgctgtaaatgccattaattcattccttttcatggctgagtggtattccatcatatatataaatatatgtatatatgatgtgatatatatgtacacacatataatatatatatatacatatatatcatatctatmcacacacacacacacacacacacacacacacaacaatttctttatccactcgttgattgatgggcatttgggctggttccatatttttgcaattgcaaattgtgctgctgtaaacatgcgtgtacaagtatctttttcacataatgacttcttttcctctgggtagatatccagtagtgggattgaaaactgaatgaaatggtagttctactcttagttctttaagaaatctccacactgttttccgtagtagttgtactagtttacattcccactagcagtgtagaagtgttccctgttcagctgggcatggtggctcatgcctgtaatcccagcactttgggagcccgaggcaggtggatcacctgaggtcaggagttcgagaccagcctggccaacgtggtgaaaccctgtctgtactaaaaatacaaaaagtagctgagtgtggtggtgggcatctgtaatcccagctactctggaggctgaggcaggagaattgcttgaacccgggtgacagaggttgcagtaagccaaaatcatgccattgaactccagcctgggtgacaagagtgaaactccatctcaaaaaaaaaaaaaagtgttccctgttcactacatccacaccaacatctagacttaattttttggaactattttgggttcacaggaaattgagcagaaagcacagagagttcccatgtatctcctgtccccacctatgcacagcctctcccactattaacagggtggctcactgattataatcatgaacttacactgacacatcattttcacccaaagtccatagtttacattggggtaaactcttggtgttatatatcttgcgagcattggcaaatgtataatggcatgtattcaccattatagcaacatacagaatagtttcagtcccctaaaaatcctctgtgctccacctgttcacacctctctccccctaacccctggcaccttgcaattgtcttttaagtattttaatcacatccactctcaaatccattcttcacattgcaaactactcttttcaaaattgagtctgattttatcacttctctgcttaaatctctttaatagattcctattgttctttcctttgtgtggtgatttcaaataatagattcaatttctttaatagatactggactattcaaactttctgtttcttcttgtgccagttttggtaagttatggctttaaaggaagttgttcatttcatatatgttatcaaacttattggcacaaagttgtatatgatatgctcaagctgtcttttagatatccttaggatctgtaatgatgttctctgtttcattcctgatactgataatttatgtttttttcttaatcagcattgctagaggattattaattctattcatcttttccaaatatcaactttgaactttgttgattgttctctattgtatgcctgctttgtgtcccattgatctatattcttatttttccttccttctacttactttgtatttaatttgttgctcttttactagttttctgagtgggaagctgtgatggttgactttaacctttcttattttctaatttagtcacctacggctagaaaatctcctctaagcactgcttcagctaccacccagaaatttttcttttttttttttaataaaaaccactttttgtaatcccagcactttgggagactgaggcaggatgatagcttgagcccaggggttggagaccagcctgggcaacataaagagaccccatcgctaccaaaccaaaaaaaaaaaaaggaaaagaagaaacatatgcaaaataaacaaaatagtataacatttatgtgtccaaaactcaccttcaacaatcatcactatcctgtattttttcatctataccttcacccatttctcacatccctaatttggtggtggttattattaattttcaattctgtatttttaggtacagttacacacgttgaaatgcccatatcatttctctataattttgataaaaggacccctacaatctagacttctatcatgatataaaatagggattagcaaactatggcccatagcctgtttttacagactggaagcaaagaatattttctacattttaaaaagggttatgacaaaagaaaacaacaacagaaaccatgtattatctgcaaagtccaagttatttattatctgtagtttatagaaaaagattgctgaccctgatataaaacattcccttctctccaaaatttcacttgtgtcccttagaaaatttgtgttcaccgaaaaccagaggcaaccacagttctgtttttctgtttgtttgtttaacttgcattaattttgctccttctaaaacatcatataagtggaaacagacaacagaaagactgtgatattcatccatgtataagtagcttgttcctttttattgctaagtagtattccattgcataaatatagcacaatttaattatccattttcctgctgatggacatttgggttgattgcaattttggctattgtcaatataagtgcaatggatattcttgaaccagtctttttatggacacatatttgaatttctcttgagaatttctcctagaaataccagggagggaatttctcggttaaagaatagtatacacttaactctataacacactgtgaaatattttctcattttactttcctgcacacaagttatgagaattccctttggtctacatcattgccaatatttgatgttgtcagttaatttaattttagtcattctagtgacttgatgaggttatctcatagtgttttttatttttaattctgctaaaaagacataaaatttaccaccttaaagtgtacagttaagtagtgttaagtatattcacattgttgtacaacatatctctggaactttttcaccttgaaaaactgaatttctgtacccattaaacaactctccatttccttcttcttgaagttcctggtaaacaccattctattttctttttctatgaattttcactacttcgtatatcctatataagtagaatcatacagtatttgtcattttgtgactcactcatttaacttagcataatgtttcattgtgtttataaaatatgttttctattcaggtataatcaacataaaataaaatgtacacatgctagatgttctgttcagtgaattttgacaattgcatgtatctatgtaaccattctccaaaaaagttactaatatgttcattacaccggaaagttcatttgtcctccttttcagtaatttatcctatcccataggcaatcactattctgatatctattaaaataaattagtatttttttctgttctttgattttatgtaaatggaatgatacagtgtcttgtgcctgtcttctttctgtcagcacaatgctttttaagattaacatatgattttgcatatacctgtaggtcactttttaaattgcctagttgtatttcattttatgactatatcacaatttatcattctcctgttgaacatttggcttgattctaattttttagaagagttttttttgacaattttatgaataaggcaactataaacatttttcattatggtaaaaaaaatcacataacataaaatttaccatcttaaccatttttaagtatacagttcagtagtgttaagcatattcacattgttgtgaaacatatctccagaactttttcatcttgcaaatcttaagctttttcatcttgcaaatctgatcttgaaaatctccccttttctatttccaacagcccctggtaactaccactctttctgttcctatgaatttgactactttagatatctcatgtaagtgtaatcatatagtatttgtgtttttgtgactgtcttatttcacttggcataatgtcctcaaggttcattcatgttgtagcatgtgacaggatttccttcctttttaaggctgagtaatagtccattgtatgttattcatttgttcattgttaaatgtttgggttacatccacctcttggctaacgtgaatagtgctgctaggaacatgggtgtagaaataccgctttgagactgtgctatcacttcttttgtacatatatctggaagtaagattgctggctaataagatggctctatttttaatatttttataaagtttcatactgttttccatagcagttgcaccattttacaatcccaccaacagtgcacaagtgttccaatttctccacatgtttgccaacacttattttctgtagccatcataatggggttaaggtgatatctcctagaggttttgattttcatttctctattaattggtggtgttggccatcttttcatagaaagctataaagatttttatatatgtcttttgtgaacatatattttcacttctcttgagtagatacataagaataaaactgggtcatagagtagttgtatgtgtaactttatgtgaaacatccaaactgttctccaaatcagttttgacattttacatttccatcggaaatattccagttgctctaaattcttaacatttgtctttttgatatttgcctttctagtgtgtgtgaaatggtatcttatactttaatttgcattttcttgatgactaaagtttttgagcacccttttaatgtgtttacaattcacttgtatatcttcttgtgtgaagagcctgttcaagtttttgcccagtcttaaacattgggacttttttgtatttttgtttttaaattacagacattctttatatatcctgaatagcctttgctgaactatttattttgtaattatttttctcaatctgtggcttgtctatgatgtcttctgttgagcaacatttttagtttcaaggaagtccaattgtccaatttatcattttattttcccctccaactcccctccctttccctctccttctccctttttcctccccctttgtccctcctactttctttctctttgtctttctctctctctctctttctttttctttctttctttctctttctctcttcttttctttcttctttctttctctttttctctctctctctctttccccctccctccatccctccccctctctctttctttttcttcttcttctttttttttttttggtggcctaagaaatccttgtctagtccaagattctgggtttaggcctatgatccattttgaattactttttgtgtagagactgagacaatgatcaaggttcattttttgcatatagatacccagggttccagtaacaattgtttttaaaaagctttccattgaattaatgttgtaacttggtgaaaaattaactgaccatatatgtgtgcatatatttttggagtctctgttctgtttccttcactcattagtgtaaccataatgccaatatcacactccgttggttatcataactatagagtacctcctaaagtcaagtggtgtaagcctctaactttttttttcaagattgttttggacattgtaaattctttaaatttaaaataaattttgaaatcagcctgtctattacttccacaaggttttctgtaatttttgatggggattgcaatgaatttatagagacatttaggtaaaatggacatcttaataatactgagtctttcagtccattaatgtggtatatgtcaccatttatttaagttttctttattttttcttatcaaagttttgatactattatacatgttgagtagaaatggtaagagcagacatctttgccttgttcctggccttagaggaaaaggaatcaatgttttatttttaggtttgatgttacctgaaagtttttcacatttctgagtttctatgattcttttaatcataaagaggttttatatttatattgctacctattgcaattattcagtggttttgctcttttattctgttaacatggtgaattacatagtttttgaaagaaatattaagcacatcctaatatccccgggatgaattccacttggtcacgatatattatcattttaatatattgctagacgatatttgctaatcttttaaaagaattttgcatctatgtttttaagaagaattagtctatacttttaatgtttgtcagggttatgtttggcttcataaaacaagtttggaagtctttgcctttttctgagagtttctgtaagactggtattatttattaaaatttttaataaatttcatcaataaaatcatttggtccttggattttctttgtggggatgtttttgaaaacaaattcaatttctttgctaaatatagggctcttaggattattatttcatattgtgccaagtttaatcagttgtgtttttcaagaaatgtcaaattcgttattgactttattagcataaagttgtttaaaaattcctttatcatcttactgatatccgtatgatctgtagtgataccatatctttcattctagatattaataattttttctttttctttttgtcttgatcagtcttcttagagatttattaaatttattactttgttttaaagaacaatgttttgattttgttaattttctccacattttggctattttctatttttatctgctcttattgttattatttccttctttctgcttatttttggtttattcattcttattttttgaacattctttctttttaatttaagcgacatatttacatttaagctctgctgtagctgcatcctgcaaaattttatgttatattttcattgacctttcagcttgaagtaattatgatttcattattcttttttgacccatgtattattttgaaatatatgcttaattaccagatatttgtggcccttctagatatcataattaatagatttctcatttaattctgttgtggtcaaagaatattatctgcaaatttaatcttgaaatttatcaaaaactttggccatagccaagcatgtggtctgtgttactgaacattccacatacatttgaaattaatgcatattgtacagttgtttggtatagagtcctatcaatatcaattaggtcaagatggttgatagtgtgattcagatcttctatatccttactgcatttttgtcaatatgctttatcaattaccgtaaaattttcctattttctaattctgtgagtgttttcttcaggtgcattgaagttctgttattaagtacgtacatattggtgtgctagtaaatgtttaacaacaggctttctgaaaaagatccctaatttggagcattttctgatttctgtgctgtgagtacctccattgtaactaatctggggctacccatgtgatgtcactgaacacagagatggtaagaaatatgcaaaatattcttcttatgatccagcacatcaaatattcttcttatgatccagcacatctttgcacatatacattttattattatgtcttattttatcattatgaaatgtccctctttatgtctgataatacttttttcttgatttctattttgtccaataataacatagccaatttagctaattagttttttgcatgatttactttttctgtactttttctttccatgcatttgtgtctttggattaatgttcatcttatttagggagcaggcatttgtgtcttgctttttatctccccattctgcaatctgtcttctaattgaaatgtttaggctacttacatttaaggcacttattgatacagttagatttctcatcatctattttgctatatgttctctatttgactcatctatgtctctgtttgttcctttgtttcccttttcttgctttcctttgggataaaagtgtttttcatatattccgttttgtttcctatattggcattttagcgatacatttttgcacgttttagtgactgtcctaggaattgcttaaatgcatcttgaatttatcatagtcttcttagaattaatattccacttctttacttaaaacataggaaatttgtaacagcagtgtcccatttactagcctactattctttgccctattgttatcatatgtatacctacatttattgtgaaccatataatatagtgttaaaatttgttttaaacattcatatgcatttcatacaaattaagagaatgaaataaaaatatattctgttatatttatcaacatatttactatttctgataactttaattatctcctaatagagccaagttaccatttagcatcttttctcttcaacctgaagatcctccccttaggcattacttgtattgcaggcctgctgatgatgaattttctcagttttcgtctatttgataatgtctttgattttgaatgatatttttgcttggtacagaattatgagttatctgtgtttattttcttttggcatattaaagatttcgtttcattggtttttttttttttttgcatttctttgtttctgatgagaagtcagccattattcatttctttgtatgtagtgtgtactgtttttctctgactaccttcaaaagtttattttcatatttcagggttttgactgttaaatgtctaggtattgctttctttgtatttaatctccttggtgggtcactgaacttctgagatctttaagttcatctttggattgtaggagtttgaatatgatatatgcagggcattttctttgtgtttattctgtttgaagttcaatgagctccttagaattttaagttgatgtcttttactaaattcacaaaggttttgaccactatttctaaaaaaaattgttttgctgcattttctttatatccttctagaactcaagttacctatgtgttagtctgtttgatattgtcccacttatcctttttccctctgtttttcagactgggtattttttattgatctctcctcaagttcattactcttatgtcatttcctaagcccacctagcaaatttttttacttcagttattatattttccagctatatactttccaattggttcatatttatagtttctttttctctgccatgttctatacccatatattcattttgcatatattttcctttaaatcttcaaatatatttataaaatctgtgttaaaggccttttctgctaattgcaagatttgtgtcattttgggatgaatttctattgacctttttttttcctggagtatgggtcacatttttttctatttctttgtacatctaaggctttttggttcattactgaatattatcaataatacattttagaaactctggatcctgtggtgttgctctaaagaactatttttttgttcttgtaggtaaacccaaattttactcattttagttgtctttcaaatatagttctacctccatttctgctttcggtcactcttcactgtcttcaaatggtttttagaatatttgattcatattttataggtttctttgtctactgagtatttaaagacagtgttcaattgtcttctgactttgttatgcattcccaagtatctaatgttttttattttatgctagatattttatgtaaataaatggtagaagctccaggtcataatttctaccagcaaggacttttctcttttcatttgttaggtggattgggtaaggaactaatcacattaatcgaatcaaagattgagcaggattgaagctgtgttgcagttttagttagactcagtccaccactaattctactgtttctcaggcatatccttccaaaagtctacaagtctctctcctccactttgaaagattgggatattcagactgtacttcataacctttttcctctactctcaatccatgctgcttccaaatttggcaaatttcttgaggaagacaccaaccgaatgtttgttgcaggccctatttcttcagtgagactttgtcttctaaatatttggaaactacagaagatctcaaacaattttacagaagctttctagtctcctctatagcccccagactcagaaaatatgctgtggggagaaaactagctcacatttaggcctcctgaaatttattaattgtgataccagtcttctacaattgccaaaagcattaccagtttttgcattttcccagcaaattctttctgttaggctaagcccaatctttggcttgtgctggaaatcagcagatgtcctcagggaagaaaatggctgacaacagcctggttatcttagaagggctcttgcatctttgagttttagattctttttttgcacctacatgtccccagtggttttttttttaatatattttttcaatttttctagctgttaaaagctgtagcatcaggaatggtggtctgccataacctactacaccctacttggtattcaatgtccctataatcatttttaatataaataaatagctacttaaaatgacctattagattctgtataatctggctcttccctgtctcttcagtcttatatcaccatcatatttccctcaaccgctctgcttaaggcacactggcttttacttagtgtttgggttgtgatatgctcccagcgcaaagcctttacctgttctattacaacccctaaaatacttttccttcccttctttgcatggtttaatccactcatcttttaactcccagatcaattcttacttcccatgaagcctgtcccaacttctctgattggtcaaagccccaattatacatactcacattatgtaactctcctccataggacttgtcagagtcgcaaattttgtatcattgtgtaatcatctggttaaaacaagaggtcagaaaccatgtaacattttgttcatcatttgtccccggtctgtctctcagggactggcaaataataggtactaaaaagttttttaaatgaataaaatattgctagtgggaaatataggatcagaagtctttcactagtacctggttaatgtgttctatatgaccattgacttctgggtgttagatagtgggtaggttgatacggggataggaggtcttgaacaatagctctttacaacaaaataaaaataaaaagaaatgcaggaaacagacatgaatcaccaattaactcatggaggtacaacattttcttgtcgaggccaggcacagtgtctcgtgcctgtaatcccagcactttgggaggccgaggtgggcggctcacctgaggtcaggagttcaagaccagcctggccaacatggtgaaaccctgtctctactaaaaatacaaaaattagttgggcatggtggcacgcatcagtaatcccagctatttgggaggagaaatagctatttgggaggagattcgcacgagaatcacttgaactgggaggtggttgtggcagtgagctgagattgcgccactgcactccagcctaggcgacagagcgagagcgagactctgcctcaaaaaaaaaaaagaagaaagaaaattttcttgtcaaaatagacagcaattgctgatatagctgcgggtgagcacttatgtggagaatgacattttcataaaggtatacatacccacctctaggatgggatttcagctgctgtggaagagggacacgtagagattaattctggtgttatgacatcctaggaacttttttcaagtgggtgaaggagtccttcagataacttaggtcagtatttgacttaggaacagatgtctctggtggctgtatgcttaaaggtgtcgtgttacactttgggagtctaaggcgagtggatcacttgagtttaggagttcgagaccagcctggccaacatggtgaaaccctgtctctaccaaaaatatgaaaaattagctgagtgtagtggcatgcacctgtaatcccagctactcaggaggctgaggcaggagaatcgcttgaacctgggaggcggaggttgcagtgagccgagattgcgccactgcactccaacctaggtgacagagtcagactccatctcagaaaaaaaaaaaggtgtcttgtcaaatatgaagctaacaaaatccttgagagacaggacacattcaactcttaaacatttgatggtagccagccagataggtattatggaagaggtaaagtatatgtctaccctgtaaatgctcatcttgctaaagctgatgttgcaaactttctctgcatcctggggttgtccagaatcttggtaggacatgactgcatgtaggcatctacctgcwctttatatgggatcttctctgttggttacagctgaggatggatgcctataaagatctatcaaagatctagacagaattattcccatgctagtaccattagtgtaatgctagatgttttaacaaatagaccttcaaatatgtaatgtctcaaacacagcagaagtttaattttcacccaaataacagcacaaggtgggtattcctgtactgttggcaggtgactctcttccaatatcatgactcagggacccaggctataaccatctcatggctctgctatgtcttagggccgtgtcatcatctgcattcacccatagaagtgggaaaataatatggaagagggtataaaagccttagcctagaaatggcacgtctcacttcctctcccattttattgcctagaggaaggggcatatatcggttcctcttctattccattgcttggaattcagtcatatggctacacttaggtccaagaaagactggaaaatatggattagctctctgcccaagaagaagagaaaatayatttgtgttgaacagctagtagcattgaatatgacaactttttactttttcttccaacagagttccagagcccagtagttttggctgcttgcttcataagaaaatagaactttaggagcaatgcctattttgctgtttgtgggctgagtttctgtccaccttaactggtttaggttgcagtggatgaagagaattgtcatgggtgccaggcccttatgcttagaaggcaaccttggtggtcaatagctgacattcccaccagggataatttaacctttgcttggatcatattctaagaagcaagctcatattctaagtcctatagtgtaattcatctcaataaatggcccaccatccgttccgtgttcaaaatagaataattctttatttcattctttcctcccctccccacacaagaagtcacgtgatttatagctccaaaatacatctcagatctgccttttgctgttcatgtacactgttaccattctaagcctatctctctatctatttagatagatatagatatacatatctgtgtaaacatgttgtaagtttctataattaataaattttaatggtgaaattcaccagacacttttcttcatcttacctgacctctctggtatttatcacactttcctgaaattctttctggcaggcatttttctcactttcctgaaactaatcctgtggttttaacaatatggttttaaataggcttttctctacttcctggcctttcttctaagtcttattattgcaggctgttcttccttttcccgctcttcaaatgttgatgtttcctttttctctttttctttatactttccttgggtaatctcatttgttcccactgattttacctaaaatttaattgcttacaattcccacatgtatttatactggtcagaactcattccttagtttcaaaccctgaatatacaactgtctttaaaatagttcccccttgatgttctgtaggtacctcattctcaatacgtctccaactgaatttatcagcctttccacccccaaatgtgcttttccatctgtcttaggtcagattccccaaaatctgagcctgagatggaaattcttgttcaaattatttatggagaaaatgctttcaggtaaagagtgagggaattaggataggacagggtaaaagttaagcaagtatttgatttcagctggaaactagcaacagtatgatcttatggggaaatgctggagcacaagttataccatgaatcttaccttgaggctaggaagctggacttttgtactgtcctcagtgagtaaattactgcctgaggcctgtgggtgggacctaacctctcaggtaaggtggctcaccattaatttgggctctaggacagtttttttttttttttttttgaaaatggagtaactatgagttatcagtcaacattcacagcagttgggggatgcatggttaaaggcatatgggtggggcaccagcatatccactattacctcatccctgaattccctatattaatatgtagcaccactgtctacccaggtatccaagtagaaatctgggagtgatcatggagtcttttttcctctctctcatccctcatttaagtagtaataataataaatgataattattgagtgcccacaatataaatttcaaattccatagcatggttcataaagtctcatgggatatggctcctgtccatttctccagtctggtatttaatattctcttccttacactccactgtggccaccctaaacctgttgtggttttctccacataatgtgctatcactctcaacccctctcatcatgtcatcatcacctgatcaactcttaattgtcctttgagagagtccacatattacctccttagggaagccttctctgactaccctagggtgaattagatacttaacatttgagctcttacagcatcccatgcccccatttttcagaacacatttcacaacaaaatacaattgttggattacttgcttatcacccttcattgaatgtgagctttttcgggacagtgattttatcttgtttgtctctttttctctagcatgcattccagtgtcttggatgttgtgaacatgcactaaatgcttctcacattagtgaaataaaatgaatgaatgcaaagagaaagtgtggccaaaattctaaatgtttcttctgaaaaaaattgtataagctctggcctgatgtttatatagggaagctattttaatagatgctaggtagatgagtattcatagaaagacaacctattctacattttacggtatcatctctctttagtcctcttgagccactgagctccattccagaaagtcccaaaggaatcagagagaaatctgcagcttgagtttcacttataattatgctaaaagagatccctctctgaaattttcccctttggccattgaatttgttttctactgctgctgtaacaaattagtgcaaacttagtggcgtaaaacatcactaatttattatcccacagttctgtagatcagcagtcaatgccgactcagctgggtgttttgcttggcatctcaaaactctgaagtcaaggtgtcagttgcactgtgctcttatctggagacctgtggcagggggcagggctggggtgagggggaaccatttctaggtttcttcaggttgcctgcagaattcagttcagtggggtcataggatcaatgtattagtccgttatcatgctgctaataaagacatacctgagactgggtaatttataaaggaaagaagtttaatgaactcacagttccacatggctggagagggctcacaatcataggggagggtgaaggggaagcaagacatgttttacgtggtggcaggcaagaggacatgtgcaggggaactcccctttataaaaccatcagatctcgtgaaacttattcactatcatgagaacagcatgggaaagacctgcccccatgattcaattacctcctagtgggtccctctcacaatatgtgggaatcatgggaattcaagatgagatttgggtggggacacagcaaaactatattaattgaggtccccgctttcttgctgggtgtcagctgagggtggttaccagcttctagaggctgcccacattctttggcttatagcctccttcccccatcttcaaagccaacaatggtctgttgagtcctcatattttgaatctctctgatttatcttctgcactcttcttttgtttttatgggatcacgtgattagttagattaggctcaccctgataatctcctttttgttgtataacaaaacacaatcacaggagtaacactaggggttggagatcatcatgggagtcaaaattctgtcaaccacacaaccaatcataagaagggtcaagagaaggttatgtgccctcaactgtggtccccagttgagacaggacagctgtgactctcatttctgtctctcatttccagatgaaggacttgcgtcatgagaatattaaccctttattgggtttcttctatgattcggggatgtttgccattgtgacagaattctgttcccgagggagcctagaagacatactgacaaatcaagatgtgaaacttgactggatgtttaaatcatcactcttgctggatctcataaaggttaatgggaagactgaggaaatcttggattttctctgtagattagaactttaatgttttgggatattttattttcctcagattgttgtgatcatttcactccttactttctgtattagtccattttcatgctgctgataaagacatacctgagactgggaagaaagagatgtttaattggacttacagttccacatggctggggaggcttcagaatcatggcaggaggtgaaaggcacttcttatatggtggtggcaagagaaaatgaggaagaagcaaaagtggaaacccctgccaaacccatcagatctgatgagacttattcactatcacgagaatagcacagaaaagaccagccctcacgattcaattacctcccccgggtccctcccactacacgtgggaattctgggagatacaatttgagttgagatttgggtggggacacagccaaaccacatcattccacccctggcccctccaagtctcatgtcctcacatttcaaaaccaatcatgccttcccaatagtcccacaaagtcttaactcatttcagcattaacccaaaagtccacagtccaaagtctcatctgagacaaggcaaatcccttctgcctatgagcctgcaaaatcaaaagcaagctagttgcttcctagttacaatgggggtaaaggtattgggtaaatacagctgttctaaatgggaaaaattggccaataccaaggggttacagggcccatgcaagtccgaaatccagtggggcagtcaaattttwaagctccaaaatgatctcctttgactccaggtctcacatccaggtcacgctgatgcaagaagtgggttcacatggtcttgggcagctctgcccctgtgactttgcagggtacagcctcccttctggctgctttcatgggctggcattgagtgtgtgtggcttttccaggtgcacagtgcaagctgtcggtggatctggagaatggtggccctcttctcacagctccactaggcagtgccccrgtagggattctgtgtgggggctctgaccccacatttcccttcctcagtgccctagcagaggttctccatgagggtcctgctcctgcagcaaacttttgcctgggcatccaggcattcccatacatcttctgaaatctaggcagaggttcccaaacctcagttcctgacttctgtgcacctgcaggctcaacaccacatggaagctgccaaggcttggggcttccgccctctgaagccacagcccaagctttatgttggcccctttcagccacagttggagcagctgggacacagggaaccaagtccctaggctgcacacagcatggggaccctgggcccagcccatgaaaccacgttttcctcctgggcctccaggcctgtgatgggaggggctgccatgaaggtctctgatgtggcctggggacatgttccccatggtcttgtggattaacattaggctccttgctactcatgcagacttctgcagccagcttgaatttctcctaaaaaaataggttttgcttttctactgcattgtcaggctgcaaattttctaaactgttatgctctgtttcccttttaaaacagaatgcttttaacagcacccaagtcaccttttgaatgctttgctgcttagaaatgtcttctgccagataccctaaatcatctctctcaagttcaaagttccacaaatctctagggcaggggcaaaatgccaccagtgtctttgctaaaacataacaagagtcacctttgctccagttcccagcaagttactcatctccatctgagacacctcagcctggaccttattgttcatctcactatgagcatttttgtcaaagccattcaacaagtctctaggagagtccaaactttcccacattttcctgtcttcttctgagacctccaaactgttccaacctctggctgttacctagttccaaaatcacttccacattttcgagtatcttttcagcaatgccccactcgtagtaccaacatactacattagtccattttcatgctgctgataaagacatacccaagactgggaataaaaaagaggtttaattggacttatagtttcacatggctgtggaggcctcagattcatgatgggaggcaaaaggcacttcttacatggtagcgggaagagaagatgaggaagcagcaaaagtggaaatctttgatgaactcatcagatctcgtgagacttattcactatcatgagaatagcatggaaaagaccagcccccatgattcaattacatccccctgggtccctcccacaacacatggggattctggaagataccattcaagttgagatgtgggtgggatcccagccaaaccatatcactttccttcccaagtttttaccccaccacccttctcacagtccttttgtccatatctgttatatgatacagatatggaaaaggtttgcctgtcctctccccagtttgaggtccagatttttctttacttcctgttgccattaagcactcttctgccttaagcgatcctttctttcatccaatttctctgctttgtggatgtgggaaagtgctcattcccagattatttggtgctacttagccctacctcctagttttcacccttctaaatggtggctcagtctagaactaggtgagaggtctttacatacaatggctgtgtatgtggaactcagtgccactggaaaaccaaaagaccagtggatctatcaggcatcacctttattctctgagccaaagattcctgacagccaaggtagggttcatagatgagtcccatggaggagcttctggggatcccatgaacrccatggaatgatatgcaaattgtgtatatgtgcattttttacagggctgatctgcatactcaatgactttttgggcttcctgcatactgatcatagtcttgacctttttctgctagcctaatcctttttcaggggccttgaaagggaaagacattctctcatgccaattccctttaagataggtgtgattagcctccttttacagaggctcagggaggttaaatgaggtactcgttgttatagagtgtctggcacatatagtaggtactcaataaatatttctcagccaactattaggtggcrgagctgataataaaatccaaatctcctgattcttattctagtactttttctgctcacactgtaagctaagcccagtgagttaagggaggagcctctatatgacaatcccctcaaggccatgatgaatgaaaagcaaccgttagacaacatggggggaatcttgcccactgtagactctactcagaagtactgaagagtgcagactatccaagagcacagggtgaaaagaattccaagtacaaaggggtgtcacactgcaaaagagccagatacttaaaaagacttttagcaaacaaagttctgaaatgactgtactagaatataaatgtatgtatatacagaatgaataaatccatctgaacgagagtcctggtcacatttgaataccatatgaaggctgccaagcaagtgcagagatcggcactagacagctttcttctttctggttgcctatttttaattacaaaaataatatattaagtgtaaaacgcaaatgacatatattggaaaaatactcgcatttactcaaccctctttcttcatactccccctcaaagttaactactgctaacaatttggcaacccaccttgtaattaatttcttgtgtatttatatgcattacagatgacttttttgtttgttaaatatacatgctgtcacatagttctgtaattactatatttcacttactttatggattagagttgtttctatgtcagctacatacagatctatcttattctttttaagtgctgcagaatattccctagtgtgaatgtaccacactctagccagtcccttattgatatttagtgcatttccaattatatactattataaaagcaaagctacaacaagcattcttatctttgtctctttgtgtatacatgcaagcatttctctggaggagaggtagaacccctggatcatagggtacacatagtttaaattttgatagctattgccaaattgcccatgcacaagtttgtcccagtttccattcttgccaataatgggtgagagtgggttagaacttttggggaaaatcaaaatctccaaattcctggtaattatatgtatatggatccattctgtatctgaaatgttaataaatctagtaacacataattctctgcacacacaagataacattctttatcaaagcataaaattttagagctacgagggatctgaaaactgactcaggttgtcaaaggtttactttgcctgcatagaagagaaaaaagctgagttctggatcataatagctcatgccattaacaatctcagaaattggtgttaaaagcacaaaatagttaaatgagttgctaaataaatcctgttgtgtcatctacagggcatgaagtacttacaccacagagagtttgttcatgggaggctaaagtctcgaaactgtgtggtagatgggcgttttgtactaaaagtgacagattatggctttaacgacatcttagaaatgctgagactctctgaagaggaatcttctatggaaggtaagcaatgaattgtacccttctgatgcacacgaggtaactccaaagttcaaatgaaaatatgcactgaattaaagcctcaggctgatttcaactctccacttttgttgaaaatccagcctcatttccaagccaagggacttgaatgaagtaggcctgctgtaacctcggcccagccaagctttctgaacaaagccagtgtaataatgttcagttcctgctgtggcaggattaggatgtattgtttggagaccccagcagtccctggaaaaacttgctgagcactaggcacacagtaggtgctcaataaatacttgtcaagttgaatggagagtaatttggaagctggacccccacaacgtacattttagaatgggacgtcactagagcataccagcacagtctctgtcagagaggaagaagcgaggagtgatctctcagcaaataaatgctctgtggtttatgtgggaaggcttcaggcagaactgtggccttctagcaaataagtagccatgcctgtgtcaaagtcaaataaaaatatagggacaaatctttaaatgaaacattttatttgggaaaacagaatttcattttgtggcatgcacatagaccagggtggtccttggtgtgtccaaagaacacagaaaagttgggggttttattggaaagagaaatgttatatatggtttttaaagaaaactcattggcactaccaaagttttggggagcaggaaagctccgattggtaagtgatggctgtaggtaaaactcgtcttagagtcatgacagtttctttcatcagctactaggtaaaactgatattaagattatagaaggtcatttcggtatctggcttgcaagattatccctgggcaggcacttgtgccccaagtgcttttctttttctcccatggtctctggactccaatttaattggatataataagataactccagttcatatcatcaattttcacaccaacaacgtccattttgtgtttttgtcttctgtctagtgcaccagtggtagcactaaacaatgccagtaggagttataacagatcaaagaaataggagaaatctgagatgggggtgggtgggtgagaaccagggaagaaggagcagatagatgagggggagaaagaggaaaaagaaagagaacaaatatgatgaaatacgtataggaaatgtgggcattaaatgttttaaccaatattgcaagcataaagaagagagatagtgacacaaaagacagaaaagcaaacagcccaaaaaaagatagacagagacagagagatgcaaaactacatcatatatccatattcttaaaattacctttggcgtaagttttaaaactgctgactttactacataaaagaaaagaagaatgaaagacacacagagagagagagacacatgcatagacagagagtccagtcattggtggtatctggactttataagactttgctctttataagacttgtgggttattaaatttagggagtcatctagtccaattccctccttttacagatgagacaactgaagctcatgatttgctccaaacctgcagtgacttagcagcagttctaggacttcaaattcaggttttctgaattctagcccctatcctgtagagagggcaagtacttagtattttgtcaaaatcaattctctataaaacacaataccttgggaggctgaggtgggcagatcacgargtcaggagttcgagaccaacctggccagcatggtgaaaccccatctctactaaaaatacaaaaattagctgggcgtggtggcgcgcttctataatcccagctactcaggaggctaaggcaggagaatcgcttgagtctgggaggcggaggttgcagtgagccgagactgcgccactgcactccagcctgggtgacagaacgagactctgtctcaraaaaaaaaaaaacaaaacgcctagcttctcagagttccatttaatttccagatgggcaactttgaaacttaagaaaatctagtcttagggtgggtaaaggatagctgcagggctctcttttctggttttgtgcttttgggtggactatgtctgtctgtctcctctgtctctgtctctgtctctccctcttatcatattactccattctccaaattgcagtggcagtatggatggtcagtccattcttcacacactgcagccagaaggagctttctaaactgcaaatctgatcatgttacagctgtgcctaaatctatcgaatggcttcccattgctctaaggataaagatcaaattcctttacatggcttacgagctgagccctgcatggcctggaacttgctgacctctcatgctaaccactacccccctgctttatgctctggccatgctgaactgcttctagttgtttatttacattacaccaggctgtctcttactactaaatctccacacaagctgtgtcttctgcctgggacactcttctcttcccactctttcatatactcatctgggtctggctaaattctatttcttcagggttcaacttaagtaccactgcctcaagaggctttccatgacccctatgctgggctaggttgccctctttataatccttcagggccctgaactttgttgtgataccatagttcattagcattactcattcaattaaccttgtctccccccacccaaactacaagctctgtgggggcaggaaacaggtttgcctttctcagtgcctttcacagttcctgacagaatatttgttgaatcaacaaaagaacaaaataaaatgaaataaaggaacttgtctccctaccttagatatgaggctaaatgaatctcataattgaaaggccattggatgtcatctgacccaacttccattttatagatagggaagccaaggttcagaaaggtagctacttggtgaccaagctaagattttgaacccgggtctctagacttccagttctgtgttcttttatactataccacagtagctctccaaagtcaattctatcaccctagcaaagctcagagttaatagtggctccagcagataaaaaacaaaccaaagtaatttctctagttttcccgagagttcaactctaatggtagttagtggctcttacttggttctggagtggagatgaggaaatgggggcggattgtaaatgtattcattactgtccactctcgattatataagtatagtgcagaaaagcctcattatagccattaacaacatacatgtaagtgctctttggaaatactattttgtaatgattgtatttaatcacccagcttttaccagagagttttgccctctttttccatcttgtgcttttaaatgtgcagggagaaaggatgccaaaaagaagcagccacatgccatttttcctgctctcaaatattcatccttgcactcctctccaaaaccatggtgcctaaaatcccgcaactataaatgtattcctttgacattcaatcattcaagtatcattcattgttttccgtttgatttgtaaatataaatcttcctaggcagggagacataggggcaaaatcactatagtgagtgttttggagactttcatgggtgtgagtgagtggtggatggtgggtggaagctcagaggggtctggttgggggacaaagcctggggacacttaaagagcaaagagagaagatgggtacatgattggtggtgaaactggaatttcttatttcaccattttgatcaggattggctgaaaataagaatttccatggtggatttctctttcctgggttttgctaacaaaccaaaataatctctcacctttcacccttcttcctatttcataggactttgtttcttggactctcttcccaatacccaaaatttaacaagatgaaaagttagccattactttctccctgataccctcactcttagcagacatttgtctccaacctcactatctggatgtcaccttgttgtttactccaactccctctcattctcaaggcacagggagcctatccttagccctgtcacttccttctccattgtagccttccagtgtatctggttgactgtgttgctgctactacccccacccccatttaggcccctctcacctcactacctgctcttactgcaataacttcctagctgatctccctgattccagcctctctccttcaatccagcttgtgcaggttgccagattaatcttcccaaacagggctttcatcaaatccctctccagctccagcacccctactgccttttgtattcactccaaatgccttcatttggctctcagggcctctcaccttctgcccccattcttccagacacccgccctcccccacttcatcaaccccacttctcatttctcattattccttaacagagcccttctcttcagtcaagctaatctgcttaccaccacccggcatccccccacccgcaatttgctcctttctgcctcttgttcttttgcacatgctgttctttctagggagaaaaaagcccttaccttctcagctccagaaagttgcatccttgaccttcctaacaagcacatttaaaatttaacttttccaggaagtcttcctggattaatttgatcagctcagttttttttttagtttgaacctgatgaaattgccaatatctaactgtttttgattcacagaaatggtaactttatataattcaatctaaaacactcttcttccagcttttgagtactgtatttctattgttaaattatatttctttatacattgcttacagtgccccccacccaagaaaaatttctgacattctcactgccataaactctgaatgcagaaataatgttttgtccctgacggggcctgaaatgcagcagagcacacaatgggtgtttaactttgacctttaatggattcatttccctttactatgtagtggccctcatcattccctctcttttattgcagttaggggtgcatatgtctgtgtttccgactggtctgtgaactcctcaagtttgattcatctctagcaccacctctgtgcctagcacagggcatggtacatagtagaccatcaataaatatttgcagaactgagttgaaggaattgttgcacctttttgcactgcaaggaataggaaggctggggtaactctaatccttttagaggagacctggagaaagcaacttgtgaatctcttagccccagcacaatcaaattaccagacacatatagatctcagcaaacagcaaatccatggcaaccagtgtggtagcacacttgcctttccctggaaacctgccaactgctacttgcaggctcaagaaagcaagcaccagagaatttctatactttgagcttctgtgccctttcccacatcgctgctgtgtctgcctgcgtggtcctggggtggagagagtagtatgttttctctgttcataattccttagaagaatagattcagaccctgggggatggggggcactagcatggcagtctgtctaataaaaatataaggcagtcaataaaacagtaccctctgagcccttgagggcattgcagatattgtcagttaatcctccctgcattcattacacaatgctttctttttagagctgctgtggacggcccctgaactgttgagagctccaagaggcagcaggttaggttcttttgcaggagatgtctatagctttgccatcatcatgcaagaagtgatggtccggggtaccccattctgcatgatggatctgccagctcaaggtaagcgggaggtgagaaaagggccccaggggtccaccatgaccgagatcatcagaccaactcaggctgtcatgattttccagaagagtgttagtgctaacagcctgatagtctgcaagcagctcaagttatgtacaggtgggacttatagccagacagctttaggcatctggaagaaatttcgccacccaagaagctggccttttttcagactgtgatgtaaaacaagggcctacaggactgatgccagtcccttttgtttttctttttaatttcacagtcccctctactcctttgagacactccctgccaagtattttagtatccctcatgatgcttctggatgtcaaggccttaccactgtttccctgtgacatgctccaggcttccatccaaatctcccaccaagacacttggctattaggcaatatccatcaataatgacaaaatcagtagacaaaactttgaggggaaacaggatatctgtatattctcaaagtatgaacccacaagatacttacaaattgcaaatggaaaaaacagagtttacaagtagaggatcctgtagacaccaccttaaacaagcaatcaagattaccaataataagctattaccagtaatacagcacacccatgttatgtacccattgacatgatacactaagaagggcataatgtcacctcggtgttattcttgacaaaaaaaaaaaaatacataacctcaatctaataatgagaaaactttagacaaaccccagctgacattctacaaaataactggctaggactaatccaaagcatctaagtcatgaaagacaggaaaagaatgatgaactatcgcagactgaaagagacaaagacacaacaattacatgcaatatgggatcttgaattggattgtggaacagaaaaaggacattaagggaaaactgatgaaattcaaataagaaccctagtaatattattgtacaaatgttaatttcctttgtactatttttctgtaagttattaacaataggggaagctgagtgaaggtgtacaggcaattgtactatttttacaacttttctggaagtttaattttttttcaaaataaaaacttttaaaaatgaaaaagaaagaaaaactagaaccacttagctaggctttgtcccactcagggttccacattattcctctacttaaagccttccaactgttcctcatcactttttaagtgaaggtgagactcctcccatgacatacaaggccctttacaatctggcccctagctacctctccaggcttatcttctgtcactctctatatcccagctaaaccacatgactggccgggccctgaaagtatcatggtctctcccatctctgtgccttttcacatactaggaggtggaatttttccacctcctcccaatcttgcctcatccaactcatgtcaccttctctgggaaaccttctctgacttctttagtgtgggtcagctgccttttctatactcacaagtgcctatctcagctagagcacttatattgtttgccactgtttattgcaattggactgtgagatccttaagggcatgaatcatgctgtgcctaagcagagaggtggcccattcaacttgatggtgttctgagaaagggacaaagacttcatctgccagagaatggatgaggcagtcaagtttcagggagtacatgctcatggaatctgttgtactgagagcacgatgctgtaatggagaaatcattactggtacagcctgacctgggttaaaggaacagaatgtgtgatgtcacaaggagctgagaagtcagaggcaacaactggaattcttttatggaggcaaggggctcgtattagggataaagcagcactgttggagtgttatagccaattcaggggtgggaaggtcacactggtggggcaagcaaagcttggttcctgatgtggcagttagaattggaggtggtggggaggggattaaagatgagaaatgagcctgaagagatagggacaagagcctggattttactctgtgggtgatggggagtcataaaaggcttttgagcaagaaagtgatacggccagatctgtgttttaggaaaggtttggagaagggtaggctggaagcagagagatcagtttgaggccccagtgtgggttgctggggatattgagagataatgatttttttttttttcctgctgccagggagttttctttttgtaaaaaggtcagtctgactgctctagaccttttgtcactaatggctgttgggtctgaatagggagtctaagaattcccacgtgaagtctgagacatttggaagcaggacagtgtaacaggttgagattgtctgggttcaaatttgaactctgtcacttactagccatgtgacctcgggtaagttacttactctcttcatgtctcagtttccctagctataaaattaaaataagagtgcctacctcacttgtttgtatgtgagaatccagtgaaataatgcatgcaaagcgttcagcacattactggtatatagtaaatattccactggaagtggagttcatggaccgtcaaccaggaggatcttgatgaggccttgaactgtttactgcagttcttaattccctttgcctagacaccaggtagagacctggacctgggctgggcctgggcttgtaagaagagttaagtgggtctattgtggggattggaaggcttagatgattggggatgggtgaggggagccaggtccctgaagttagagcattagaattgccatcagataggcagtatctaaaacctagcagaagcagaataaagtgcctaaatgataccaagagtccaactgattaatttctcactcctcccccattgcctaatgcagcttttgctcaaatatagtctatattcaggccacctaaggagagagcaaaggagatggcccttctgtgttatctcctaacctacccccttcttggctaaaagtcagttatctttgccaaatcttggtcattttttccatgatttgtaaacggttctcttctcgcatctggacagaaatcataaacagacttaagaagcctcctcctgtgtacagaccagtagttcctcctgagcatgcccctccagaatgtctccagctgatgaagcagtgctgggctgaggctgcagaacaacgaccaacttttgatgaaatatttaaccaggtaaggactctgaatcttatcattgcccaggagccttcctgaagtcagcctacacaaggctarctccttgggtccttgtcatattgtggaaggaacctcttgcaaggggtaagggcactcctctnggaggaacagcctgggagtggctactttgaggctcttggtgctggagtgtcatcagcacatccttcaagagcccaaagattggttctagtgttcttctgtgtctgaacctctgttccagaccatccacaatctgacctgatcaacctttcagagatggaattgaaccatcaggcatttgtaaggcaatggcattgaaactattagatgatgggtatcatggaatagatggggctcctcacagagccatgtttactttggggataccagagaactctcatgagtgtaccaattaggtaatttcaggttgtttttggaaggtcaggaaaaatatggagtgtttgaaagggtgttcaagatggaagaaagagaaagtgcaaatgtggcgtgcaaaagcaggagattccttaagtttccaggcaatggggtacatgaaaagtgataaccttcytccttaagatactgaatttctaaagggggtgattctctccctagaggtggggattgaaaggggagtgaaggaaaggacagagtgagccctgctgtggaagctaaggcgcaattccaatgttggagcatgcagtttaggctttgttgaaattacaggacaccaaaactgagggtgctcaccatgagtgctgtgtcagctctggcagagaggcttttgtgcctggctggagtacagcaatgagatgctttatgagtggcaggtatctgaggcggaaagaaagaaagagttggattgaaagcctgaggggccctgcttatgaagtcatccgtgtccccagctaacaatgcctccattagcccggctgagtttcttgaggacactcaaacaggtgttcaatagtatggaagaggcgaaggaccatgaaggtcaaatttctaaaaccttaccatgaggcaggagaaagagcatttgcccctgtgttgatgctagagatgttatttcagaaggcagcagagaagccagtgatagatagggggagtgtacatcatgagactttcaaacaagacattgctatagctgccctcactgaaatgcttcagtggaagtttaggctgtctgatgacaaggctagccacctaacttcctgcagttaataaaacttaagtgggaggaggaggaggagagggaggttccctgggttaggcaatagggggagcccaaagcatctaaactggctacgaggttatcctcaggactttgatggacctgcagatgtgaaccaggctcagaagggaaactcctagtgttggccttggggcattgggtgctaggtggagcatgtgtggcccagctatatataagaggttcactgggacagagccctagatgtctgtttagcaaaaccacctccgattttttgttgttgtgaacacagtcatgtgcatgttgactatagcagtacagaggggctacccctcatgattctaatactatgcctagctccctgttactgtagatagacaaggtcccaaaaaggcgtattgaaaatttgtgacatgcagacatctctaaggcatcagggcatagaatgggggcaaaatcagttgaattttacatcactctgactgaccaaaggacaggtgctagaggacaccactattcttggactccacggtaagaaataggggttgattttatcacgtggatcttgagccctctgtaagaggtcaaggaacctctcattgttcaaaaactggcaacatagtggcatttgaggataagaatgatttagtaaactgatgatccagaagagtaaaatggtactttgggccctctctccccttacctcacacaaaattggcctgggctcaagaccaaatcctgttgtcttagaagtggctactattcacgtgatagcatctcagaactgaaggagccggctcagaacacctttgctcaggcttgaaagaaccagaagggtaggggaagaactggtggggtcgggggtgggggaagaggtgcagtggtagtgccctgtaaatgggtcagggtgacagtgaggatgggtggtgacttttcctatttatatctgggttcacctttcctgccctggcattttggtggaatggatttgtgataaggggacctgctccatcatctctgagtttgatgagtaagcattttctggttcccttttctattttacttccagtttaaaacttttaataaagggaagaagaccaatattattgattctatgcttcggatgttggagcaatattctagcaacttggaagatttgattcgggagcggactgaagagctggaaattgaaaaacagaaaacggaaaagcttctaacacagatgctaccaccgtatgtgagaacacctgaggagtgtgaatccttataacagtgtgttctgttaaaaaaaaaaaagagaaagaaaaaaattacccatcaactaactgctgcctccccttgtcctgcaccttctcttctcctagtgggctttagtcacacctttaaatcaaagtaaaattggaaaccaagggagcagagcacacatcctaattttccactacctgtagatcatgctggtcatttaagtttttgtgcttgttttttctgtgtgtcacttcgtgactttgctaggaggttgaccgattaaaagaaagcagttctttgagctcctagaggaaagtagcaaggtcgtttttccaggtctttcctctcttagctgaaaaccttatctgttgctacagtttccaagttttccagggcaccttacttattatgttgtaacatgatcttctaggagataattaaggaaactagcctcatgaaagggcaatcacctgggagcattccccaggggtctgagttagaagtatagagagatgaaaaccctccacatgaaggcacagaccaggtctgtccagtgctgtattccagcacctggcacagttcctgaccgattgtaagcacttaacacttatttgtagaataaatgaacgaattaatgttttcatccatgtaacactttcttcctcatcatttattagcagtgatttttagaggtttatttggtgtatttttagcaggtgtatgtggcatgaagggggaccagtgtcatcttaggaatagctgtgtctgcttttcagatcagttgctgaatctctcaaaaagggctgcacagttgaacctgagggctttgacttggtcaccttgtacttcagcgacattgtgggcttcacaaccatttcagccatgagtgagcccattgaggtcgtggatcttctgaatgacctgtacacactctttgatgcaataattggcagtcatgatgtctacaaggtaggttaattagcaggaaaatatattccatagtgaaatttttatatgaggcccatccatatgtattctaaaattgaagaataaaatttatggaatattgttatttaggaataacaaattaaatagtacaccccttccattggtatatcactggaaatgagagccgggtagaatgcatgtaatttcccaatttacaaaatagcaactttcaacccagcaaaagattgccagtcagatttcttttgaactttttttctagaattgggactaagaagatgttgggaccaagagagttattgcacatcagtggctgagtactaatagtgtaggcagtactgtactaggcactgaaggggataaagaggaagtattggtgttttgcccataggtggtgactgctacagagttcatcttggtaaggtttgtgtagatctaatacatgctataaaaatttggtctcctccttcaggtactgttttatatggagagaacttgacattatagcagggaaatattagactcgaggctctttgggattgctacagggtaaccgaaaagctgcctattggtctgaggtctggggaagtgattaattgtggggtggcaagcccctgttcccaccttctctcactcctccagcctttgaattttcactctttctattagagtttgcaaaatgactgcattgactaattttgatgccatgcctccttacctttttttacatatgttgtcttgtctctaggcaaaaatgacgaaaaatctcatagctgtgcagggacatttctacattgtctgcatcatggatacttgtcttattgatggagaaagatgccccaggcatcctaaactttagacagcttctctgtcccaggaccaaagtagagctggagaatgagtagctccattcattggattcttcacagtagtctgaaatgttctagctctcaaatcacacacaagaaagtgtgtttatctcagattagacagggccttttcaggtcagatagagagcctcagggctaggccaagccacctaaatagggctcagaaataaacatcatacctgtcaatcagcaggagctgcaagctaatcaagaagcacacatggaaaccacgatgcaggaaaaatccatggaatcagagtacctgtcttaacttgttgaactcaagcagcctgaagagaaaaacaaatcactgaaagctaattcagttgaaactaaaatcaaagatgattcagcgtgggctgtaacacagctactggtttaatcaatccagctgattctgttcagacaattgttgggggtcttagcaataggccattagatattttggtacttaatggttgcagtagggagttaatgggctgttctcagaacagagcagggctatataaatccaaaaatgaaatttatttttttcagccctatttattaaaaacagcacagtgcaaaggaaataaaaattgaaccagcagcaaatgaccaaactcatttgtgtttttattttctttacctgtaaaatttgaatcacctcccctggtacttgataatctgaaatggaagtgagaaggctactgtagaattatgaagttagtgattcagtttcagttttcctgccactatctgcatcccaatcgcacccttttctaaacctccttttccctcagcacccttgtgttgactgacacaacccacaattttccacagcagtctgtacaccaagaccatgcatgcccatactccctgctcttctaatctcctcatccatatccttggggcctcctgggtgactgactcatcaaagctaaagggtcaacaactaatctctgataatggccagccactgacttccccttgcatgtagcatttacattgtaatccttccttcctgtgtgcaggctggcatgcctatctgagggtaggtatcctttcctcaaattgcacaaggtaagggagaccttggatggaaacatgttgaggcagaaagtcctatagattgaaaggattattgttattggctatagtaattcatgatgaggagcctattgctgattgctaaacttctttctctggagctgaatcatacccacagttccagggctggtttcaagatgtacctatttgataatgatgatgatgatgatgataatgttgatgatgatgatggtgatagcttgaactaattatatagtatcatccaataggcaggttttaaatgctttgacatatattaaattatttattccttagaaaaccctacgaagtttttactatcattatcactatcttacagataaggatactgaagtacagagagattaagtgatttgcccatggccacacagtttgtaagtgttgaatcttaaatgctaatcaagatggtataacttcagagtttcatgttcttaactgttgtattctgtgagtgcagttctctgggaacacatgggttttaactggattcaaacttgtagtaacacagtctgactggcgcatttcataaaaagtcccttcagcttagttattttttggatttacccaaaaagtttcaacttactggttatctaaaagtgagcacacttctgtggggaaggtgaggaacatagatttggctttatttccaagtgtccagccctaaccgtcccctgcaaagcagttgagggccagtactgctgctcctcagggaggtagcagtaggagaggaggaggtaactggtggaaagagactcagttctcatacccaataggcctgcaaaactaacttcatcgtattagcaaggcaaagcagagggaatgttcttcctttccccttccctatattttccttaaggctaccctagcttatttaccccaaataatctatagaaacatttgctgggaagcatcataggcactttctcctaagatgctcccccatggacaccctagggacagtcccagaaatctcccttttctcttctccccaaatgtctcagagcctggtatttttctaaggtcaatcaggagcctgtgaggtagctacacttatttcagaatctcttggtgtggggcctagacttcagtatttttaataaagctccttaagcaattctaacatgcagccagacttgtggatcattgacagtccctctctgcctttctcactttacaacaagaccacctggcctccattatacccttacagctctgtgctaaaaagaagcacaaataagttgtttgctaattctatttttcctaattcccaggtagagaccattggagatgcctacatggtggcttcaggcctcccaaagaggaatggcagtaggcatgcagctgagattgcaaacatgtccttagatatcctgagctctgtgggcactttcaagatgcggcacatgccagaagtgccggtccgaattcgaattggccttcactcaggtaataaccagttaaagtaagaggaaacattctaatgcgcctctaggaagactaaaaaagaaagggaaaaagatagctctcccctgattcctggccaccggattatccaggtgtccgggctgcataattcctttatgcctacccaaatttactctcctcccagtacctgcactaacacagtgggcagcagctccttgttccaggtactaaactcttttaatctaccattttggttagaggcaatatttccatgtttgactatgctacaagatcaacaggtatatgttgtagttaggataattcatttaattaattaaaatccctacttctgaattattttcctcccacattcattacctactagctcctcttgcttctgtatccactccccacctttttctctctgctctgctcttctaggctcctttccttcccccatccttttcacccctttcctaccaaacttctttaaaaaaatgaatgacatccactgtgccatttcttcactgtccactccctccttagcccctttgcaatctgacttcagttctcaccactttccccggtccttgtctgcctttacctctgcagcatctggaattcatgacaagcctccctaaaatgctcctcaattggcttttatgacatgctcctcactctgtgaatgctgcttttcactttatttactggttctcttgactcttcctgttctctaacattttctgcaaagctctcagtcttgtgatctttttgctgtctgcatgtctcacctctaatttattactcaacccacagcaacctgactttcatttcctaccactgtctgataattccttttgtctctaattgtcccttatattggtcttctccagtgttctgtcaggatccactgtttttctcctcctacatactctcatgggtgatctcattcatatctgtggtttaactaccacttgtacgctgatgacttccaactccacagctttagtgcagtcttctcccttaagcttcagccttctatatcaaaattcctgctgatatgcccacctgaatgttccacatggaccttagactcgacacatctaaaacaattatttttttacccatacaaacttcctgctcttcttatatttattctctatttcagttggtggtaccaccattgacctagttactccagttagtcttgagagtcattctctttgactcctcccttactctgacctttaacgttcaactaactactaagtcttgaacactctttaccttttaaatatttattgatctctcttgtctcttattcactctcacaacccaagcctgggacaccaagatctcttgcctggatcactgcaatagcatcttcttgctttcactcttgcctcttaccatccatccttctcatagtcatcagcataatctgtgtttccttgtctgtccttccattaggctttaagctccttggtggcaggaagcatatcttactcatgtttgtatccagagttcttagcacatagcaggcgtttgattttttcttttagagaaaagccctcatctgtcatttgtgcttcagtttcacatttccaacccccctcagcatacctcttcttgtagggttcaccattatttcaaatttaacatatttaaaacttcaagtcatcttttcccacaaatcagcataaactcacaagctcatggcaattttctcatggttgtcaatcagacagccaataaatctgttgattcttttacgtctctcttattacttcttcatggccatccacttcttatcattgcctccttttaagtactttgtgcttggattactgcagcagccatctggagggttttcctggttttacattttcccctttcaatgcattttatacactgatctgagaaaaaagatcatgcaattccttgctcaaaattctctagtggttcaagatcctccatcttgtacaacccacttaatccaaccttgtctccagtttctcgtgagccatgtgaactaggcagactgttctctctaagagcttcccaaattccctgtacaatcccaaccacaagcctttgatttatgtcccttttccactgttcaaatcctactcacccatcaagacctagatcaaatcctaccttctccactggacccttcttgattgagtcaggtcctaataagcacctcctcccattttctgagttattatagcacctctgtctgtgcttcttgcctcagccatatgttgtcttgggttactgcttaattgcttcctctttgatagtatcttctcttcaattagactataaattcctggagaactgagactatgtgttacatttcttttttattccccttggtgcctagccgtaaaaacagagcagaaggccaggcatggtggctcatgcctgtaatcccagtactttgggaggccgaggtggggggatcacttgagctcaggagttcgataccagcgtgggaaatatggtgagaccccctatctctttttaggaaaacaaaatcagagcagaaaccagaaagttgaaggtgaagaactttctggatactcccaaactgacttttcagtacggctgctgaagttttctcaattaccttgaacacttaacacagccatattaaaatgtaagaacaaaaaatgctaaatgcaaaatatcctttgattatatatacatactgcttttccatgccccaacacagataattgaaagtcagctctatttgttttcagatttttgaaatgttttagaataattctcttgatagacacagtttgggaaccagataaacccatgaaagcctttcttccaaccctaaggcacaagaaaaagtcacatttttttccttacaacaaacatgtttggaccctgaatccctgcccaggcctttctggtttgggtttgatacttgtttgtccctgttgacaaatataagcatctcaggtgtaactgttacgtggaacaaaggtatacatcagaagggcagtcatgtctgcattgttataaatttgctttcttgtagggcaaagagttcactactcattgtgtctttcttcagattcacagagctatatgatggcaacttttattcttttacaaagatacattccttcctctttgnactattcctctattagcattgggtgcatacctgttgactgtaattccaaccccctgatactctatagggccggttgttgctggagtggtgggcctcaccatgcccagatactgcttgtttggagacactgtgaacacagcttctcggatggaatctacaggcttacgtgagtacctaatagagagatggataggatggcaccactctgctattgagaaggtgattcttcttcagagaggtgaaagagagcaggatacttgatgtttcaatgttttaaagaaaaataaaagataatttgagaagattaagatttatcacggattttcctggtctctaatggcaaaccagtagggggtgatgttggactgaacatgtacctttctttctctagaaatgaagctgtagctaagtgacaccaaaacagccactcaatttgataaaaacagctaaaatagtattttgggtaaagaaaaaaattggccgggcttgtgggtttgtgggagtcatgttgagaaaagaactacataagggactaatattttccatttttcaactagtttgtggagacgcactgaagccagctgcctcccagctggctgctgtttgctgttgcagtcccctttttgaaccagttaggaccccaggagttctggcttcatcaaatagcctctacaatttagctagcaataatccctcaatccaagtagcttggaattctgaaataatttattgcaacttccctgtatataaaacccttagcttctatcaaaacagacatactatcaaagataccatttcttctctgcttctttgaaaagaaaactgtacaaaccatatgccatttgtctgttgtttgtaagatgctggctcaactcttactcggttatttactaccactacagaatcacaatgtgccttttgcttatatcatggttgagcaaagcattttttatgctactataggaaaagcatagagaataacattaaattctatatgcagttttcatttttcatggattttgtaccaaaaaagggaagaaaccacttaagcccttagaagggcttaactctggcaagacgagttcttcccaagcttcagcactgtactcaaactagtccctgatgttatggtggactgtatcacagtgggtggtgccctgtctgaccccacttcccatcactcatgtgtagaaacaggcttacacaatgggtccagtcttagtcaatctagcctgtgctgccatgattaaggaggcagtatggaacttagaagctgttgtcagaataaattttctgacatctgggaaagtcttcaaactccttagatatggcagaggccatggaagtagtcatccaggaactgctgcattaatatractttgcatatgactttactcttgaagtgcaacccaagatgaagtgaaatttatcatggaactgcaatgcagatttggcacagtattctggactgatgtaagcttgtagaaggctgaagtcatattctggtctgaaccagggaaaactccacacatttcacattggaaatacaaagttgagaccagaaattgaattttgagatgtagacagcaccttgcccagtgatcagctagaacgaagaaamtggagtgaatcacccacagcaggtgtttattaagmactgactgtgcaaggaagttattgtgaagcatacaaagaagtatacgcgtgtgctctctgtgctaaaggagctggttaatgtgcttttctaaaagctaatgactatgacccaaatatgacattaagctccacaactgaatggagatctgtagagaggtagcctctcctcacattggatatgaaatcaggacatgtcacatatctattaataaaaaaattatttcatcaatatctcctttgtgctcagttgaaaccactgagattctggaatggaagtgactcgtgacccagtcctggagtgattctccctaccatacaagtggatggtggttggtatgagctatctctcttttaagctgtgtgttccctaccatcaagattactctactgaaaggctccctgaagaccagatgcttgtgggatgcacacataggactggctaggaatatactggctgggcatgtgtattttaggaataggtcaaccttttttgagtaagggctttggatgatcatgagttaatgaggaaggcacaaacaaacaacagtactgagctatcaagagaaagaaagtcactgtgagtatacacagcagaaactccttgcagttctctcccgccatgccttcctactcaggttgtaatcagctttttttttaaaaaaaatgattttctcaagcatgtgtgaaaactagccttggacttttatttaagactcaacctcaacaaggtctcacttcatagggtgacagtttttagaaatgtcaaggatcttacctgagtgaacaagtgattattcttaatcaaataattacccttaggttctaaataaaattttaacgtggcagttccctatgtaaatctcttatcccagattgagatcattggttagaaaatagtacattcatgtgtaaacacagctaggtgcccccacccaaacgtcagctataaatgtacagtcttcataaaatatttgttgaaagagttcttgggatatttctcattgatgttttatttttaagtgtagcaatgttgagagagagttgtaagaatgcatatggaaaagacatcattttgcctaagatatgtaaagcatgagagttcagccatagtagcagcctgtgaaagaagctgctgaagtcaagctttcttcaaatgacgtcacgtttcagctgagagcacagtagatgctggtttctccatctcaacctttgagttaaattaacacctttctattgcatggcctttcatttaagatagtgtctaggaggctgataggtgctacaactaatgccttatttcggcctggtgaagaaggccatcactccgtctcctcctcttgtgaaaccctaagtaaacctctctcaggacgttgctaatggtctagttcatttacaagtgaagacatttattacattgacattttctcattaattttgccagtgagaaaggagcccaaatcatgtctctccttcttttgcagcttatcgcattcatgtcagtctcagcactgttacaattcttcaaaatctgagtgagggctatgaagtggagcttcgaggaagaacagagctcaaggtataatgtctttttgttttttgagccagactacttggatacacctgcttctggagaggtcatggtctgctgaaagagtttacctgggagtctgagactcagagctataacttgggcagaatcttcagccccatttggggttcccaaaagattgctccattttgcctcaattttcttctctttaaaatatggctacagtggggaggagtattgagattttttctgcatttttcagactgtaagttgtatctttctctcttaaagaactgcacagaatttggctttccaatgagctgcactattatttacattttctaacctacattttttcactctttggcagtgccagacattgttcaataagccatagtaattgtgagtttggattttctattcactttctcagtggccacccttcctgggtgaaaggcacccattggcacactatttgcagagagactttttctttccctaagaaaccaggaggaacaaagtcagtttctatgaaaggcaaacattttgtagcccctttttccctgttagagttatcactagacctgagatataggattagaataattttagttttctttttttgccatttccactgtgttstatttatctatttctgaatgaccaaagaccaccggttgacccagttgtaaaagagctcagtgataaaataatgtaactccctcattttcagatgaaraccaaggtccagagaggtgaagtagtttgagcagggtcacacagtcaactgatagcagaatcaggtcaagactcaggaagcctgacttcctttttagtgacctttccatgacaccatgctgcataaagatgattttctcagtgactatttttgggcaaagcaagagcagggcactaagtgatgcacaattagcttctgactttggcattccttttctaaacagtggcaagttacatgtagctagatttcagatgttaaagtttggaaggtctaactctagttgacaacttcctcctatggctagtcctagttttttccttccaataggtcattagtatcttccaggaggttggatgagtcacttacaaggggacagaggctcctttcccacctcttgcagagaactcagacagtaaaatgttggggacagggatattacttgggcagcgaatctaactgtccaaagcttttgtgatccttctatacattctgtcatatttcaacagaggagtagaaatgcagcttggtttcctgaagaccttttcctctgcattgctgggcagaggcccctcatttaaaagctgaagggttgccacttttgaaactgaaaaacgaaaatgcatccctgtcccaatggtttttattgtcccacaaattcaattcaggagcactcacatctttgggtgtttcaagtacaaaatcaggacttaacttcaaaagggccctttgcagcttcatggtttccccaaccccagggaatttgggaacatttcacagcaagttggaagaagagcctttctctgatgccacattgggcctggattattgttgtggcagggtccttatgaggaggagacattaagagggaagagaagagggcgcctcagaggaaaggaaggggcaagggaacaaggaagaggagaggaagtaaggcccaaggaaaggtcaggagaggaggagagatcctttctgtgtctgtaccctctacctccccaccagaaacaggtgttgtactttgcatcataagggctggggcacatggggtttctggtccaccagggacatgcaatatacccccaataagaccatgtcgccagcacacttcagaaattctgattcaatattttcactcctcatccactctgtgctactggaagcaagagttgctctagtacatggggcagaaatatcacatttgatggtgagcccggtgtgatttcaaagttgatggctagaaatgtcttttccttccagctgactgatgtttgaaattcctccattaaagccttttctcttgggctcaaggtttatatccagtaagaaccttcttccctccacgccatctcctccactaggttgatgacactttacgttatttcccttagtggaatcaaaaacatggattaattgggtgagagaggagaacatagggcagttgagtaattggctgggttgaggttacaaagaaagagaccaaagtgaggaagctgaagtagcttgggggaggactcatttagagatgagaagctcagcctcttgggcccactgcccattgcccacttcaagcccctcttgtactatacaggcaacaaattatcaatgcctaactggccagttctactttttcaatatttctckccttgtgggctagtgataaatcactgtattaccttttctcgtacatgagtcctgtttcagtcactatttttctgacaagtgtggrgctccttgctgagatttttgtatatatctaggcttatcagctgtatttaccagaaacttttaggtagatttacattctggggagactttctcaaatgactgctcttcagccagtttatgttgttgccagaggtggacactttaaaaatattttgtaattttttattgtaaactgacaattaataattgtgtactttatggggtacaaagtgatgttatgatttattaatacaatgtggaataattcaatcaaactagttaacatagccatcacctcaaatacttaacattttttttttgtggtgagaacatttgaaatgcattcgtttagtgattttgaaatgtacagcattattaactatattcaccatgatatgcaatagagctgaaaaaatcacacatattcttcctcactgaacagattttgtgttcttacaccatcatctgttcatttcacccacctttggcttctgtaaccaccattctactctctgcttctattaattcaattgttttagattccaaatataagtgaaaacatgcagtatttgcctttctgtgcctggcttatttcacttagcaaatattcttcaattccattcatgttgtcacaagtgatagaatttctttctttttaaaggatgaatagtattccattgtatgtatacactaaattttttttatccattcatctgttgataaacaggttaattccataacttggctaatgtgcctagtgctgcaatgaacatgggagtgcagatatctttttgacagactgattccaatattttgagtaaatacccagaagtggaattgctagatcatatggtaattctactttaactttttggaggaatcttcatgctgttttccataatggctgtactaatttacattctagaagtgggcactttctgaacttgtctttgaattctggggttaaacagtatttggttctcaggttcctaagtattagtatttgttttattttccccagtctttcccactcatatcccaaccccagcatacacacacaagcagtgtgtgtatgagcatgtctatgagcacacacatgcacacagacaggcaattaagaaatagtgagattgtactgacagatccatgaaggtcagaaagttttgcctcaaattcttgccccatcactgacttaatgtctgacatcagacaagtaatttcaccctctctctgtgctttcgtttgtccacatagaggcctcatctgacttgtggttatcaggaagctcattaatctcacaagcttcaaatttcccaatagttgctttttggcctctagatctgccttttgactccagtgtgttggagaagctttgtggtatggaaggaagagcatttaaaatttggtgtctagtagagctggtttcaagtcccagctgtgcctatttattgacaagtcatttaatctccaggaatctcagtgtccccattcgcagaatgagattaataattaacctacattccagatttttgtgaggattaaataagataggagataccaaaatgtctcataagcatcatgccaaagtaagatgctcttatatgggggatctctaggactgcttggggattgatattgggtcaaagagtttggttcaggctttagttgttgccatacttgttttctctctttttctccctttagcaaaattgtggaagtcaggtaggtaaacagagaactgggattctaagaattcttttggatggactccaaaacctcagagagcccctgsagctcccctgcatactctttgatttggaagcttgcctgagtccataacacttctatcctcttttgcaaccattagttttggcatcccagtgtgtcctaagacccacccaaatctttggacaatccctctacaaagctcccttggggattggcatgctgttctgttagcctctagatctcaagacaaacagtcaaatatggctgagggtggggggcccttgagtttgaactttaatagcatgtttttccaaaataagatccagtggtgtcttgagtattccaagtgcacaagggctgagagtttcaattaatgaaacagtctgattatttactgggcaactgtctgtataagacactacactaggtactgtgtaaaaagaaaaagctttggaatcagaggagttgggcttcatgtgtttagaacctataacatggcctaatggttgtgtttaactgtactgtgagttccttaaggatggaaccatctctgtattcccagccctagtacaggaggagtggaataaatgaaagaatgagtgatggaatatattttcaagttgcttacctcttctgaaaacagagtgggctcaaatagtccaattatttgaactatttgaggcttagggagagtctgatgccagttaatggaggttggactatagtggtatgctctttctacttgcctcatagaaggcttgttcaagccttgaatcaaatatttgcaaaatgctttgagattctccaattaaatgtgctaattattatggtttttgtcattattgttaagggataaatatatgtgatataaaatagggaacagtggacttgatatttaaaggggtaaatctaattggaatttctaagttaaacaattcagaactgctccaaatgagagctgctgtgagtgagaccatatttcagattaatgagttggaaacacatcccattacttttctcagtcttggtaaacacatttttttcttatggattagaggaaatgagagaacagatgaaagagaattgaaaggaggagagagaagcacattgagaggaaagtttactggaaagagagaaaggcagaacagaggcagaaaatttgactcctctgaggtcatcactcaggccctggggtgactagcttgagtttacactccttttctcttctgagacytgtggttcttgacaaccaagtaactgacctatagatggaggccaacctggagtcttaccctacctgtaagagtcccttggctggaagaaaagaacactgcacaaatgtagacctctcaaaatagccaggataatttaggcttaaaatttaacagcctgttttccatttctactctctttttgggtttggtgagagccattgaatgagacggtaagcgggtaggtagaatctgaatatatgtactctagatacagaagacaatggcttacctaatgccaaaagatcagggcacaaatgataagcaaaatcttcaactgagcatccagacatttggttgctgtcaagccaaacatccacacattcccaatgatgaagctgtatggtggcggtagacaaaacatctggatgacagcttgatatagtgttcacttttcatctggctgctctggctcagccccgtagggaggaagactccagggagtggtgaggcaatttctgagccaacctgaatgcttatattcttttggaaaattgattatagcaggcttaagattttttatgttttctataataagggcaaaggcacagaggaaaccttctggctgattgggaaaaaaggcttcatgaagccccttcctgtgcccccaccagtggacaaagatgggtaagtggagttcacatttaattggagtcttcctatgccatactctgccacactttcttcactacctatttgatgtctcccctgccctgcaggcaagtgggccatggcctgcaaccagtggagattgcagccttccaaagaagaaaagcagaaaggcagttggtgagaaacaagccataaggtaatggccaggaggaaaacagagcacagcagcttgccaaattttcaaatctggggcttcctttggcatgcgtgccagtgtcagcctatactctgttggcatagtgtgatggagctggagaatttccaagctctaataaaatgggtgaaaaccttgttgtggggaggcctgctgcagggtgagctgcacctgtgggaaattgtctgccctggcccgagagagacccttacctcttgccctgacaacatatttgaatgctaacaaagctggccttgctatccaattatcaggcaggtacacctgtctcttttattgttgagcacctgggccacatggtgagccacatcagatctttagagacttacatctgtctaggcaatagcagtaggactaccggctattcctgggatctgttgacaagaccaccttggaggggatgtttatgtcatttcctccggaggcactgcctgatccctttcaarggatcaattttgccaaccaaaataagactggctactctttgactgcctggcttgtattcaggacaatttctcccatccttcctcccctactaggatggtacaattctgaagcagcaacaaccatctaattatcaagaattctctccacatatttatcggtatttatctctgaggaatccattgtgttcttgggctcttttcagtatctcttctcttctttatcgtgtttgcttttttttttttttaaatcttgctttcttattctctcttccatggaaactttggccctgaaacactttgctccctccacatatccttggaaatcacaagattctaaggtaaacattaaaggcatctccacatactcctgctcccttgttctctaacatgtcccaaaataatcacaattctagcagccactactaaaggcatccacatactttcatattctcccactggcctctgatgactttgttgattctttgtgactgtttctgtcctaaggaaaccccaatgcatcttcatttctacaacaataacaggtactctgaactagtcgtaaacatttatgcatcacaaaggcttctgtattgagtgtgtggctcttctgcagcctcctgaatcaccctctgactcactgacacctggggccaggatttgttctacagtcttccaatttccagaaacattctttcctgtgattagggaaacacaggaacaacctctgacacagacagacacacacacagatccagacacatactctctagcctctctctctctctctctctctctgtaggaaagtgtttggaagttcttgaaggatttatccctttggaagggtagtgtggcattggaggcactgtacaagaatccatccattcctaagaatgtgttggagtttgcagcagaaaatactgcaactcacttaccatcattggctgtgtgattggtagtgctttcctgacatgcagatgcatgttgcttaggtcatttgtaaattcactcatctggaaccccttgacagagggccagcttctgtgtactgtagatatatggaacagattgaagccactgggtcaagagaggaaatccatccctggtcctggcctcattaacacatgtacttcaatcagcatgttaactgaccacatggccttggtggcctatacaaatcacaaaaatccccaagaagtacatccctgacaaatttcagaaggcttgtcctaagtccaagcactcctctgttgctgttacttgctaacaccacctattccagaatgtttccaactttctgtgaatttacaggctgacacttactgggatagacccaacttacaaaagacctatgatacctatgaatgccactgacttgctgccaccatcataagagatgttgaggaaaaacttgaaacctttaagagagccctgtggggttggccagggaggaagaaaaactgctatgaaagggggcacagctttggtgaagtgattacaggggctgcctctgaagcagggccctacacgtcacctgataactcttatcttgtgtccccaaatatccactacttctcaaacctggtttttgtatcakctggttactttccataaaatttcacctactgaggttaattttgggctgacaagccccctcttttaatcatagatgtgcttttttgagggtgagaaacaattaatcacccatatcataatgaaggtgaactgagctaactgttcaggaggacttggcagtttcgttttgattaggacaaggagaaatggggaagttggcagttttgaagaatagagggtcacactggcaggcttgggataacacaaaagcagtggatccctgggaaatagaagaagggtgaaaataagtatgaaggtggaaaagttagcttagattccacctcttttaaaccttttgagtctttattggactcaacgaatggagagaaagcacattttccttctgctatcaggacccaggactcccaccagagctttaatataactctgctccatgtgggttaaatcagcctttgtggactggctagaaacctgaccaccacacatatagcactgttactatggaggaagccactccaagttccaaatcattgatttataaatgtgtagaacatacctcattagtaagttgaagaccacctgtatattaacatgctctcttttttgttaaatttgtaaaacccttgtaaatggcaatgtctaattttgcaaacctgacacatgtaataatgtttatttgtttaacaatccaggaaagttgagcaatttgcaagctgtttatggaatatagtagtggtgtggggcttggaatcattcatattgaaatcctgtgaaaggcctaggatatataaggtatggttactgttttctctttctctcgcccaggggcaaagggctccaggatttgaatcttctcttggtgaggcaatgggaaagctcacttcagttcaagaaattgttctgcctgggcaagaaattagtgaatgactacacctctgaggatgacctaattccagtgtgagcaggaccttgggaagtaatttttaaaagttttgctcaatacccagctatcactagcaaggccgtatgaatgtaaactgcaatagatgtgaaccttatggaagagtagagagccacctccaagtttagtcattccaaagtagcaggcccaacttggattaagatgagaagctctctattttcacagaaaaaaagtaggaggcagtatgttttctttttcatttcgttttaatctctagaaagtatttaatgaacataatttataactcagatactataagattagttccaggaaaaaaaaagccttccagcaaacatacatctgaatcccagtctattgtgacctcaattggctggaatgcataaggaagaaagagggagaagagtctggttaattgtgttgtttggataactgaaggctaagaagtttctttgttttcttattgctcatttttcaaaatctttccaaaactgtcactgtctcttttcctaagttaggcaacataattggattgtccttgctagatgagtatttaactgggactcagggtagtattctaaacatgacagaataaatgtaagatatattgtcagggtaaaagatataaaaatcatagattgaactgagcgattcccttaaagttttgtattttccctcccttttcctgcccaccctgcctttcaaccctctaccccttctcctaaaataaatccctttgaacatttgtttttactttatgcttttagttttccagattccactttcaaggggttattggcagtggcttgccacagtcacgtggaccaaagcaataaggcttaagtctcaggcatgtttaaaatagttaagcaagcttttcctctcgtttattatatttaaaaaaatctctttattaaaacagctgaacccaaacatatcagctagtaaagcagttaattctttttagtacaaccccttttaaagaaataaatgcctaaggtataatttgatacctttctcactattatttaatttttccactatcaactcaccctgaatctgagcttagagtgaaaagttcttcccagcagttttccttcaaccttcagtcaaaggcccttggactacttatctcttaacagaatccaacttctgccagcctcaggtggtctacttgctatgccaaagctgtttaagaggatgcagaaaaggcttaagttgcctttcaacttccttgagcagagtttctaactcctttttccagacatgccagagaaggacacataaaatatcatcctctatttttaacaaggtctcagtcaaaagctgagcttttaagacctaactagaagtttgggtgacaaatgtgataatgtttatttgtttaacaatccaggaaagttgaggaatttgcaagctgtttatggaatatagtagtggcgcgggggcttggaattattcgtattgaaatcctgtgaaaggcctaggatatgtaaggcatgcttactgttttctctttctctcgctctagggcaaagggctccaagatttgaatcttttcttggtgaggcaataaaaaagcttcacttcttccagagatggtagcactgtcctgcagaatacatatggaaggataattgagggcaagggagtgggagtggggctgcagctccagagcctccatgaatttgtattctcccaaacacagttcagttatttagccctaggacctatagctccagggtgggcctgcaaaatgaacagtgctcagccaaaatcttttattaagcaacaaaacccactgagagtgattcctaactctgtatctgatcctatcccctatttccctccttagtatttctctagtccagcatgtcaaccaagtttatcttgtcaagcctactaattctgtcttgtttatgatcacatcatcctttgcttgattttatcatgaggccctttgtaaaatgagtccatccatttttagattctttttcattaaggccttctgcattgaccaaaactaagttttcttcagtttttcttagtgctttaattatttgatcagaagaaaaaccattccctactctcatatactatttgatttatttagtgaggtatagcatgattctcacatacaactgattatttctctatttgtctgttgctactagcacactggcttgagttggtcattaagagggagtaaaaatttctccccagttgttttcctaagtacccttatattccttgtataaaataaaatatttagaaaacaatttaaataaagttttcaaacaaatttaaatttgttttatcacatccctcatatctgcttgttttcttgtgatttatcttttaaaaataaattattggaaaaacaaagccaaattgaaagaactgcaagttaggttttgcttatttgaggttttactgtactttacaacataactgaataaaatgatcatcccatggggaattatataagtccttttctttagattttttttcccttacggacctcaatagcaatatatgttcattgtagaaaatttagaaaaacacagaaaggcacacaggaagttaggattgttcaaaattcctttagatcctttattctatcttccctgtttggcttcacttcatagattattgcatgttattatagcatctacctagccaaagaatacctgaactcagctgattctgaaattaacccagtttgcttttattttattttattgttggcaatattattcatatttttgatggtagaagttgaatctgtttagattttgggcagctttcagtgatccagtcattctttttttttttttttttttttttttgagacagagtctcgctctatcgcccaggcgatccagtcattcttcattgcacttgggatagcgaagcaggaagagatagcagatggctatctacttcatcagagggccataacttggtttactacataaagcaactctaacaagaagtattgttgcaagaactctcatttttcctaccttgtcttagacatagtataaacaactttattaccaaactactcatttaattacattcttgtccttaatccaactggaatcaacttgcaaggagtaggaggtggcaaacagccaaacagtaatacttcatgcactgggtggtcacatctatgtgatatcaaataattgaatgtaacttaaacactcaattgaatcaagtaagcattaattagccaaaaggccacaggggattgaccattttactttaacctcttctccagccaaagctggtgtacctaatcaatgcatttcccatctgactggttgattatagcccattaaaatagtggagtctgtgcaatagaattctctctcaccccttctgtggtccacgccttcttctcgggtcaagataattgacgagtagaccatagacatagacacaacttaccttttataagacattatatgtctgttatttgtgtgttgtttgtgtttctcctggaatgctttgtaaaacccctgcaatcttacttattttctagtttggatttgctgtaggccaagcaataatgaattgctttcaaagagagaagcagaagtgaccattaatctatatattcactttggctcactacaaattagagtggctccagatgccactaaagagctttcaaaggtgactaattccaagcaaatgaatatacacatagaatcatagaactggcagggcctttggaaactatcaaccctgttatagtatgaaggaaaatatgaagattctgagaggagaagctatccttttaaagttaccgtctagttagtaaataagaacttgctttaccaagtcaaaaatagatctgaattatcaaggaaaacctctgacccttaggaatacttcttagaaattctgggggtaagatccctaactgtgtatgtacaagcatgggcttggcaggaatactctggtttggggtgttttgagctaggtgactgctgacatcacaatccagaaagaaatagagtacagaaggaagatagcagattccttgatcactaaatcggctttaccatgcagacaggatctaatccatatatgcccctatctaagatgatctggcccaagtggatggagaataaacctctaattctgcctggccctatggattcatttgtagcttttagcacaggacccaggtcctatagaactaaagtctcagaaatacatgaggagatgcctgactttggagaacaccaagaatattttcaatgtgcccaatatccaaatggtagctcctatagtgagagaagtcaggggagaacaaaatctgcgaactttaaagcaagataagaactgaatctgattactacttgtcgacaccaactttctcctccagagacaggaaatttcctgagttgtgagtacaattttgtatccactgggtatagactagccaaagaagagctttacttcaggggtgatcgagctcatcatggggaatagacacaggtgaacttctcatgacatggcttcctggaatgatagatcatcggaaaaacaattgttcaagcagcattggtaataagaatgagccctctcagggactagctgatagagctagtttgggtttgctgtaggccaagcaataatgaatctctttcaaagagagactgggggtagaggtgaccattaacctatatactcactttggttcactattagtggcagtattttaacttcactgggacatctttgatgtggtttagaaataagtccaacttgttttgtgggacatcccttggtccaggagcaatctaaggtcagattaaattttctggatggttgtgaaactgtagaacctgcctcattggtcagatttgggttgatttagtcactgaccccacaagacaaacattaacacaaaatacccccacttaggcttataattagaaagtacaacactattttaatggtttttagtaacagtgttccaaaccatatcataagatgattatgcgactccagagaaataacttttttccttctgtatgtatcttttctgtatttaagtgtatttttctgggatcacagttcacctcttgtaattttcctgctccagaaacttcaatgttcctttagttttataaattccttagttaatttccaacctagctttctctactcttcttcttgcaatttattctctagtcaaaatctattattagctctttcctttgacattttctgattttatgccattaatcatgctgtttcttctacctaaaattccttctctgtctcctaccaccacatgtccaaattctacccattcttcaaagtctagtcaaatatctcttttcatcaaaagccttccttgttcactataatcatatgtctccatttctaaattcctacctatacttctttgatggttatgtaacattaacttattttatggttgtttacttgtcttcttgtcgcaactatatttgacctagatttaaaaaaaatttacaagattcttgaaggcaggaactatgtttaattcatctttgtactctgcacagtgcctgatgcatatgacaggcactcaataaatatatgttaaataaataaatgaatatttccatgtctttctgtgtatgtatcttttttctgtgcacttttaccccttcttttgttatttaacgtttttattgtgttcccatctgtctatctactatcaccctctctcataccacctgtggagatatatatatatatttttataaatatatatatatgacatactatatatatatatgagacatactatatatatatatgagacatactatatatatatgagacatactatatatatatgagacatactatatatatattatgacatactacaaatgtgacttaatttagctctttagtattttatgaaggaaatataaaagcactcgaacacttttcagataaagagk

SEQ ID NO: 94885 - DNA, 19821 bp, Homo sapiens
  misc_feature (1)...(19821): n = A,T,C or G
nnnnnnnnnnnnnnnnnnnnnnnnnnnnnnnnnnnnnnnnnnnnnnnnnnnnnnnnnnnnnnnnnnnnnnnnnnnnnnnnnnnnnnnnnnnnnnnnnnnnnnnnnnnnnnnnnnnnnnnnnnnnnnnnnnnnnnnnnnnnnnnnnnnnnnnnnnnnnnnnnnnnnnnnnnnnnnnnnnnnnnnnnnnnnnnnnnnnnnnnnnnnnnnnnnnnnnnnnnnnnnnnnnnnnnnnnnnnnnnnnnnnnnnnnnnnnnnnnnnnnnnnnnnnnnnnnnnnnnnnnnnnnnnnnnnnnnnnnnnnnnnnnnnnnnnnnnnnnnnnnnnnnnnnnnnnnnnnnnnnnnnnnnnnnnnnnnnnnnnnnnnnnnnnnnnnnnnnnnnnnnnnnnnnnnnnnnnnnnnnnnnnnnnnnnnnnnnnnnnnnnnnnnnnnnnnnnnnnnnnnnnnnnnnnnnnnnnnnnnnnnnnnnnnnnnnnnnnnnnnnnnnnnnnnnnnnnnnnnnnnnnnnnnnnnnnnnnnnnnnnnnnnnnnnnnnnnnnnnnnnnnnnnnnnnnnnnnnnnnnnnnnnnnnnnnnnnnnnnnnnnnnnnnnnnnnnnnnnnnnnnnnnnnnnnnnnnnnnnnnnnnnnnnnnnnnnnnnnnnnnnnnnnnnnnnnnnnnnnnnnnnnnnnnnnnnnnnnnnnnnnnnnnnnnnnnnnnnnnnnnnnnnnnnnnnnnnnnnnnnnnnnnnnnnnnnnnnnnnnnnnnnnnnnnnnnnnnnnnnnnnnnnnnnnnnnnnnnnnnnnnnnnnnnnnnnnnnnnnnnnnnnnnnnnnnnnnnnnnnnnnnnnnnnnnnnnnnnnnnnnnnnnnnnnnnnnnnnnnnnnnnnnnnnnnnnnnnnnnnnnnnnnnnnnnnnnnnnnnnnnnnnnnnnnnnnnnnnnnnnnnnnnnnnnnnnnnnnnnnnnnnnnnnnnnnnnnnnnnnnnnnnnnnnnnnnnnnnnnnnnnnnnnnnnnnnnnnnnnnnnnnnnnnnnnnnnnnnnnnnnnnnnnnnnnnnnnnnnnnnnnnnnnnnnnnnnnnnnnnnnnnnnnnnnnnnnnnnnnnnnnnnnnnnnnnnnnnnnnnnnnnnnnnnnnnnnnnnnnnnnnnnnnnnnnnnnnnnnnnnnnnnnnnnnnnnnnnnnnnnnnnnnnnnnnnnnnnnnnnnnnnnnnnnnnnnnnnnnnnnnnnnnnnnnnnnnnnnnnnnnnnnnnnnnnnnnnnnnnnnnnnnnnnnnnnnnnnnnnnnnnnnnnnnnnnnnnnnnnnnnnnnnnnnnnnnnnnnnnnnnnnnnnnnnnnnnnnnnnnnnnnnnnnnnnnnnnnnnnnnnnnnnnnnnnnnnnnnnnnnnnnnnnnnnnnnnnnnnnnnnnnnnnnnnnnnnnnnnnnnnnnnnnnnnnnnnnnnnnnnnnnnnnnnnnnnnnnnnnnnnnnnnnnnnnnnnnnnnnnnnnnnnnnnnnnnnnnnnnnnnnnnnnnnnnnnnnnnnnnnnnnnnnnnnnnnnnnnnnnnnnnnnnnnnnnnnnnnnnnnnnnnnnnnnnnnnnnnnnnnnnnnnnnnnnnnnnnnnnnnnnnnnnnnnnnnnnnnnnnnnnnnnnnnnnnnnnnnnnnnnnnnnnnnnnnnnnnnnnnnnnnnnnnnnnnnnnnnnnnnnnnnnnnnnnnnnnnnnnnnnnnnnnnnnnnnnnnnnnnnnnnnnnnnnnnnnnnnnnnnnnnnnnnnnnnnnnnnnnnnnnnnnnnnnnnnnnnnnnnnnnnnnnnnnnnnnnnnnnnnnnnnnnnnnnnnnnnnnnnnnnnnnnnnnnnnnnnnnnnnnnnnnnnnnnnnnnnnnnnnnnnnnnnnnnnnnnnnnnnnnnnnnnnnnnnnnnnnnnnnnnnnnnnnnnnnnnnnnnnnnnnnnnnnnnnnnnnnnnnnnnnnnnnnnnnnnnnnnnnnnnnnnnnnnnnnnnnnnnnnnnnnnnnnnnnnnnnnnnnnnnnnnnnnnnnnnnnnnnnnnnnnnnnnnnnnnnnnnnnnnnnnnnnnnnnnnnnnnnnnnnnnnnnnnnnnnnnnnnnnnnnnnnnnnnnnnnnnnnnnnnnnnnnnnnnnnnnnnnnnnnnnnnnnnnnnnnnnnnnnnnnnnnnnnnnnnnnnnnnnnnnnnnnnnnnnnnnnnnnnnnnnnnnnnnnnnnnnnnnnnnnnnnnnnnnnnnnnnnnnnnnnnnnnnnnnnnnnnnnnnnnnnnnnnnnnnnnnnnnnnnnnnnnnnnnnnnnnnnnnnnnnnnnnnnnnnnnnnnnnnnnnnnnnnnnnnnnnnnnnnnnnnnnnnnnnnnnnnnnnnnnnnnnnnnnnnnnnnnnnnnnnnnnnnnnnnnnnnnnnnnnnnnnnnnnnnnnnnnnnnnnnnnnnnnnnnnnnnnnnnnnnnnnnnnnnnnnnnnnnnnnnnnnnnnnnnnnnnnnnnnnnnnnnnnnnnnnnnnnnnnnnnnnnnnnnnnnnnnnnnnnnnnnnnnnnnnnnnnnnnnnnnnnnnnnnnnnnnnnnnnnnnnnnnnnnnnnnnnnnnnnnnnnnnnnnnnnnnnnnnnnnnnnnnnnnnnnnnnnnnnnnnnnnnnnnnnnnnnnnnnnnnnnnnnnnnnnnnnnnnnnnnnnnnnnnnnnnnnnnnnnnnnnnnnnnnnnnnnnnnnnnnnnnnnnnnnnnnnnnnnnnnnnnnnnnnnnnnnnnnnnnnnnnnnnnnnnnnnnnnnnnnnnnnnnnnnnnnnnnnnnnnnnnnnnnnnnnnnnnnnnnnnnnnnnnnnnnnnnnnnnnnnnnnnnnnnnnnnnnnnnnnnnnnnnnnnnnnnnnnnnnnnnnnnnnnnnnnnnnnnnnnnnnnnnnnnnnnnnnnnnnnnnnnnnnnnnnnnnnnnnnnnnnnnnnnnnnnnnnnnnnnnnnnnnnnnnnnnnnnnnnnnnnnnnnnnnnnnnnnnnnnnnnnnnnnnnnnnnnnnnnnnnnnnnnnnnnnnnnnnnnnnnnnnnnnnnnnnnnnnnnnnnnnnnnnnnnnnnnnnnnnnnnnnnnnnnnnnnnnnnnnnnnnnnnnnnnnnnnnnnnnnnnnnnnnnnnnnnnnnnnnnnnnnnnnnnnnnnnnnnnnnnnnnnnnnnnnnnnnnnnnnnnnnnnnnnnnnnnnnnnnnnnnnnnnnnnnnnnnnnnnnnnnnnnnnnnnnnnnnnnnnnnnnnnnnnnnnnnnnnnnnnnnnnnnnnnnnnnnnnnnnnnnnnnnnnnnnnnnnnnnnnnnnnnnnnnnnnnnnnnnnnnnnnnnnnnnnnnnnnnnnnnnnnnnnnnnnnnnnnnnnnnnnnnnnnnnnnnnnnnnnnnnnnnnnnnnnnnnnnnnnnnnnnnnnnnnnnnnnnnnnnnnnnnnnnnnnnnnnnnnnnnnnnnnnnnnnnnnnnnnnnnnnnnnnnnnnnnnnnnnnnnnnnnnnnnnnnnnnnnnnnnnnnnnnnnnnnnnnnnnnnnnnnnnnnnnnnnnnnnnnnnnnnnnnnnnnnnnnnnnnnnnnnnnnnnnnnnnnnnnnnnnnnnnnnnnnnnnnnnnnnnnnnnnnnnnnnnnnnnnnnnnnnnnnnnnnnnnnnnnnnnnnnnnnnnnnnnnnnnnnnnnnnnnnnnnnnnnnnnnnnnnnnnnnnnnnnnnnnnnnnnnnnnnnnnnnnnnnnnnnnnnnnnnnnnnnnnnnnnnnnnnnnnnnnnnnnnnnnnnnnnnnnnnnnnnnnnnnnnnnnnnnnnnnnnnnnnnnnnnnnnnnnnnnnnnnnnnnnnnnnnnnnnnnnnnnnnnnnnnnnnnnnnnnnnnnnnnnnnnnnnnnnnnnnnnnnnnnnnnnnnnnnnnnnnnnnnnnnnnnnnnnnnnnnnnnnnnnnnnnnnnnnnnnnnnnnnnnnnnnnnnnnnnnnnnnnnnnnnnnnnnnnnnnnnnnnnnnnnnnnnnnnnnnnnnnnnnnnnnnnnnnnnnnnnnnnnnnnnnnnnnnnnnnnnnnnnnnnnnnnnnnnnnnnnnnnnnnnnnnnnnnnnnnnnnnnnnnnnnnnnnnnnnnnnnnnnnnnnnnnnnnnnnnnnnnnnnnnnnnnnnnnnnnnnnnnnnnnnnnnnnnnnnnnnnnnnnnnnnnnnnnnnnnnnnnnnnnnnnnnnnnnnnnnnnnnnnnnnnnnnnnnnnnnnnnnnnnnnnnnnnnnnnnnnnnnnnnnnnnnnnnnnnnnnnnnnnnnnnnnnnnnnnnnnnnnnnnnnnnnnnnnnnnnnnnnnnnnnnnnnnnnnnnnnnnnnnnnnnnnnnnnnnnnnnnnnnnnnnnnnnnnnnnnnnnnnnnnnnnnnnnnnnnnnnnnnnnnnnnnnnnnnnnnnnnnnnnnnnnnnnnnnnnnnnnnnnnnnnnnnnnnnnnnnnnnnnnnnnnnnnnnnnnnnnnnnnnnnnnnnnnnnnnnnnnnnnnnnnnnnnnnnnnnnnnnnnnnnnnnnnnnnnnnnnnnnnnnnnnnnnnnnnnnnnnnnnnnnnnnnnnnnnnnnnnnnnnnnnnnnnnnnnnnnnnnnnnnnnnnnnnnnnnnnnnnnnnnnnnnnnnnnnnnnnnnnnnnnnnnnnnnnnnnnnnnnnnnnnnnnnnnnnnnnnnnnnnnnnnnnnnnnnnnnnnnnnnnnnnnnnnnnnnnnnnnnnnnnnnnnnnnnnnnnnnnnnnnnnnnnnnnnnnnnnnnnnnnnnnnnnnnnnnnnnnnnnnnnnnnnnnnnnnnnnnnnnnnnnnnnnnnnnnnnnnnnnnnnnnnnnnnnnnnnnnnnnnnnnnnnnnnnnnnnnnnnnnnnnnnnnnnnnnnnnnnnnnnnnnnnnnnnnnnnnnnnnnnnnnnnnnnnnnnnnnnnnnnnnnnnnnnnnnnnnnnnnnnnnnnnnnnnnnnnnnnnnnnnnnnnnnnnnnnnnnnnnnnnnnnnnnnnnnnnnnnnnnnnnnnnnnnnnnnnnnnnnnnnnnnnnnnnnnnnnnnnnnnnnnnnnnnnnnnnnnnnnnnnnnnnnnnnnnnnnnnnnnnnnnnnnnnnnnnnnnnnnnnnnnnnnnnnnnnnnnnnnnnnnnnnnnnnnnnnnnnnnnnnnnnnnnnnnnnnnnnnnnnnnnnnnnnnnnnnnnnnnnnnnnnnnnnnnnnnnnnnnnnnnnnnnnnnnnnnnnnnnnnnnnnnnnnnnnnnnnnnnnnnnnnnnnnnnnnnnnnnnnnnnnnnnnnnnnnnnnnnnnnnnnnnnnnnnnnnnnnnnnnnnnnnnnnnnnnnnnnnnnnnnnnnnnnnnnnnnnnnnnnnnnnnnnnnnnnnnnnnnnnnnnnnnnnnnnnnnnnnnnnnnnnnnnnnnnnnnnnnnnnnnnnnnnnnnnnnnnnnnnnnnnnnnnnnnnnnnnnnnnnnnnnnnnnnnnnnnnnnnnnnnnnnnnnnnnnnnnnnnnnnnnnnnnnnnnnnnnnnnnnnnnnnnnnnnnnnnnnnnnnnnnnnnnnnnnnnnnnnnnnnnnnnnnnnnnnnnnnnnnnnnnnnnnnnnnnnnnnnnnnnnnnnnnnnnnnnnnnnnnnnnnnnnnntttgtggatttgcctattctagatatctaatatacatggcattatatatgtggctttgtgactggctttcttgtagcataatgtttcaaggtccgtccatgttgtagcatgtatcagcacttcgttcctgaatagtatttcattgtatggataccacattttatctgttcattagttgatgggcatttgggttatttttatcttttggctattgtgaataatgccactatggatagcccacttaaaaaaaaaacaaaacactgctttaaaaagaatgatgtatgtttccaaagttataaataatgcctggcgtgtattagaactcacagaaatcctgggggcaaggtggcattatccccatttatatgaaaagagacagactcagaagtgaagaggcttactcagggttacacagttacgaagtagcttgcctctgaccatgggaagtttggtggaaatggggatggagaattgctgtctgtttttctgttccctgctgccagcactgggtgccagcctcwgttgccctcttccctctctttcttgccaggtgtccaggatgtggaggtgcacttggaggaccagatggtcttggtacacaccactctacccagccaggaggtgcaggctctcctggaaggcacgrggcggcaggcggtactcaagggcatgggcagcggccagttgcgtgagtgaccactgtggccttggcccctctcggagggaggtggctcagagctggtacaaatctaatcataggattctcaggctctgggttggagtggctttgaggaaggtgtgaaaattatgtgagactccctgcccttcccgagctgctgaagaggtgtgctgggtgaggtggcaagccagcccaagtgtctaataccttgcagagaatctgggggcagcagtggccatcctkggggggcctggcaccgtgcagggggtggtgcgcttcctacagctgacccctgagcgctgcctcatcgagggaactattgacggcctggagcctgggctgcatggactccacgtccatcagtacggggaccttacaaacaactgcaacaggtgagttgtctgaagtctccccagtagcattctcagctacacattttcacactgggccctcaccaatactctgtgaggcacatacacacaggcacaacctccagatgaggaaactgaggctcacagaggttaaatgacttgccaaaggtccacagcaggtaaaaggtagagttggggtttgagtcaagatctgaccttggctgggcacagtagctcacacctgtaatctagcactttgggaggctgaggtgggcggatcacctgaggtcaggagttcaagaccagcctggccaacatggtgaaaccccatctctactaacaatacaaaaaaaaattagccaggtgcagtggcatgtgcccataatcccagctactagggaggcccgtaatctcctgaggcaggagaatcacttgaactcaggaggtggaggttgtggtgagctgagattgcaccacggcactccagctcaggggtgacagggcaaaactctgtctcaagaaaaaaaataaaatctgatcttgaaggtcctgcttataaccaccttactgcctctgagatggaaggggacttctggacacagcaaaggaagggtccccatgccatggtgtttgtcatgctgtgatataactagttgtttactcatctgtgagtcccctgagccagaagcttattcaggacaggacccatgtctgattcttctcggtgccctctacccaaagcccagcacagagtaggcctgtttgttgaatgaatgaatgaatgaatgaatgaagcaaatataaatagatgagagggtagagcacctggcctgtgagctgctttcctgcccacctgtttcctttctttcttagctgtgggaatcactttaaccctgatggagcatctcatgggggcccccaggactctgaccgggtaagtgtctgtctgggtttgggcttgggctgagagaggacccaaagtctcagaggcagggcaggcagctcttgggatcataacagtgtgattcctttttggtggagtcttttcctctcattttattttgctgagtttggaaacatttgttgacactttctgtgatcaaggcccaggggatacaatagattacagccccagtgcctgacccaaggagcacacagtctctgggggagattactgaattccatggtttccaggcagtgagatcatccttgcaggagcctgcaagaggtcctggagcccacagtgaatagttcatctgcctgaggggcaggggcagtgggaggaagtgaaatatggaagttgagggttttacctaaactgaaaaggctgtccctggtgttccctaacaccccggtcctggagtttcatttttcagcagagaatcatttcccaatcttcagggaattgtgtgttgccttaatgatttttgccttatctgagtactagttgtatttttagttactcaatcatttggtttttttattttattttctgagatggagttttgttcttattgcccaggctagagtgcaatggcgcagtcccagctcattgcaacctccgcctcccaagttcaaacgattctcctgcctcagcctccctaatagctgggactacaggtgcacaccaccacacccgggtaatttttgtatttttagtagagatggggtttcaccaggttggccaggcagtcttgaactcctgacctcaagtgatccacccacctcagcctcccaaagtgctgggattacaggcgtgagccactgtgcccggctctgactgggctattttctatcttgatgggtttgcaaccttgtgccacaaaacaattgaaaccatggtatgtgttgcttaatgcatgttactgattttttggacttttcacagctctgttacctatcatgcttttcttttcttctgtttcttttccttttcctttctcccctcccctcccctcccctctcctttccgagataggatctcactctgttgcccatgctggagtgcagtgctgtgatcatggctcactacagccttgaactcatgggctcaagcaatcctcccacctcacctgatagctgggaccacaagcatgtaccattatgcccagctaatttttttttkttgtttttttggtggtagaaatagggtgtcactatgttcctcaggctggtctcaaactgctgggcttgagcagacctccctcctcggcctcccagtgttaggattatgagcatgagccagcatgcctggcctctgccacattttttttttttctttttcttttttttatttttagtagaaacgaggttttgccatgttggccaggctggtcttgaagtcccaacctcaagtgatccgcctgccttggcctcccaaagtgctgggattacaggcatgagccactgtgcccaaccaccctgtcacatttctaatgatcaaaagtttttactccctgttctgggaaattggagaggcatttcttatagagtccattgcacagtgccatgcttatgctcagtgattagtaatctgctgctgcaaatcaaatgactccaaagttaggagtttaaaacaacaaacatatactgtctctggggcaggaatttgtgtgtgacttagctgggtgcctgcagctcagggtctctctyggggctgcagtcatctcagggccccacgtggggagaatctgcttccaggtttgctcatgttgctgttggcaggccccaggtcctccttggctgttggccagagacatcagttctttgccacatgggtctctccctagggcagctaacaacacggcagttggcttctctcagagtgaatgagcgagagagagagagattgagattgagagagggcgtccaagactcaagccacattctttttgtaacctaatcttagaagtgacactaggtccagcccacactcaagggaggcacatcatagaggccattcgcctcatgcagccttgaaagatgatgggcaggaagtaggcattgaagagggtaagagtgggattggcaagcccagcaaaagaaactgcccgggcaaagccctcaaggcatggaatggcagggagtgtttctgaagggcaggagcctgtcttgtgacctgtgttttcttcctgggccccaggtggggcagggaatcagaaggggctggcatcagcagctgtacctcacccaatcccttaacttagacaaggaagaactgagcaggagctgaccagccaaggccacggtgactggcaagttgctgttgggttttagcatctgcttttcccaggtggaaaagaattccatgtgggaatttgcattcaagcctggttgtcccttgcacatctcctaactgatctctaagctcccttctgttctctcctcaccctgctccagtctttacttttcatagactgcactagaaggattgttctgaagcctggagtaaccaggccatgcccctgcctgaaacttgtcttggctcccagtgcctgagagtacaagctgggcctagcttcttgatgtggacattcaataccccactccccctgcctattgcccctgcctgtgtgctgaggaaacagcctggaaaggctgcctttccctgaactcctgctgggtcatgcctccagccacactgtccaggctgccccctgccttgaggccgctcctccagccgggcacagtggctcacgcctgcaaccctagcactttgggaggccgaggcagacggatcacttgagttcaggagttcgagaccaggctggccaatatggtgaaaccctgtctctactaaaaatacaaaaattaggccaggtgcaatggctcatgcctgtaatcccagcactttgggaggctgaggcggatgggtcacttgaggtcaggagtttgagatcagcttgaccaacatggtgaaaccctgtctctattaaaaatacaaaagttgggccgggcacagtggctcatgcctgtaatcccagcactttgggaggccgaggcgggcagatcacaaggtcaggagatcgagaccatcctggttaacattgtgaaaccccgtctctactaaaaatacaaaaaattagccaggcgtggtggcgggcgcctgtagtcccagctacttgggaggttgaggcaggagaatagcgtgaacctgggaggcggagcttgcagtgagccgaggtcgcgccactgcactccagcctgggcgacagagcaagactccatctcaacaaaacaaaacaaaacaaaacaaaacaaaagttggccaggtatggtggcgtgctctgtagtcacagctactcgggaagctgagacaggagaattgcttgaacctggggggtggggaggttgcagtgagcccagatcgcaccactgcactccagcctgggcaacagagtgagactctgtctcaataaataaataaatwaatwaatwaattaattaattaaaagaaatacaaaaactagccaggcgtagtggcgcgtgcctgtaatctcagctacttaggaggctgaggcaggagaattgcttgaacccgggaagcagagactgcagtgagccgagatcacaccattgcattccagcctgggcattgcaatgagactttgtatcaaaacaaaacaaaacaagcaaaaaaaaccgctcttcagggctctgtatcccctcccccttcttgatctttctactgttcaaatctccaacgcagggcgtaaaaaaaagtaccaggtgcaggcagcagatatccctctggaaaacgagataaagcagaactgccacttcttcctgcccatcagttggtggcacagtgagatgcctggttactcagcagcaaggtcatgggagcccacctgtactggcacaggcacttgtttctgcccaaaatgtcaggttggggacaatttatttgcacagatgtgggtttctgtggctcactagtaaggccttgtcaccccaaaacacaccaactgttgtattcaycctgtgtgtcatcacccctagtctgttctgtatctgggcccccaccatgttctgagtcccttgaggatggtgacctgcatactccctgccatgttgggtagtgtgtctgacctaggaggtgctcataggtgtgttatgacaatttttattaccgtcaaaggagaaggagggcagagccagcttcgaggggctaggacaggccctttgccccttgcatttccttctgttcctggaatctgggagtcagggaaatgacactggctgcctatgatggtcagggaagccaagcttggccaacttaagcctataggaattgaagacagycaagggctcacagagccatcaggaggctgcacaactgagctaactggaggctgagaagcagagctgggcaattgcctcgccggaaaaacagtctgatccaatgggaatgactgcacaggcaggggaaacttccactggctcttttcagcccactgtcatcctgcccaggatttcagttccagggagggagtgttcagatggtccrggacttcctggaccactttccacttccagacagggccaagaggaccttgcctgcccagtccttggggagctcagatcctacgagactggtacccacaggaggaaatgggtactttagggaagcaggaagaggcgtcggaatcaggaaatcagaagatagcagcttggcaccacgtggcacacatcccctatacacacactggatctcattccagcaccgcggagacctgggcaatgtccgtgctgatgctgacggccgcgccatcttcagaatggaggatgagcagctgaaggtaaggtggaaaagaaggtgggcacccttcctaacagggtccatcatctgaagctgtcgtctcccctcaaaggtgtgggatgtgattggccgcagcctgattattgatgagggagaagatgacctgggccggggaggccatcccttatccaagatcacagggaactccggggagaggtgagtggtgtcggcccctgtaggaggctgtgctctgcggatggtgcatgaggaacccaggggtgggggccaaacaggtrcccacccctgaccacacattcttctgcaggttggcctgtggcatcattgcacgctccsctggccttttccagaaccccaagcagatctgctcttgcgatggcctcaccatytgggaggagcgaggccggcccatcgctggcaagggccgaaaggagtcagcrcagccccctgcccacctttgagcaggacctcaccttggctctgttgctgtcctccagggcgagcactttccacttccagagggggccagagggactttgcctgcccagtctttggagagctcagtacagggcaggagctgctgtggtgttcccttggcaaatgaaagttttattttcgtttgggacttggtgttttgtgcttgtctccatgccccttatgggcttggtgaacatagctctgcttctttcctttgtatcagggccaccccttagcattggagccaaacaaacctgaattcaaacctacacacacactgaagtccccatcttcctccttggagccataatgaagagccactacagtcaaatttctgtttgtggcctcccccaacccctcactatggctgattggaaccaaaatggacacctgacccatggtggcccatgctttccctgagaaatcagggcagatccagctttagttttttcctgtggttggacccataacatgggaatatgggaagttttggtggccctcttctccctgccttattgactgagcatcagaaaaagccagtcggctaaggaggaaaaatgaggcagggagaatctaagagttgctggagaatcccagtcactctggagtcccctctctgagcctttcgtgaggccagctgcctcctgcctgggattgaagagatgctcccgaatcctcctaatgcatccccctgttaaaataatctggcttgaggctgggcacggtagctcacacctgtaatcccagcacttcggaaggccaaggcgggaggatctcttgagcccaggagtttgagaccagctgggggaacagagtaagaccctgtctctacaaaaaaaaaaaatttaattagctgggtgtgatggtgcatgcttgtggtcccagctatttgggaggctgaggtgggaggattgcttcagcctgggaggttgaggctgcagtgaaccatgatcacgccactgcattccagcctgggcaacagagcaagactccatctcaaaaaaaaaacaaaaccaaaaacaaacaaacaaaaatctgactttattcctttcagtcataagtaaaaattatcaattaacataagtgaagtgcttggcacacagcctgtcatataaagttaagggagcagcagctatgattctgaggctgcgtgggaccctcggaggcagccctagccaagctcccctttcctatggttggatgagctgctaaccagggtacagtttgtggggcctcgggttcagagcctccctactcgtctattatttccctgtacccccatccccatggggtgccttgctcatccttgacaaagctgcttttatgacagggtaagctggcagactacaaactttgccccaagctggcagactacaaacgttgtccctacactgcctgcttggaactgggtgggtggtttcgcagttagttgtccttggcttcgaggcagagcccctggctcggatcccattccccagtccctgtctgttttccctttcaaggctgtgggtgggttccacctctagccccaacccttggactctgctctttcttgccaaacctatgctggttcttttccagctccctgtggttgctgggagccaaacccttttaagcccagactcaggctgtctttccccacttccaagtcattgcagaaattcatcctggattctgcccacagctaacccctgacatcctctcacctccattctggaatgatgcctgggttttaacctttttaagcctaaacggttcaccatgacacgactctattagcctcttttttttttttttcctttttttgagacagagtttcactctgttgcccaggctggagtgcagtggtgcaatcaagactcactgcagggtggatgcagtgactcacgcctgtaataccagcactttgggaggccaaggtgggtggatcacttgaggtcaggagtttgagaccagcctggccaacatagcgaaaccccatctctactaaaaatacaaaagttagccaggtgtagtgggattacagtgcctgaaatcccatctacttatgaggctgagacaggagaattgcttgaacccaggaggcagaggttgcagtgaaccgagatcacaccactgcactccagcctgggtgacagaaccagactcttatctcaaaaaaaaaaaggagatcggccagacgtggtggctcacacctgtaatcccagcactttgagaggccaaggcgggcggatcacaaggtcaggagatggagaccatcctggctaacagggtgaaaccccgtctctactaaaaatacaaaaacttagccaggcatggtggcgggtacctgtagtcccagttacttgggaggctgaggcaggagaatggcgtgaacccgggaggtggagcttgcagtgagccgagatggtgccactgcactccagcctgggcaacagagcgagactccgtctcaaaaaaaaaaaaaaaaaaaagatcaacatcctcattagcttttcttctgaacttctggctgtgtggtttttcaaagtttatttttaaatcacaggacactgttcaaacatcttgaagcctcatttgcaaagcagaagtggaactgcaggcaaagatgctctgttttggccaggaacagtggctcatgcctgtaatcccagcactttgggaggccagggcaggaggactgcttgaagctagttagaaaccagactagcgaagaaagcaacaccctgtctctacaaaaaataatttaaaaggccgggcgcggtggctcacgcctgtaatcccagcactttgggaggccgaggtgggcggatcacgaggtcaggagatcgagaccatcctggctaacatggtgaaaccccgtctctactaaaaatacaaaaaattagctgggtgtggtgacacgtgcctgtagtcccagctactcgggaggctgaggcaggagaatggtgtgaacccgggaggcggagtttgcagtgagtggagatcgcgccactgcactccagcctgggcgagagagcaagactctgtctcaaaataataataataataataataataataataataataatgataataacttaaacattagctgagtgtggtggcacaggcttatggtcccagctacttaggagcctgaggcaggaggattgcttgtgcctaggagtgtgcagcggcagtgagccatggtcacgccactctgctccagcctgcttgagagagtaagaccttgtctctaaaaaaataaaaataattaaaaaaaaagaggcctttaatcccagcagtttgggaggccaagatgggaggattgcttgatcccaggaggtcaaggttgcagtgagccatgattgtgccactgcactccagcctgggggacagagtgagaccctgtctcaaaaataaatcaataaatgaaaaggaaaatttaagtccaagatgggaagattacttgaggccaggagttcgagacccacttgggcaacatagcaagaccccatctccaaaaaaaaattttttttttttttgagatggagtttctctcttgttgcccaggctggagtgcagtggggtgatctcggctcactgcaacctccacctcctgggttcaagcgattctcctgcctcagcatcccgagtagctgggactaaagaaaggtgcatgccaccacgcccggctaattttttgtatttttagtagagatgggttttcatcatgttagccagttcctgaccttgtgatccgcccgccttggcctcccaaagtgctgggattacaggtgtgaaccaccacacccggcctatacctccatatttttaaataacatgactgtgtcattgtttcttattttcagtcttgatattgtctgtggaattctatattaggatgaattctgcagtaagtaatacagtcctaatagtggccaaagcaattaagacatttaattatgtcaccagatcaacagtctggatatttgaggattcagagcaggtccagtggtgtggcaacgtcaggatactgtcatcatgaactgtgtgtttctcttcatgtcccctcctccccttttggtggcaagggtgattaccacagcaccaagcctcccattgtcacacattcacatgatagggtggaaagctggaaggaaggagaccaaaaagggaaaagctcctttctagcagagaagaacacctatgcaatggaataatgaaagttagctgtgaaaacgtctttatctgtgttgttactaactcatatcagtttcctgtaatcagtttcctttgtaacagtggcagctgtaacaaagtaccacaaactgtggcttaaaacaacaaaaatttattctcacagttctggaggccagaagtacaaacttagtatcactgggctgaaatcaaggtgtggacaagagcttgcttcctccagaaactatagggaaacatcccttcctggcctcttccagctttgtgtggccgctggcattccttggcttgtggccgaatctcactccaatcttcaaggccagcaccatccactcagtctgctctgtcttcccatggccttttcctccatgtatttgtgtcaaatctccttctgcctccctcttacaaggatgcatgtgattgcatttaacaccaccagagtaatccaggataatctcttcttagcaagggccattgatttaatcacatcttcagagactttgccacataaagtaacattcagaagttccagggattaggacctaatatctttggaggccattaataaacctgctacagtgacctagtaaaccacaggtaaattgatacaattaacttaggaaaaggtctcataagtaaatttgacggtactctagtttccatgacagaatttctctctagcctttctctccattcgttgtaaagagataaggactttacttgtcagattgctttattacagagattgtttttacccaaaactaagtttacctaagtttacaaaatttgatttagatcagtggttctcagtggggatggtatggccctatggaagtttgtgagggctatttcttctggctgtgacaatgctaggtgggggcggggatgctgctggtattgggggaagactagggatacttaccaaccttcaatgtgcaggatagtcctgcaccaaatagcccacaggatacccttgtaggtgaaaaatcactacttatgtatatttcagatggtgtcttgctctgtcactcaggctggagtatggtggtgtgatcatagctcactgtagcctccatctcatgggatcaggcagtcctgcctcagctttctgagtaactgcaactacaggcatgcaccaccatgtccagctaacttattttttattttctttatttatttttgagacggagtctcactctgttgcccagcctggagtgcagtggcatgatctcagctcactgcaatctctgcttcctgggttcaagtgattctcctgacacagcctcctgagtagctgggattacagatatgtgccatgacgcccagctaattttttttttttttttttttttgtatttttagtagagattggttttgccatgttggccaggctggtctcaaactcctgacctcaagtgatctgcctgccttggcctcccaaagtgctgggattataggcgtgagccaccacagccgacctattttttttctttttttctttctttctttttcttttttttttttttttttttttgagacatgatctcttagtttgttgcccagcctggagcccagcgtcatgattatcgtagctctgtgcaacctgaaactcctgggcacaagcaagctttttgcctcagcctcccagctgggaccactggtgcacatcaccatgcctggctaattgctctttttctttttttttttttgtttcagacagtttcactctgtcacccaggctggagcacagtggtatgatctcggctcactgcaacctccacctcccgggttcaagcaattcttgtgcctcagcctctcaggtagctaggattatagacacgcgccagcactcccggctaattttttgtatttttagtagagatggggtttcaccatgttgatcaggctggtcttgaactcctgacctcaagtgatacacccacctcggcctcccaaaatgctgggattacaggtgtgagccactgcgctgggactaatttttatattttttgagacatggggtctccctgggttgcccaggtttgtctcaaactcctgggctcaagtgatcctcctgccttggcctcccaaagtgctgggattataggcattgagtcactgcgtctggccaaacttcttactatgtgtcttacattgtgttcaacacttgttattgctcaaaatggccttatccttcatacatacctgccaagagaaatttttattagagacaaggcctccctgtgttgctcaggctggagtgcagtggtgcgatcacagctcactgcagccttagcctcctgggctcaagtgatcctcccatctcagcctccagagtagctgggactacaggcacacaccaccacacctggttaatttttaaaattcttttcatgtagatgggggtctatgtttctcaggctggtcttgaactcctgagctcaagtgatcctcctgcctcagcctcccaaagtgctaggattacagggatgagccaccacacccatccccaaatttacaattaaaaaactcttaaacctaaaaacaaaaatgtggtaaagccagttattttataggtaagatgatactcatatgtgtaaagaatctagctgggtgtggtgggtcatgcctgtaatcctagcacattgggaggctgattctggaggatcacttgaggctaggagtttgagagcagccagggcaacaaattgacccccgtctctacaaagtaaaaattaaaaaattatctgggggtggttgggcatggtggttcatgcctgtaat

SEQ ID NO: 94886 - DNA, 17697 bp, Homo sapiens
gaggtggtggatatgttaattagcttgacttatacatttatacctacatcaaaacatcaccttgtaccccataaatttacataattataatttgtcaattaaaaataataattcataacttcacagtatatcatgtcgcaggtggcaaccatgtttatatctaaattcttaaaactgctggatcaaagggtacatctgtaaaacagaagacatcattaaactgccctctgcagacgctgtaccaatttacactcccaccggttaaataaaagaatggttttccatgactccgtaccaacactgagtcatcaaactttatgagttttgtcaactcgatagacaaaagcatatcacagggtagttttaactgacaattatcataagtatacaaagtgtcttcaaatgtttagtatttgcaagccatctatatgtccattttcatgtatgttctcttcatcttcccattttttccactgggcttctgttttttttaatgtattgatttttagctctttctacagtagaataattaaaattagctttttgactatgaaataagcacagatatttttcccagttatgtttttgactcattggattttgccaagcagatttttaaaaatttgatataattaaatgcatcgatcttttaaggtttctgcattggtattacagttagcaaggctatttctattctcagctgttttaaaagtttctccataagttcttgaggcactttattggcttcctctttataacatttagatatttgatccatttagaggtgttccatgtgtaagttgtgaggtatggatctaaatacatttttgggccaggcgcagtggctcacacctgtaatcccagcattttgggggtccaaggcaggcggagcaagaggtcaggagttcgagaccaacctgactaccatggtgaaaccctgtctttactaaaaaatacaaaaattagctgggcatggtggcacacgcctgtaatcccagctactcaggaggctaaggcaggagcatcgcttgaacccaggaggtggaggttgcagtgagccgagatcgtgccactgcactccagactgggtgacagagcgagactcctcacaaaaaaacaaaaacaaacaaacaaacaaaaacaaaaaaaaaaacctctcagttgtcccaatatcatttattgaatagtcaattttttatttatttgaaaaggcaacttaaagcatttccagtatcaattatttaattccaaatgacatgattaaagcgctatttactgagctttcaaatgtagataataccattggctcatctacgaaagatgagaatttggatcgcatacaccacctctcctctgcctcctccaatgtttgataattatatcatgttttgttcctctacttagtgcttttcccacttcaaataacttacttataccactatttcttgtttcaatagctctaatcagtatctagagtaaaattaagtaagcaggaggctattgacctgagacagtctccatgctttgaattcctatgaaacaaaatgcaacctaacttagtatgtaaacaaactgaaacttaacttaggagtttcatttttataacagataaccaggtctttgccaatcacaagcagccaagcttcagctaagtgcaagcagccaacggactggctcatgtctaaatcaagcaaaacacttagctgcaacaaatcaaactatttatgtactttaccttcctgttctgcttataaatactcattgcttacagttgcagagctctcggaacctcttctggttctgagtactgcctgattcaagaatcattctttactcaaataaactccattaaatttaaattgtctgaggtttttcttttaacactaaatacccctctcagcaataggaagatgatagcccatagaagtgaatatatttttctttttgttgtctctactccattttatccacaacagggcccaacctaaaaataataataataacaacagtaatagtatgtggagatagactgtaaggactcagatcaatgttttattattctgtgattcttaaagtaaatatacatgagtccatactgatataaataactgactgaataaataaataaatagaaagaagggacaactctcctgtcaaaagaattccaattaataaatgaaaaaaactaaggaaatagagaatcaccattagaacaccacagtaacaactgctgcaggcaagatccactgatgaataataaaactgatgggtgacagtttagggagcaactggatatttgcatagcctcaaagtatctcccccaaatatttattagttaccatggtagtgttaacgtatatccacaacttctttaatattcttccctccagtggatggacttaatctactcaaccctcactcccaggatgggctgcacttactgactcccttccaaaaactagggtttggatagggaaaaatggtgactttacagtgcagaaattttccagttgctccgccttaaccaggtgaccaaggtaaacaccaccagtgatgagtcatgttgatatccctgtacctcatgacatgattcaagaagggcaccttacctctgtggtaatcttcccaaaagtccacaaccttagtcttactctgaggaaatatcagacaaacccaaatgaagggacatgccacaaaatagctgatcaatactcttcacaagtgtcaaagtcatgaaacactagaaaaggccaagaaactctcatagatatgggaagaataaagagacatgacaacaaaattctgtatgtatgctggactggatcctggaacagaaaaagaacactaatgaaaaaactggtgaaatctgagcaaaacctgcagttcagttaatagtaacgtaccaggctgggcacagtggctcatgccagcactttgggaggctgaggcagggggatcacgagatcaggagttggaaaccagcctgtccaatatggtgaaaccccgtctctactaaaaaatacaaaaaattagctgagcgtggtggcacacgcctgtagtcccagctacttgggagactgaggcagaagaatcgcttgaacctgggagccggaggtcgcagtgagccaagattgcgccactgcactccggcctgggtaacagagtgagactccagctcaaaaaaaaaaaaaaaagtaatgtaccaatgttaatgtattggtttttatcattatcatacttatgtaagattttcacattaggtaaagctggatgaggggtattcagaaaccttgtactatctttacaagtcttctataaatctaaaacatttccaaatataaaaagctttttaaaataagtgattgatctacctttgaaatgaaaccttaaattaccacgctgaattagctcttggacactttaaaattatgattactggagaaaaacaaaaatgtagctgggcatggtggctcatgcctgtaatcccagcagtttgggaggccgaggtgggaggatcacttgagcccaggaattcaagaccagactgggaagcatggtgaaaccccacctcgacaaaaaacaaaaattagctgggtgtggtgacatacacctgtagtccctgctactcaggaggccaaggtgggagaattgcttgagcttggggggcagaggttgcagtgagccaaaattgaaccactgcacttcagtctgagcgagagtgagatcatgtctcaaaaaaaacaaggtgggctgtggtggctcacatttgtaatcccagcactttggaaggccaaaatgggtggatcacctgaggtcaggagttcaagaccaggctggccaacatagtgaaagcccatctctaccaaaaacacacaaaaaattagctgggcgtggtggtgggcacctgtaatcccagctacttgggaggctgaggcagagagaattgcttgaacccaggaggcagaggttgcagtgagctgcaattgtgctactgcactccagcctgggcaacagaacaagactccatctcaaaaaaaaaaaaagtttagtttcagtggttgttgaacaattagtttactctgcaagtaggtaatgataacatcatttttcattccattttgcatgctcttctccatgtaggggtttacctcgtatctctgtattctgatagcctggagttgttttccttattgatacaaatgaaaagtggaatctttatatgttttccaatttattaaattagtaatgttaaaaataattttaacaaagttaaatggaattattttaaaattctgtttctttgcagtaaatgtaatcccaatataagacaatatgactcacatatttgtgaaaacgaatagggccaatcgtttccattatcaccaaaattatctatagtgaggcctctccatcttctaccagtccctcttttttttcactcactcaaaatatatgtatcgatggtcaaatgtgtcccagacattgtgcaaatctctgacaaaggtaacacaagaaaatgtgtactctgagaacttcttattctgccccagtttaggagattcatgcaactgccaagcaacaataataagagctagcagttattggagtacctcattcctcacaactcgtcataaggcaggtgttatcattagatattccccatgtgtatgcaggatgaggaaataggttcagagaggtcaagtggctcacccaaggggcacagctaagtgaaaggcactgcaggcatctcaaactacccccttcccacaagactccactgcagagcagkacagtcaccctgacaccagcccaatgggttcatcttgcccattacccagatggggctaatttatcaagacaagggaattgcaatagagaaagagtttaatacacatagagccagctaaacaggagaccagagttttattattactcaaattagcctcccaaaattcggaggcagaggctaggggactttgtgggtttttttgtttttgtttttgtttttcttttgagagggagtcttgctatgtcacccaggctggagtgcagtggcatgatctcggctcactgcaacctctgcctcccggattcaagcaattctcctgactcagccccccgagtaactgggattacaggcacatgccaccatgcccggctaatttttgcatttttagtagagacagggtttcaccatgtgggccagagtggtcttgaactcctgacctcaagtgatccacccacctcagcctcccaaagtgctgggattacaggcgtgagccaccatgcccgccggctagagttttttaatgatagtttgatgggcaaggggctagagaatgggtgctgctaattggttggggatgcaatcacaggggtgtggaaaaccgtcctcagtgcaccgagttgcatttggatgcgggccacagaggagtcactggtccaggtggagtcatcctgtcattagaaatggaaaagtctgagaaggtatcttcaaaggccagtcttaggttctacaaaagtggttatttacaggaataattggggaagttgcagagcttgtgacctctggaacaatgtctggtaattgttaatgcctacatcttagcagaattcaggcccctctcataatcctaaacttgtggacttttattagttttataaaactggtttagtttggggaagggctattatcatttaaactataaactaaatttctccctatattagctcgtcccatgctcaggaatgaccaagggcagtttggaggttaaaggcacgatggagttggtgagttcagatctgtttcaccttcgtaattttctcactgttaaaatttttgcaaaggcgattgcagcgccccttgtccacacctgcgcgctccccaaggggtccctacccaccccgcccctggctgggggccgtaggctggccctgccccgctgcgccggaggtggacctctaccagggcagtttctctctgaggctgcgcgctaaggcggtgggcggtcccaggcaggcccagaagctgggcagcctctgccgggttccgggaaaaggagctcctgctgccactgctcttccggagcctgcagcatggggcccctgccgcgcaccgtggagctcttctatgacgtgctgtccccctactcctggctgggcttcgaggtgacgctgggaggggtcgcctcggcagtgtctggggagtgagggcggagggaagagtgagcgcagggctccgggacagaggtctcgtgtaactcctggcgccgcccaaggggttaaggcaagcagggagagctccggggctgaaggtcactttgtgcttttaaacggaatagagtcgctggctccaacccgagcctttatatcccgactgcagtttcccacggtggtggaaagaggggcggctccaaacattcagggagaaatgcagaacacggccacctcttagcccaacgatggcagttttggggaaaactggccacaggagcgaagatcctggaatagatttctagtagtgaggagagttttgccaatttcaaaccaaacaatgtagggtgtccgcataacccctgctctgcacttagcgcctcccttccctttccctcggctctttcacttttccatcttgcacactggcaatcgttcttgacctctgcccgcagatcctgtgccggtatcagaatatctggaacatcaacctgcagttgcggcccagcctcataacagggatcatgaaagacagtggtaggaagggagggtcggggcaggggtgatctcagtggcccaagagagccgaccccagcgggtccttatattggcactggcagccagaaagctgccctctgccccgtctctactaaaaatacaaaattagccgggcgtggtagtgcatgcctgtataccacagctactcgggaggctgaggcgggagaatcgcttgaacccaggaggcggaggttgcggtgagctgagatcgcaccattgcactccagcctgggcaacaagagcgaaacaacaagagaaaaaaaaggaagctgccctctgcccaaaacccacgtcgaggtccccaaacctgggacccttaggtcttttctcacttagygtgcccaaccttctcctggcaggaaacaagcctccaggtctgcttccccgcaaaggactatacatggcaaatgacttaaagctcctgagacaccatctccagattcccatccacttccccaaggatttcttgtctgtgatgcttgaaaaaggtgaagagagtgggatgtagacagggtatccagtgaaaaacacagaagtcggagattgagggattgataggatggaggggctgcgggagactaaagcaagtgaagcctgccttgggaaacctcaggatcagccttgagcgagctgaaggttgccgggcatgaaagggaagaagagcaggcaaataggtcatgggaaccttgggtgagaggctgagggcggaggagctctgggggatgtcagaagcaaggaagagctagtcctccaccaggaaagcagcaagaggagccctgcctctgggtgcctctgccccacaggaagtttgtctgccatgcgtttcctcaccgccgtgaacttggagcatccagagatgctggagaaagcgtcccgggagctgtggatgcgcgtctggtcaagggtgagtgtggggctctgggaatcctctgggaggaccttggatgactttctgaccttccccaggcacgttttcagggtcatgatcctgcccccgcccgggggatctactgtcctcccagtcacacccctctccccgcaccgccttcctgctgtcttctcttcttcccagaatgaagacatcaccgagccgcagagcatcctggcggtgagtgtcctggctccaccccaactgcactcatagagaatctgagaacagttggcgtttgggggtaaagaagacaataggtctcttattgcatggaaaaggttataattactggggaagaaaggatgtctgtgattcagggcacaaactactgaaaagttggaactaaggatcctcaaaaggatatctcaaggttgaaaggggaagtgcaaaagggacaatatatgggaagaatttatttgctgaaagatgtcagtgagagaaagatgctcagtgttggaacccctggatggggagggatatagtattcacaagtctccacaaactccaacacaaacctcaccaacacatccagagtggaaggcaggagacttgttccaagaggctttaaaaagacgaaaagagataactaatgccagggttatataggagcctgagtgagaacaaatggaaatagctcaaaacattgaccagtgagccatggatgggggtataaaagtaagtttgtcttcaggattaaattaggaaattcaaaacagtattattcctctggtttacaaaaaaaaatagttgagacctattcaaatttaatatataaagtggcaaatcacacaaaagttaaacgtataaggaatggcaaatatatcttctacagtctatactcctgcaaagtacatgtgtaatttttagcttgcttttttacttcatatttaatcattttccatgctttttttttttttttttttttttttgagacacggtctggctctgtcgcccaggctggagtgcagtggtgtgacctcgacccactgtaccctttgcctcctggactcaagcaatcttcccacctcagtctcctgagtagctgggactacaggcacacactaccatgtctggctaacttttttattttttgtagagaaggggtttcactgtgttgcccaggctggtctcaaactcctgtgctcaagagatctgtctgcctccacctcccaaagtgctgtgtttacaggaatgagccactgtgcccagcctccatggaattcttaactctgaaagtatagttctttgtttctatagaggttccactgagtggacttatttttgttttgcttaaccatttttctgtggttaaacattttgtgtaggacataattctctaatttaaccaagtcaaagatagtgtctcattaggacaggctacatgaattcctgggtcccacttctgatctaggaagtcaagttgcagtggttgtcaatcttggctgtgaattaaaatcacctggagcaccttggcgctaaccctttcccctggaattgtgatgtaattgttcttgttcttttttttctctttcttttttttttttttttttttttttttgagacagtgtcttgctttgtcacccaggctggggtgcagtggcatgatcatggctcactgcagactcaacctcttgggctcaagtgatctcgcatctcagccttacgagtagctgggacttcaagcatgtgccaccatgcctaattttttaaaaattttttgtagagatgggggtttcactttgctgcccaggctggtctcgaactcctgggctgaagcaatctcctgcctcagtctcccaaagtgctagaattacaggcatgagccacagtgcttggatctagttctaagggatgacctcacgtggagattttttaaagctcctcaggagtttcagatgggcagccaaagttaagaaccatctatcccaaactataccaacaaaccacaaactgaagcctttatctttgtcttgaagccaggtaggtggctgcagccatgtgccttgttacaaagttctcaggaagttccactggaattacagcctagctcttgattcaaaaaaagcatgagatacttaggaactgtgagaggtaggaaggaaagagccctggacttgaattctagagacctggattctagtgttggctctgctaccaacatgctctgtaactctgagcaagtaatgtatcacctctggattcaggctcttcatttgtgaaataaagaggtctatctagctgctctctaagatgtccgctggtgttaatttctgtgattgactctgtgccatctaccttttctccttttccacccatctcaagatttgggataaaggaaatagttcctcttggcaaggacagatctccacttgtgggtgggtaagggcattgccagcaaaacttgggggcagaaaataaaaagaccagagttttcctctgagatccccatccaatatcatgcagacacagttgtattccctactatattcccttaggctgcagagaaggctggtatgtctgcagaacaagcccagggacttctggaaaagatcgcaacgccaaaggtgaagaaccagctcaaggagaccactgaggcagcctgcagatacggagtgagcagctctttatgtgtgttcccagcacccatcctgaagatggagacttgagaatctctaagtttgagtccttatgctcctgtacaaaagccccctttccaagtgttctcctcagtgctcttaaacaaccctcatcttcttccttcttttccttgggctcagggaaaggaagggaaggagatgcacagtgagagaaaagagagcatcttagaaacaggaaggcacctggggccacagagcctcttagacctctttgcttctgtgaactcagaaaagtactgactcaaaggtttcaacccctgcctaatacctgctcctttgccttcctccttgcattgtaactgctttctccaggcctttgggctgcccatcaccgtggcccatgtggatggccaaacccacatgttatttggctctgaccggatggagctgctggcgcacctgctgggtaagtaagttaaagaatcaaccctgagccaggtgcagtggctcacgcctgtaatcccagcactttggtaggctgaggcgagcagagcacgagttcaggagattaagaccatcctggccaacatggtgaaaccccgtctctactaaaaatataaaaattagctgggactacagctgcctcagtgggaggctgaggcaggagaatcacttgaacctgggaggcggaggttgcagtgagccgagatcgcgccactgcactccagcctgggtgacaaagcaagactccgtctcaaaaaataaaaagattcaaccctgagctgcctttgaccccagctccacacccactatatcagttgaccagaaggwggggctcagagcaaaaaaatattcttggcacttccagtaacaaagcgttatgcagtcagtgctgttcaaggttgagtgggcaggggctgtcttcawccccataaaagaaaaggaagccttctataccttgaagccaagcaaaagtctttctagaaaacccctgggaccttgtgggaccaactcctgctgccagaacacctgagaacagtgtgcagagtctgttgttttcttcatccaggagagaagtggatgggccctatacctccagccgtgaatgccagactttaagattgcccggaggaagcaaactcttsktataaaaaaagcaggccatctgcttaacccttggctccaccataaggcactgggactcggatttctctatctgatagaggtattttctgtggccctgggagctgtctgtctttcccctacccccaaggatgccaggaagacgtccaccattagccatgtggcaacctttacttctatgcctcacaagtgcctttcagagagccccaattctgctttcccacaaaataaacctaatgccatcaggcaaaacatttctgtgtctgtatctgccctggtatattctcattcctggggtcacatcctgcctactctaggggtaggtgaaggagagctgtttcagtatttccagccagaccagccatgcagcccaccttgagcagcttgtgcggtggaagaagtgagaatagtcccccgttctctcacacagaaactcccctggtctctctatcagcaacagaaaaccaagccagatggactttgcaactaatcaagtttgggatttactgtcttctgaccaaccacagtgactgagatggggctgggaccagaagcccagtgggagtgaacagccgagggaaccagagtctggctgagcttgtggccagatatttaaactgggtccagccacacctgcaaaaccagggcaaggcagtaccgggaaactggctggagttgctgcggtttggggaagttgcacaccctttcatagatacctcccttaaccctcagtgcagattctgagaaaactccaaggcttctctgcctaacctagtataacccctgttccctactacatacatataacttttccattcccccagtaattgacccaaagtccctgcctctagctgtgcccattgtgcaatgatcagaatcccttgtttcaatagtattttgacttctttaagaatactctgtatttggaagctgaaacctcacttggatccattgttgggaaccaagtacggagccttacatagcccggaggagtttcaggagcaatgccactttcccttccatccctccctctgggtctggctcttcccatagtccattttccccttttatctcccattaatttctgtcttcctctctcaccttttccatgtctctagcatcctccaggatttaaaatcatctttacccaacttatctgtgaagtaatggcaaaagaacatctccaaattaagtactccttttcttcaaaggagtttcatgggatgtacagctagtataaaataaaaatatgggaagatgtccaatcttaaaaaccataagggcaaattaagacaaaactaagctgcccagagcagggtgagtggaaccagttttatgaataaagatgcttgtctcagcactatatgtggatatcaaaaattgtgaacaacttgaacacctatcaggaggagaatactttaatcaattatggcacattcaggagataatgttttacagtcatcaaaaattgtatatgagggccagcacggtggctcacacctgtaatcccagcactttgggaggccaaggcaggcggatcacctgaggtcaggagttcgagaccagactggctaacatggtaaaaccctgtttctactaaaaatacaaaaaagtaaccgggtgtggtggcacgtgcctgtaatcccagctactcgggaggctgaggcaggagaatcgcttgaacccgggaggcagaggttgtggtgagctgagattgcactattgcactccagcttgggcaacaagagcgaaactctgtctcaaaaaaaaattgtatttctgaagaattgttaagaacattggaaattcttgagatataatattgattggaaaaagatgaaactatatggtatgatctcaatatgtcctgatgaataaaaacataatacagaggacattattctgagataaaatacatcaaaatctttccattttatttgtatacttttacaatttttgattttttaaaatgtattctgatacacaaaataataaaaatgaaaaataaaaaatttggccgggcgcagtggctcatgcctgtaatcccagcactttgggagactgaggcaggtggatcacttgaggtcagcagtttgagaccagcctgaccatcatggtgaaaccccatctctactaaaaatacaaaaattaagctgtgtgtgatggtgcacacctgcaatcccaggtactcaggaggcttatgcgggagaatcgcttgaacctgggaggcggaggttgcagtgagccgagatcgggtcactgcactccagcctgggcgacagagtgagattccatctcaaaaaaaaaaaattgtagattcacattgcagtacaactgtgcatcttgcccattgatttctaaatgtattaactacttaaattaatcctgaatcttttcccaggcttaagtgggataatgttttattgtagatgcatatttcctggctctacccagtctttctttgaagactttatcatcctattttctgaatccagtggctgactttaatcttctctggaggaactagataatttctagactaatgcttacactcatgatccagattgtaatttctgaactccttcttccaaatagaatcaaaacaagaaaggggaaagcctctcaaagcaactgtgcgttaataatgaaacactctttttttctaatccaaggagggtttcatactttttcttagtttcttgccctcttcccttctgatcaataattgtaataggaaatttgcaattgtgccaatactcagattcaatactgaactactttcttgcattgtaattcaaattccaaggttaacaactagctgtatgtttccaaaacaatcttattgtatatgtattttcttaggtgaagtttccagaaatgattttttttttttgcagagccaaacacacatggtaatttaaaaaaataatgcacgtatgtggtaaaaacagtaaaagcaaggtatcaagtaaaaagtgaagagtcctccctttctcattcccattcctactctctaattttttatatatccattttgtaagctataatacagagattccatatactcttcacatactttccccagtggtaacctcttgcataactataggacaataacacactataggacaaaaatcaagaaattgacattgatacaatccatcaaccttattcagagttcaccagtttaacacatgcttattgtgtgtctgtatttagttctatataattttatcacatgtatgctgatgaccaccaccacagccaagatacaaaacattttcagtgtaaagatttctcatgctacccttttatagccacagctacctccctccctccctgtacttccctaacccttggcagtcactaatctgatctttatgtcttgtcatttcaaaaatgctacataaatggaatcagatttgattgttttcattcagcacaatccctttgagatctatccaaggttttgacatgtatcgagagtttattcctttttattgctgaatagtattaatattctatagtatggatgtaacatagtgtgtttaaacattcgcctgttgaaggacacttgggttgtttccagtttcaggttcttacaaataaagctactctgtgtgttcatgtacaggtttttattttcatttctctgggtaaatgcttaggaacacaaccactgggtcccatggtaagtccatgcttagttttagaagaaactgtcaaggctgggtgcatgatggctcccatctgtaatcccagcactttgggagaacaaggcagaaggatgacttgagcccaggaattcaagaccagccagggcaacatggcgaaaccccatctccaaaaaaagaaaaaagaaaaagccagacatggtgatgtgtgcctgcagtcccagctaattgggaggctacagtgggaggatcccttgagcctgtgaggcggaggttgaagtcagctatgatcacgccactgcactccagcttgggcaacagagccagaccctgtctcaaaaaaacaaaaacaaacaaaaaaaaggaaagaagaaggaaggaagggaaaggaaagagagagggagggaaggaaggaagggagggagggagggaggaagggaaaagaaaagaaaaaaagagaagaaaagaaactgccatactgttttccagagtagctggtttcacttttccaccagcaacgcatgagtgatccagtttgtccacagcctcaccagcatttagtgttactactgtttcttactttaatcattctgataggtgggtagtgatagctcactgtgatttttaatttgcatctccccaatgactaatgaacatcttttcatgtgctacttgccatctgtacatggtcgtcagtaaaatgtctgttcatgtcttttgcctactttctaactagactcctttgaaaatttctcatattgtttttaacaatagattttaaaagaatttacagagtaagaatacatttttgagacaatggggaaaatgatacggagtgaaaggtgatattaaagaattaatgttaatttcattatgtgataatagctgagtggctgtgcacaaaaaaaaaaaaaacttttcattggttgtaattcattttgaaatatttaggatagggccaggcacgctagctcacacctgtaatcccagcactctgggaggccgacgtagacagatcacgaggtcaagagattgagaccatcctggccaacatggtgaaacctcatttctactaaaaatacaaaagttagctgggcatggtggcacgcacctgtagtcccagctacttgggaggctgaggcaggagaatcgcttgaacccgggaggcggaggttgcagtgagccaagatcgcagcattgcatgcactccagcctggcaacagagcaagactccgtctcaaaaaaaaaaaaaaaaaaaaaaattaggatagaaatcacatgatgctttttaaaatgtggcaggtcagaaggaatagatgaaacaagagtgacaagatgttaattatcgttaaagccgagtgatggatacatggggagttatttatactatattatgtgtattgagatatttccataataaaaatgtttttaacaaagaatgtaaacccacggattgggagaaaatatttttaaaccatacatctgataagaggttaatatccaaaatataaaagaaactcaatagcaagaaaacaaatcacccaactgaaaaatgattacaggacgtgaacagacatttctcaaatgaagacatacaagtggccaacaggtttatgagaaatgttcaacaactaatcatcagggaaatgcaaatcaaaattacaatgagatagcacctcacatcttgttataatgactattattaaaaagctgaacgataactgttagtgacgacgtggagaaaagggttggcaggaataggaattagtacagccattgtgggcaatagtatggaggttcctctaaaagctaaaaagggatctaccatatgatccagcaatcccacttctgagtatatatccaaaagaaatgaaatcagcgtatcaaagagatatcttgctcttattcacgatagccaaaatatgaagtcaacctaagtgtccatcaacaaatgaatggttaggctgggcatggtggctcaggcctgtaaccccaacactttgggaagcctaggtgggtggattgcttgagcccaggagttcgagaccaacctgggcaacatgtcaaaaccccatctctattttattttaattaaattttaaataaataacccaaaatgaatggttaaaaaatgtgatatgtataatacacagtcatgcattgcttaatgatggggatatgttctgagagatgcattattagttaattttgtaattgtgtgaacatcatggagtatacagaacatacacaaacctagaaggtatagcctaccacacaaataggctatgtggtattgcctattgctcctgggctataaacctgtacagcctgttactgcactgagtactgcaggcaattgtaacacaaatcactaggcaatgcgaatttttcagctccattataatcttaagggaccaccatcctatatgtagtctggtggaaatattgttatgtggcgcatgactgtatacacagaaacacacacacacacacacacacacacacacacacacacaatggaatattatttagtctttaaaaaggaagaaattctgtcatttgctactacatagaggaatct

SEQ ID NO: 94887 - DNA, 62165 bp, Homo sapiens
  misc_feature (1)...(62165): n = A,T,C or G
gcttattttaataatttttgcattttgtttctaaataatgatattagagatctcatcatttgactttgtagatgtggataattttttattcccaatgagtgagaaaacaaattgtatttagccataactcaattttctttttaaggatttctgaagtgcttgagaaatttttatgagctatataagaattttgatcagataaatgcagcttctgggtctgatgagtgttatgttgggaatttttagaattgtaatcattttatgctctgatttcaatcatcagcatgtctttgattctttatggatatatattaaacagcttatgtatcattttttataaattaacactccataaaggtcaagaccaagatggcaagctagcagtgttcagctaaatgatcgactaagtatttgagtcatggacacatccatttgattgccactaactgctgcacatgttcaaatctgaagggaaatgatgggcagagcataaagtttataaagagtttccttgggagataactctggaatgatgcattcaggacagatccttggagctttaatgccaggctgatgccatattctttcagttcagcatctccaatttctgagaggaagaggcaagcaggcctgggcaatgctgacctgcctatgggattcactaagcagaaaggagagcctagccttggtgaatgtgataggggtagagaatgaaggaaattaagaaactagcccgcatagaaataaagtagcaaagggaaagaagggcctggagggcattgtgtgccgaaggaggccagtttttcctgcttgctgtgcctgtcgccatttcaccaagagtataggtgataggctgtggccccaagtaatgagcttttctcaccccaaactctataaggaatgaaaatagacataaataacatagaaatgtgtaagtggaaatatagaaatgcaaaacagaaatatgtaaataaaaatgaactctttatgttgctctgtatggaaagccatacccatgctggatttgtgtatatgaaaagggaggcttttcaactagtggggatttaaaaataaatgaatcatttatgcctccacttggcctgccttccagcctctggctgctgactcacctatacaaaatcttccttcccagcctcatctatgttaggcaggcctgtttttgccttcgcaggccctaaacactgtcacttgtggagacttcagccaacatcataataaacatattaaaatgcatccacatcctgcattaaacatttatatttttgctataaatttttgaaaatgctttggtaattttgcttttgaaattatttgtctgtgcataactaatttaatttacatggctgtgatttctccataagaattacatgtacgtgggaattcttgggaagtgagaagatccaacctaaaaatcgtcttcaaatataatgggtttttaaatgcataataaatttaactgttaatgaacttgatatactgttctattttgtatgccatttaattattatttttgaatttgtcattttagtattttgtagcctttacttaaaaacaaatttttttagagacagagtctccttctgtcgcccaggctggagtgctgtggcacaatcatagctcactgcagccttgaactcctgggctcaagtgatcctcctgcctcagcctcccgagtaactgggactgtaggcacataccaccatgcccagctaattttattttattttatttttgtagagatgggggtctcgttagattgcccaggctgatctcaaacttcaaatggtccttctgctttggcctcccaaagtgctgggattgtagttgtgaaccactgtgctcggctctagtcttttttaaagatcctgttttttttaattttgtttctgaaaagcctgtaagttctagacacttagtgatagttgcctaatagataaaagacaggcactgagcacccactgaatttgtgtgtgtttgtgtatgtgtgtacacgcacgcatgtgcagatggtggtggtaaaggtggtgagattcatgttttcttgaagccagagtttcatttatttgaattttattcaattgtcttttaactctttgcattggaagccacttatatgcaaccatcatttcccctgtgagagacctcagtttttagtgtccttacctcaatatattttaatttccacacaacctcttattcttcacttaacaaatatttattgagtgcccactatgtgcaatgcactgtttaggtgctgaggatactgtaaagttggaggaagaagtatctcgccttttccctaaggccgattccgccatctacatcttggatctttgtccctctcaattactgagggattttgcttgcaaccttactgcctctctcttctagcatcttaaaaggccccctctggccgggcgcggtggctcacgcctgtaatcccagcactttgggaggccgaggcgggtggatcatgaggtcaggagatcgagaccatcctggctaacaaggtgaaaccccgtctctactaaaaatacaaaaaattagccgggcgcggtggcgggcgcctgtagtcccagctactcgggaggctgaggcaggagaatggcgtgaacccaggaagtggagcttgcagtgagccgagattgcgctactgcagtccgcagtccgacctgggcgacagagcgagactccgtctcaaaaaaaaaaaaaaaaaaaaaggccccctctttgttggttccttcctctttgctttaaagtggcttcaggctttgtcaacaacctctgtttgacccttctaactaatttaattaaaattgtacttcgttccttyttatttccaaacctcttcaatctgtggtctcttgtctccrttttctcacaatacakttcctcctcaattccccataatcttgtttctatcctcaccacttattgaaaccaaacaattattggtctccagtgaactccttgacacgtccaaagaaagtctctttggccctcattttcttgtyctattttcagcatttgatactgctaacctcccctgcatattccttctttatctttcgttttcattgactgcaaatgattttcagtgcaggaaagtacatggaataacagaaccaatatatgtacccaccacccagttctatcaaatcttgcaacatcacttttcagattctgttttgagaaataaatattagatatatttgatattctctgtatgcctcccccgagtgtcaatcctctccctctcttaaatttggtgatcatgccctttcatgttttatatactattacagtactactcatctatgtagccataagcaatagatgatattttcagactttatatacacagtatactgtacatgttttgcaatttgcttttcactcaacattatatttttgaaatttagctgttactacccatagctcaaattcattcatcgagaacaccattatttattcattcacctgctgacatttacttggcttccatttttgagattacaaataatactgcaatgaacattcttttatatgtctctttgtgcatataaaaggtagagttttgccagtgtctatatctagaaatagaatttctagattgaggggtattgcctttattagacatcgtcaaattgttcttcatagcagttctaccaacttaaactccttctagccgtaaatcagagttccactgctagaacttcaacaacacttggggttgtctgactttttaaattttcacaaaaccgatggttgtgaaatggtatctcgtggttttacttttcaatttccctgaatagtaataaagttaggcatcttttcatgtctttattggccatctgggtttccttgactatgaattacttactcagatattttgtcaatttttctattaggtttctttcttatttataggagttcttatatatcctggataccaagtcattcattcatttaatcaatatttttctagcacctacttggctccaagaatggttctaggcactgagaatgcagctatgatcaaaacagacaaaatccttgcactcatggaactcaacattctagcgggtgaaggtaaatgaccaataatattgataaataaaacagaagtggtagatagtgatacataagcagggaagagggatagggaacatgtatgtgtggtgatggagaaggggattgttgaattacaattttcaataaagtggtctaggaaggcttcagtgagaaagtgacatttgagcaaagacctgaaggaggtgagagtgcatgcagagtgaacagcaagtgtaaaggccctgaggtaagagtgtgcctggcaagtcctagcaacaacaaggagtcagtgtgactaagcaaagctagttagggagagtggtgggaaatggtgggagatgtccgaaaggtgatgacagcttgtcttttttttttttttttttttttgagacaaggtcttgctctgtcacccaggctggagtgcagtggcgccatcacagctcactgtagatgtgacctcgctggctcaaggggatgctcccacctcagcctcctgagtagctgggactgcaagcacttgccaccacatccagctaatttttatagtttttgtagagacagggttttgccacgtttcccaggctggtcttgaactcctgggctcaagtgatcctaccacctcggcctcccaaagtgctgggattacaggcatgagccactgtgcaggccagtttgtcttttaacttgtttatattgtcttaaagtacatacattttgaaatttcatgtagctaaatgtcttattctcattccatattccaagctcatactcaatttttttttctgaaagttataaagttttgcttttcacatttagatctttaatccacctggaactgatttttcttccatggtttgaggtaggggtctaatttttataattttccatatggataagcagtagtcctagtaccacttagtggataatccattctttccccactgatttgaaatgtcccacacgctgcatatcaaccttccgtatatgtgtggtctgtttgaggggtttatattgtgtttcattgattgtctatctccacagcatacttttaattactacagatttacagtcactcttgatatctagtgtattatagattctggagcaaatgaataacacgatcgaaaaattactttgggaaaaatatttttatggctgtcaacagagtaaacatgtcaaaggaaagagtaaacccaacaggatttatttaaagaaaagtgcaataacccagataggctatcacaagggcttacaataaagttatggcagtgtgaatggagagaaaataaggaatctaaaagtaattccacgtaaaatattaacagggtgtgttgactgattggatatagagatgaggagggggaagacgatatatggctttccagtgaaatgataatgagttagttttgtgacgcagtgatgtgttaacaatggactctattaggtaagaggtctgggccagggatatatatttggacattgtctagttagaggtgaactggaggggacgcagaggaggagcaaaggtctgggctttggggaattctccgatttagggcgtggaagaaagaagaggaaaggaaatggtaggataaccaacacgggacattataaccttaagaaatatatatatatatatatatgtatttttttactgaatgatgtgggtcgtattgacacaacaggtttgagatctcccataggtatgactgtgttttgtttctgtggccttcaaagtcctcagaacaattttgatgtcacaggtggcatttaaaacccattccttgctggacctggtagagacgcccccagtccgtcaggtctctcgctgcagttccgcagtttgaccgcaggggacggaatctgcggcggcctggaaaactggcgggggcgcgaggcgccgctctctcttgggtcagattctcagctcccagctccccgctcccggctcccggcgcccggcgcccggcgcggagctgttcctcaaacgacacgcagccgaggtgggtgggtgtggggacgcgggagccagtgtcgtcggatcggcccgcagtccgctgtcctgctgagcccggaggccgcctggatggagccgccgctcccggtcggagcccagccgcttgccgtatccgccggagagaagggagaggggaggccgcgcagggccgggggtgggggtcgggggccctgcggaacacggtggggcggggcaaccgggtggcccagaggccgagcagagagggggagggggccggcgcgggagacgaagcagggcggggcggggcgggggagggcggcggtggggggggggtggaagacccccttcgccccgcagtgcaccactcctccccaccgcgcttccgaaggagacccttgactagcgcccgcatactgtcgagggtatggagatgaagggtcctctccgggagccctgcgccctgaccctagcccagaggaacgggcaatatgagtaagtaaccacctgattcccacagaggaggggagcctgccattacctcccaaccccaaaccgcgacgggtcacccactgtcctcctactgaagccacgcgggcaacaggttcaggtccaggtgtgaagtgccagtgctctctaacctcggggctttgtccccaacttccaagcctctggattgtgcttggcagtgtggctcagtggaaggactgaatgggcggggaagcaggaagcctgggttcttagttcctgcccctgcaactgacatgtgttgtgtaacgttgggcaagtcaataaagctttctgggccaaagttaactcttcagtttaataaaaccattaactgccttaccttacagcctttggaattataactgggggaaaaataaatgcgagagtggcttccaaaaagtaaaagtgctatggaaatgcttcattgttaacgttacagacttgtcttaaccctattcagctggtttctccagtctccccgtccccttatcccactgggttgaaggcatattcattaattcagtaatggtttagtgtaggccagaaactgcctcacttactgactttactgttagaaagaaaaggtaatgaaatgtgtagagatagaaatgacagtattttatcagtgtgtcaccttcctctctgccataggagctccgtaaatactgttgactgattgatcaaaagattattttgataagctatcaccatagctgctaacctcactctattgtcactaatatcttatctcaaaaatatccatggtgaccattacgtatcataggcccctatccctgtgtgcccaagacacctcacttggatattcattggcttcttgacatcatattccttcccagtttaaaaattgttcacttaaatcttgccatctcccaacattggcttctgcctaaaaccaattttctcagtccccacttttagatcctctgtatctatgctgtcagatttacacggaagaaattcccactggcccaacctgctcttctctgagactattggtgccactctaactggatgtcagctaattctgtgaagtagctctttcataggtcctgcttagtcagctctactgggaagttcatcaaacccggatttcatcaaaccctggaagactagtttaatgaaactaaactaaattcagaatttaataaaacaaaattcagcagaaaagtggaacaccactaacatttccaaaggctagagtgggttacagagaggtgacccttgggcaaaccagtaaaacttgtgtgccttggtttcctctaatgtaaaaacaaaatcatgaagattgaatagagtagctacattgttgagatgaccacagcccagaatctagtccctcggattagtagatttggaactctgttgagctaataaggaagtcgtgtgttccaattctgtgtaagttatgggggtatagttgggggtatatgtgggggtatggggctgctatataactaacattaatatataggtaacactatataacaactatataactaacaactaatatagttgttgctatattagcagtttatatataaactatgtaaatagttttaaatatatataaactatagttttaaatacatataaactatagtttatatataaactaacatataactaacaactaatatagttgttgctatataactaacattcaatggctgcttatgtgccaggtactgttctaagcccttttcattagttagttcatttaatccacatgtgagggttactataagatagtaatatcatcatcccccttttatagatacagaaattgaagcacagacaggttaagtcacttgtttgcaattagggagtagaatacctgagatctgatcctatgtaacatgtctcagaattacactgagaagtttctcttgaaagcatttgctggagacacctaataccataataccatctgtaatcctcatattcttgtctctctggtgtcttttctgactcgagtgtccagaactttttacttttggcttttttatcctagaacttgaagcctgacttaaatctttaggtctgtggttcctactgtcaaccataggaaatttgcttgaccaaaattacaattaaaaatcagggtttttttggaaacagggaatcaaacacttaagattcatatttttcaaggataatagattatgacaaaacctgtttgacctttaaccttccttgaacaaatcaaagtgtttcctagggataaggcagagttggcattcaggatttgtcactcttttctgtttgacaactaccaaattctgaattccattgttttgctgtataccaattatttctaatctttatattctgaaatgaataattacactcagaatttttatgcttattcttagccctactcttttattgtaatttagtgggtaacacgtagtaaatactcaataaatgttggtgaaattcacttaaattctcagtttatttgttttgtaatagtttttaacagtactgtccagatgaagctttaatgctaatgttcaacaccatttcttgtttatgtattttgagattttagtggtttgtgtttatcttcctcaaagtaagctcttcctccttaacccttgatttctcagccttttatctggtttctggtttccatctgggtttataggactctccactcaactcatgaactttccagatggaaaggggcctgccccatattcctgtaatcaccttagagtacaaacccctgcaaattaggcaagaaggatcacagcagaaaaacagcattaatacttttatttcccttagttctatctaagtaattacttatcctatcccaggttatcctcttcaaagttaacacatttgaaaatgcaaaaagcaaaagcaacaagcacccccaaaagacaacaaaatagaaatcaaacccttcaaaacaatgacattttaatgtcagaagttggacagtttcattgaaaaattcaccgctgcttatagcttaattaagctagttaatttattcagccagtatttgttgagcatctattaggctgcagacaaaactgaatatgatctggtctttgctttcaaggagctgaaatcagtgaggggaaataaatataaccataatggagtgtgtaagtgttctattagaggggcaaacaaaggcgataaggctgctggttctgcttgggggtactgaggacagtttcatggaggaggtgatatttgagatgaaactcggaaagaaacagagtgttcctgwcaaaaaactaaaaacaatacttgaagagtgcttgactttgagaatgctagttgacgttcagaatggctgtttaccagtaggtcgtaccttgattctggaccactaaggataaataataaatgaaaaattaatatttcaggagtacgtatggatttagaagtatggatttcatctggggagtcaggtttactcatgtttatgtagaaataccagcgtaaacttggaaaccagagaagaaacaagggatttgaaggcaatccagttgtgatatctgccaccttgttggtcactgatattttgaccaatccagctggctgagcaccccctcttactcctccatgaacctgaatgcttgtttgaagagacagatccattctttggtaaaaagccatgggaatataattggaaggttaatttatgaattttctaattcattgattccacacacacgagcaactcctgtgtgccaggctttgtgctaggtactagaaattccgtggtgtaaagatagctgtggtccctgcactcatggacttcacatctagctgtcagttcttcactctggtatgcatactctgaagctatatactctgtaattcatgctcttaagcttgtacactgtttttaggatatatggcctagagaacagtgtgggtaatcagatgttcatcaccactagcatccttttaggcctagagcaatatctagctgtcatgatgctcagatccagggaactagatgcagcaagtctagtaaatacagactagatttgtataacaggacagtgaagtatttttttgctaaatgagtttttcagtggctgttctttgatgcgttcttctgtttcctaggttaataatccagttgcatgagaaggaacagcatgttcaagatatcattcctataaatagccacttcagatgtgttcaaggtactagctttaattccttagctagttttataatgttttttctcggtcattactgcattatgtaataccatacatatttaaatttgtcagtgcatgtaaaatgaaatgtattactctttgcataaaaagataacattgaggagatgatactttctctaagaatgctgaagggttatatcgaaatatatttgtatatgtgtgtctatagtctcacctgtttccttggcttgggttagagatgtatgtagattgttacctgtgtaggtagttttttatgctgactgacctatatgtggatttaaataacattcttgggcttaacggacacagtgctcataaggtaccaaggtcacttggattcacacacattcagcactttctccacatgctatttgaaattaagacatttggcaacatgccttgccagactgtaatatcttacactcaattgtgctgattctcaaaccttgacattggtgaatcataagaaaattgactctggggaggaaatatttggcctcctgccctcaaatttggggacggagcatagaaaatctgttgtttcatctgctacaatgaaacttaaaaattgggaggtttgtgtaggaggtgttgcttctgtcatctcacattgctctagaaaggaaattgatactagagaacaaatgcattctgttttcactaggaccagtggctttatctagcagaagcattctgtatcaattgtagcttcttggaaaacttgttttttcaagacaaggtcatttcccaggctcaagtgatcctcccacttcagcctcccaagtagctgggactgcaggtgcaccaccccccagctaattttttttgtaatttttgtagtgacggggtttcgccatgttgcccaggctggtctcaaactcctgagttcaagcaatctgcctgtctcggcctccaaaagtgctgggattacaggtgtgagccagcatgcctggcctttcttggaaaacttaaatcttaccttgcatggattatttcttaaactacattgaactttttttttaatcactaagtgacatgtacataatgtaatacatttggaaagaacagaaaagtgtaaagaaaataggtcacttaaattcccatcctttcagagataaacacctagcattttccttttttctacacatacattgcagggtgagtgatactcatcttatacaattttttgtctcttctacatgctattgtattatgagcacttttccatgccattaatggctatataccataccagtttatgaatggtccataatgtaattattcccctatgttgacatttgggttatttttcactagtatcaatagtaatatgatgaacatctctgcacctaaatatacctgcacatctcttatttcctcaggatgtattcctataagtgaaaatactaagctagtggatatgactttttaagaatgcatgtgttaagaattaaaaataacttcaatgaatagtgtccatatttgtatggaagaatgaagtgatagctatttagcctgccctatgtgagagagacatactaaacaaggtagccacgttccatagtaagttgctgtggccacctcacttttcaaggtgtaggccttcacagaggggaagagccaaagaacatgactttaaattaatatcctattagctttgtacctttttactctacctctaggatctcttttaccctgtttctcttagtatttttaataagaaatcaattgctgattgttagatcgtagtgctgcttcttagaacctgggaaaatatgtgcacacatgtaacgtagttccccatgactaaaggaagacttacttttgattttcatctcctttctatttcctgacccctgcatctattttgtaaactgtggccaggcgcgatggcttgcacctgtaatcccaacattttgggaagctgaggcaggaggattgcttgagcccaggggttcaagaccagcctgggcaacattgcgagaccccatctgtacaaaaataaaattaaaaaaacaacatttgccagacgtggtggcagatacatgtagtcccagctacttgggaggctgaagcaggagggttgcttgagcccagcagttcgaggctgcagtgagctgtgattgtgccactgcatgctaacctgggtgagagagtgaggccatctctaaagaaaaagaaaaccggctgggcgcggtggctcaggcctgtaatcccagcactttgggaggccaaggtgggcagatcacaaggtcaggagattgagaccatcctggctaacacgatgaaaccccgtctctactaaaaatacaaaaaattagccgggcatggtggcgggtgcctgtagtcccaactactcgggaggctgaggcaggagaatggtgtgaacctgggaggcggagcttgcagtgagccgagatcgtgccactgcactccagcctgggtgacagagcaagactccgtctcaaaaaaaaaaaaaaaaaaagaaaaagaaaaccatctgtaaacactcaggttttacagaactaaaagttaatgaagaacagtagtaagcatacaatatctatgtcttgatgccctaattccccttgtttaatcatcctaataataatatcgagactactttttagtgttaaaggagttagttccttgccagttgcttctgttgtacctgagtaatggagccaaataaacaattcagtcttgggagggaggtgaaaaaggtgagactactccatttgaccaaggtagatccaggctaatcccaaggagtcagtacccagagttcaattagccaggagggtctggcaggtgcacttggtcaaatccagagaaatcagaggggaagagataggttgggtctagacacttgttgtaaaggaagaagtccaggagaaccattgagagataagagaaatccaaacttgcagactgctttgcaccctgtttggtacggagggccttgggcccacaggtagtagttgtaacctgaaggtatactctgcccccatgtgtggggcaggggcagaggtgatgagatcactgggaaattttcagagaatagatctgagttaagaaagtaattcacctctgggctttcagggtcacttcctttgccttctgttatctaaagaagtatctaaaggacccagagttaaatcattatgttacagttaaggggaattaaacttgctttcgctgaattaacatgttgttatgttctgtactattaatttctcattcgttgatttgctttgaggagttccatttggttacttcttcagttcatttttattttagttgatttgctcatagtctttagaacccagtgctataaaaaatccctttaaaaaatattaaacgaaaagggatttaaaaaaatatgttctaagacctaggagtagtgactgagagaagcagttatttagttaggcatgtattcttttggttgtagtgagtggttttctcttccctaatcctactctcttttttttcccctctcagaagcagaagaaactcttttgattgacatagcttctaacagtgagtatctttctgaatgtgcttgatttttactcaacaaatatttacttgaacactcactacatttaagacaccttttggggcacattttttattttaccatcttttcctgtagtctcctgtagcagccatacaaattagcactgtttcccaaaaacatgtaggctaagcctaagaaaaagcaggtggctggtaagaatctttataaaaataaaaaataatgatctacctttctaatgctgaacttccgtgagctaccagtattgttgctgtcagttgaatcattgctgtagaattgataattgtaggaagggctgatgtttaaagcacataaggtttattggtggagtttttttggtcattttttaactgctattacattttaagttttttccctaccctctttttaaattttgtgtgttaagtcataatattttcctttatttgttgtatttttttggaaggctgaagagtcccttaaattgcttgtccaggcattcctttaaaaaaaaaagtttagtcttttatttaagccccatcccctcaaggcatctctttattagagggaacatgatcttcttttcaatgtttccattctctcatttttatctgtttgaagcaaatcatctttgactttctgtgcaaactgttctttgtttatcatctaattgtactattttatggagtggagaaaatgggcactcgatgctactgtgaggttgctatggaaaagagtatctgaccacatgaatctaaatcaaatgggttgccttatctcttggttgagtccttggatgagtgggaactggcactgagcttgggactaggggtttacataactttgtttagacagtccctgcccttggcactattaatttgtattgaacactttaagtaggctttttttctggcttgagtttttttttttttccctttggtcgtgaattttagaagtcttaaaggctgtgcctgaaaggccaggtaaaccccagctgcaagtatccaagagagaaaataacttaatgtctatttcttattgtgcttagaaaggagaaggcaaaaacaacacttaaaaaagcaaaactagaacaaaagcaattccataacaactgacactgctgctgaaataagagatggaaatgtcctgtatttgatgtggagaagtatttgattcaaagctgaaaagttaaactgagctgtgccttttctcttataagcacctaattttcggcattagttttgttgtggccgcttctacattagccatgtgttgctatgtccagagttctagttactggctcatagggggaaaataggtaagtgaccacttgaataaaatcctttgttatttctacccatttagtagtatttgcactgaaaccatattttatcttgatccttgggcttcatacataaacctttatggtacacggtgtgttgcaggaaggagatcttgggtttgttaggcaggcctgattttaatgtaaatatgcattttcccattgtctggatattggtgttaaatgctttgtaaataattttttctcacagaagtaatacatcttcattatatacaatttactaattcagaaaagcttaaagtatcaaattaagattattttcctgcaatctagagatcaccactgtggttaacatttttatgtatttccttccagtctttatatttttacataattggaatcctcatatgcagtttttatcctgcgtcttcatttaacattatattgtcccattttcttatgtcatttacaattactttataatatgctttttaaaaaccaaatatttcaccatagggtctgtgccaaattttattaaattaacttctttataaaattaagtcattgtcaaggaacatgatatatctgtttttttcaggtcctcttttatatctttccaataaaattttatagtttcttaatatatatagtttttaggttaagtatttcgtggtggattttatttgctgctattgcgagtggaggttttttctatgtccttctaattgtttattactagtatacagaatagctgttgagttgtggatatttatcttttatcccagttgcttccattgaaatttatttttnnnnnnnnnnnnnnnnnnnnnnnnnnnnnnnnnnnnnnnnnnnnnnnnnnnnnnnnnnnnnnnnnnnnnnnnnnnnnnnnnnnnnnnnnnnnnnnnnnnnnnnnnnnnnnnnnnnnnnnnnnnnnnnnnnnnnnnnnnnnnnnnnnnnnnnnnnnnnnnnnnnnnnnnnnnnnnnnnnnnnnnnnnnnnnnnnnnnnnnnnnnnnnnnnnnnnnnnnnnnnnnnnnnnnnnnnnnnnnnnnnnnnnnnnnnnnnnnnnnnnnnnnnnnnnnnnnnnnnnnnnnnnnnnnnnnnnnnnnnnnnnnnnnnnnnnnnnnnnnnnnnnnnnnnnnnnnnnnnnnnnnnnnnnnnnnnnnnnnnnnnnnnnnnnnnnnnnnnnnnnnnnnnnnnnnnnnnnnnnnnnnnnnnnnnnnnnnnnnnnnnnnnnnnnnnnnnnnnnnnnnnnnnnnnnnnnnnnnnnnnnnnnnnnnnnnnnnnnnnnnnnnnnnnnnnnnnnnnnnnnnnnnnnnnnnnnnnnnnnnnnnnnnnnnnnnnnnnnnnnnnnnnnnnnnnnnnnnnnnnnnnnnnnnnnnnnnnnnnnnnnnnnnnnnnnnnnnnnnnnnnnnnnnnnnnnnnnnnnnnnnnnnnnnnnnnnnnnnnnnnnnnnnnnnnnnnnnnnnnnnnnnnnnnnnnnnnnnnnnnnnnnnnnnnnnnnnnnnnnnnnnnnnnnnnnnnnnnnnnnnnnnnnnnnnnnnnnnnnnnnnnnnnnnnnnnnnnnnnnnnnnnnnnnnnnnnnnnnnnnnnnnnnnnnnnnnnnnnnnnnnnnnnnnnnnnnnnnnnnnnnnnnnnnnnnnnnnnnnnnnnnnnnnnnnnnnnnnnnnnnnnnnnnnnnnnnnnnnnnnnnnnnnnnnnnnnnnnnnnnnnnnnnnnnnnnnnnnnnnnnnnnnnnnnnnnnnnnnnnnnnnnnnnnnnnnnnnnnnnnnnnnnnnnnnnnnnnnnnnnnnnnnnnnnnnnnnnnnnnnnnnnnnnnnnnnnnnnnnnnnnnnnnnnnnnnnnnnnnnnnnnnnnnnnnnnnnnnnnnnnnnnnnnnnnnnnnnnnnnnnnnnnnnnnnnnnnnnnnnnnnnnnnnnnnnnnnnnnnnnnnnnnnnnnnnnnnnnnnnnnnnnnnnnnnnnnnnnnnnnnnnnnnnnnnnnnnnnnnnnnnnnnnnnnnnnnnnnnnnnnnnnnnnnnnnnnnnnnnnnnnnnnnnnnnnnnnnnnnnnnnnnnnnnnnnnnnnnnnnnnnnnnnnnnnnnnnnnnnnnnnnnnnnnnnnnnnnnnnnnnnnnnnnnnnnnnnnnnnnnnnnnnnnnnnnnnnnnnnnnnnnnnnnnnnnnnnnnnnnnnnnnnnnnnnnnnnnnnnnnnnnnnnnnnnnnnnnnnnnnnnnnnnnnnnnnnnnnnnnnnnnnnnnnnnnnnnnnnnnnnnnnnnnnnnnnnnnnnnnnnnnnnnnnnnnnnnnnnnnnnnnnnnnnnnnnnnnnnnnnnnnnnnnnnnnnnnnnnnnnnnnnnnnnnnnnnnnnnnnnnnnnnnnnnnnnnnnnnnnnnnnnnnnnnnnnnnnnnnnnnnnnnnnnnnnnnnnnnnnnnnnnnnnnnnnnnnnnnnnnnnnnnnnnnnnnnnnnnnnnnnnnnnnnnnnnnnnnnnnnnnnnnnnnnnnnnnnnnnnnnnnnnnnnnnnnnnnnnnnnnnnnnnnnnnnnnnnnnnnnnnnnnnnnnnnnnnnnnnnnnnnnnnnnnnnnnnnnnnnnnnnnnnnnnnnnnnnnnnnnnnnnnnnnnnnnnnnnnnnnnnnnnnnnnnnnnnnnnnnnnnnnnnnnnnnnnnnnnnnnnnnnnnnnnnnnnnnnnnnnnnnnnnnnnnnnnnnnnnnnnnnnnnnnnnnnnnnnnnnnnnnnnnnnnnnnnnnnnnnnnnnnnnnnnnnnnnnnnnnnnnnnnnnnnnnnnnnnnnnnnnnnnnnnnnnnnnnnnnnnnnnnnnnnnnnnnnnnnnnnnnnnnnnnnnnnnnnnnnnnnnnnnnnnnnnnnnnnnnnnnnnnnnnnnnnnnnnnnnnnnnnnnnnnnnnnnnnnnnnnnnnnnnnnnnnnnnnnnnnnnnnnnnnnnnnnnnnnnnnnnnnnnnnnnnnnnnnnnnnnnnnnnnnnnnnnnnnnnnnnnnnnnnnnnnnnnnnnnnnnnnnnnnnnnnnnnnnnnnnnnnnnnnnnnnnnnnnnnnnnnnnnnnnnnnnnnnnnnnnnnnnnnnnnnnnnnnnnnnnnnnnnnnnnnnnnnnnnnnnnnnnnnnnnnnnnnnnnnnnnnnnnnnnnnnnnnnnnnnnnnnnnnnnnnnnnnnnnnnnnnnnnnnnnnnnnnnnnnnnnnnnnnnnnnnnnnnnnnnnnnnnnnnnnnnnnnnnnnnnnnnnnnnnnnnnnnnnnnnnnnnnnnnnnnnnnnnnnnnnnnnnnnnnnnnnnnnnnnnnnnnnnnnnnnntagccggacatggtggcgggcacctgtaatcccagctactcaggaggttgatgcaggagaattgcttgaacccaggggacgaggttgcagtgagccgagatcacgccactgtgttccagcctgggcaacagagcaagactccgtctcaaaaaataaataaaaacaaaaataaagtgcctctggtaattttaatgcatgcatagttgagaactactgagagatgcagagaatattcagatgaagttgaggatgtaggagtgtttgcagatcacagaggtccagaaggttttaggatggacaagaagagtagaaggttgagtcttgaggtaatttgttttctttctcaagcaacatggtgagggagcatccagtgttattttgtgagcaatttctggaatcttctggcccattaaataggtcagttatatatttgctaaaatatgtctttcaagaattgtgtgtttgtgtgtgtgtgagagataataagggtttttgttctaaatttatgtcagatagaaactactcttttaaaaccacatttagtataaataatctgagaaagaaaggacttgttaggccctgaaggagttttccctatatcttcatggctgctataattgacacttttttccttccctctcttttttcccctctacagtggcaccctcattaattttcttatccgtagtctatttgggtgccttctttcacatttttctccatttttatctattttcttctaattaattattttattttcctttttgtaactcattttacaaagacagaaagaagaagaaatgcagaggacaaaaagctaaaggttcagaagtggatttccaccataaaaactaggattttcatttcattttctcatgtatttgttatttacacgtggtaaagagtccagttcatcagtcattaaataccttctgtctgtgaagtctgatgttactgtcaccagtagagtgaccagcaagccttatttgcctgggactttcccagtcttagcattggaagtcctgagtcctaggaagcctctgagtaccatacagtgctgggacagttggtcaccctagactcctgaaagtgctgggttcgctgtatgtgcaccctgcatgcgtaccctgcctcttgcccttaaggagcttgtagtttccagaggcatgagaaaacaacgtatgtaataaatcagttacaataagaatagaaacaagtacataggtttcctggatcaccacatccaaacagttgatatagatgataactatagggcatcaaaaaaggggagacaatatgttatacacataataaattaaagccctagctaactttgcttctaattctcctagtttccaattggctgtacttgaaccaaaccacttctgagcataggtcattatattgtttttgtatgtttattcaagacatacattttaaacttgaggtaatgagttgtagatgcttcttttcagaatacttcaaaccagtatcactatttttaagttattttgtaaatttaatctgtrcttacggacaaaccatcctacttattttattcccttcatgcttcagatactctgacaatgtgatctggacttgaaatggtaggaatttccagctaaggaatgggagggagggtgattgaggaatttaccttttgctggaatttgaaggtccctgctttgatgtctgagagatagatcagaacgcaggaaagtataattttagtatgtgtcatatccttagatcgggctgctcatggacacggttcatcagccttaggagttctcacttcccttagggttccctctctgcatcaccccttccaccaccgtcatactgactctcttgatcttgtatgtgtgcttcctatattagagatctggaatatttgtgatctggaccttcttctgttaacctgataagttgagaatatgatcccagtaaaacattttatcccatagcagtatatgtatggatttcaattctttttaggtggctgcaaaattcgggttcagggggactggatcagagagcgccgctttgaaatccctgatgaggaacactgtttgaagttcctctcagctgtccttgctgctcagaaaggtaactaaagactcagcgattttctttcttctatttcaacgggagtggaattctgacatgctgatacagaggaaagtggccattggcaaaatacctcaccctttaagccctgatagctgatttttttttcttcaggagtgaacacagggataggttagggaaaaaatctgcccagctttaaggacactaggcaagttttcagaatattcagtgtcatggcaagcacagcttaccatagactataattctccttctgcccctagatgaccccagagctgccctcatttccttagtttcttccactgtatccaaaaatggtgctggcccctgcatataaggaatgttgaaagaatggcttttggctatagtaaattctactcagtgaaagacttcccagtttctgaccatgaaccttatctctctagctcagtcacagcttcttgttccagagcaaaaggactcatctagctggtaccagaaattagacactaaggacaaaccttctgttttttcaggtactaaaaagttcctggtttccttgttgctatggtcattgcagagtcagtagattttgtcaggccaaatatggtgatgtagattaaagctgatgtcagacacattctcctgcagagtagttttatcaagtccaggcccactgaccagtgttcactccttatccttcctgtagcatggtagctgttcaggagccagcttagcagggtggtagaaagtacaagctcgagagccagacagcctggatttgaatcccaagtcaagaacttactagttgtacaaccttcatcaagttactcaacaactctgaacttcccttttcctttctgtaatatgggaagatttttaatagtacttacttcttggagtttttgtgatgattaagtgagatcatgatatagtcccttactctcaaccaggcattgtgctcagtcttcaataaatgttagctattactagtctgttccaagttcttataaacttctattgttctagttagtatatcagtgcttcagggataggtatgcttcttcgaactccaatccaagtaatttctacccttatgatagttttctgtttagtaataccactgatcaaattgtgatcaaatcaaagccctgttaccctggatatgttggatgttagattttttccccgtttgactttggggtctgtgtctttcagggcttcttggatttgaagacaatttttcttctatgaatttggacaagaaaataaattcacaaaatcagcctactgggattcatcgggaacccccacctccacccttttcagtgaataaaatgtaagtcccatgtgaaaacatatttgccttgtaggagaattatagtttaaacaattttacttttgaatctctcatttatttgctaggcttccacgtgaaaaagaagcttctaacaaggagcagcccaaagtgaccaacaccatgcggaagctctttgtaccaaatacccaatctgggcagcgggagggtctcatcaaacatatcctggcaaagcgagagaaagaatatgtcaacattcagactttcaggttagtgtctcttttgcttcctgagtctaaaaagttagtatatataacagacagtggcctgttgatatttaagacattagcctaattaagaatcaaaatatgataaaaaggaatggttgcctgtttcaagctcctgtctctatgctggccaataacatgcatatcagaaataatgcagatgctacagtttcccttggattttctttttttgtgtgtgtgggtcagggtctctctttgtcacccaggctggagagcagatagatcatggcttactgtagcctcaacctctcagtcgtaagcaatcctcccacgccagccctgcaagtaggtggaactacaggtgcacaccaccacatccagctaatatttgtgttttttatagagactgggtttcaccaggttgcccaggctggtctcaaattcctgagctcaggcaatccacccgccttggcctcacaaagtgttaggattacaggcttgagccaccgtgcttggccttcccttggattttctaactactaataatgccatgtctactaatgtctctactgagtcctagagaaccaaatcaaggtcacatgtactagagaattttcccctagcacattccataagcaagcgtgtttatatatctggcctgttaagtttttttttttcagccaatattagaaaattaaagtccatcattaccactagctcttaacttacttactttggtaaataaagaaagtttcacccagtcctcttgattgggaggtctatcttgggttcttttatctgtattattttttatttcatcttttttctggacttgtgtgtgtatgctgcatgtgaggtaccatgtggcatgtatcgccaatgcatgaagcaacaccacatttctttgttattcatgagcagaatgtacccttctagtccaagattctagtcccatctgctatcctgtcatacctcatttattctaattcagtcataactatatccctatgctaaaacttgcagttcctcatatcccccactatgcttatatttgtgtgtaaacagttaagacagtcatgagttttcccttctgctttcccccttaatactatgtctgcctcatcagaatttcctacacagatgtccttgtaatccttcaggaagtgagttcctggagtcaactatagccccttatagaacatttatccatatttgactagcttacagcatgaagatacctctttcccatccataagctctcctatcaagtatgagtttggatggagcttaattgaaaggaaatgtggtatagcaattacctttgcattttttaaaaataaagacttggtttccttctgtagttttacttaatgtaaaatttagagaaaataagcccactgcctttgtgttctagatgcaaaagatctttcttacatatgtggcaaaacattttgaggaattatgttagcatattgtgaacatacctttgtatggaagcgaaaagaaagamcttctgttggtttatacttgatctttgttttcaaattatcttttcgtattatgtattagattttttgttggaacttggaatgtgaatggccagtctccagatagcgggttagaaccttggctgaactgtgatcccaatcctcctgatatctactgcattgggtaaagaacacttctggaatttccttttggctatatgtttggtgttcatttacatgatgttttgccttttttaaaaaagactgttggtaaaacctactgtagactatacacgagagttaacttgcgggtcaaatttgtgagaacagaaatgaacagatacctaaaatggtgtaaggaagcatctaattttcttgaaacccgtaggaatctatatattctgcatagaaactaagacttggggtcagttctaacagtgacagttcctaggatataagagcaaagctctgctgttatcctctgtgggaggtattttgatttattttttgcatagcttatgaatgtacttgtgggaattctttagaaaagaaagctacttgttcttactgataacctgggtgaacagagcagttctataaaatttatctctctcccatctttttttcatctaatgtttcaacatatgggacaggaggtagccagagataattatgggatatgtatagatctcatatcccttttttcctcagattccaagaactggacttgagcacagaagccttcttctactttgaatctgtgaaggaayaagaatrgtccatggctgtagagagaggtttgcattccaaagccaagtataagaaagtaagccgcatttaattatctttttaagtgtatgactaaatagggctcaccgggagttattccattatctacaacttgttccaaaagaatagtttaattgaattcttctctgtgtgtaatactgggatagggcagattgatcattcatccttatttcctagaaaaaaaaatccctaagctttctgatactatattttcattgcttagatagcttttaggggaaaaaagaattttattatgcttatatcaatacttagtttgaaataattacatataagatttagattactcactgacatggtcagaattgaatgctttacagaaaagcaatatgaaacgtgggcgcatggtgcatgtgttgcaatcagagcaagaatagaagtggtgtggaatttgaacgagttctaaacttggttttaagttaagaggagagttgactttagcaagatgggccaatttgtttgtctttagaaggtatgtggtaaaggcatttagctaccagaagagttaattacagggctatcatactaaggtctctaaaagaagtaatgtgagtaatttttctctacatcttctaacagtttatataggtaataaaactcctggggatgttattcctctcatataggtccctgactaatgtatatctcagacatatttctagctgtagttcacaagttaaaaataagtaaaaaagattgctgtttggttgatttcaatttcttagaaaattagacatcagaaactaggaaggaaaggtggaaggaacaagctgggatagtggctttattatttgaacttttaatgctgcttactcctggtaggctaagaagtgattaaaagaatagatctagagctgaaagtactcattgtccctcccagcttttaactcttattggtcagtgccagattagagcctccccagagaatattagtttccacttgacggggtccactgagaaattagaggatatgaagtcagatttgggcactagtatatcatcttgatggaaaattagtcgtgggacattagaaatgtggcaaagattggtattaacattaaccttttgtaactccccggaactcataggttcaactggtgcgccttgttgggatgatgcttcttatatttgccagaaaggatcagtgtysatacattcgtgatattgctacagaaacagttggaactggaatcatggggaaaatggtgagttactttggaaatgagcttgattattattcatgttcatgtaaagttcagttgcttgttctgtgtactaattgaataattactcttgctaacagggaaacaaaggtgrggtagctgtgagatttgtatttcacaacaccaccttttgcattgkcaattccyatctggctgcacacgtggaggactttgagagaaggaatyaagattataaggacatttgtgcgagaatgagttttgtggtcccaaatcagaccctcccgcagttgaacatcatgaaacatgagtaagtggttaactcacctgtagcctttgagtagtggctacaggagtttggatagtgtagagattaaatgtgagatactgtagagctgtgaagagtgaaagattaccagtgagggattggggtcacaaaggagagggtttttgagtaataacagaatcattgaggcagagaaattagacttgatatcagaggaaaagatagttctattagtggggcacctagaataatgctggagggtctgtagttggagtcagtttttattgtttttatgataaaatagaaatattcattgcaaatgtaataaaagataaaattagaagttaaatttcctcatttcttattctctacctagccagtccctctctccaaaggaaaccattcttaacagttgggtgtgtagccttttagatctgtactgtccaatatgacaaccagtagccatatatgrctgttaggtacctgaaagtgactggtccaaattaagatatgctgtatgcataagctatatattggattttaaagacttaggaagaagatgtacgatatcttgatttctaaaatattgatcacatgttgaaataatttggatatattgagtaaaatgaaatttattgatactcacttgttttttttctttttaaatgcagctactagaaaacttaaaattatattgtgaggtgcattataattctattaaatagcactattctagccttttgtctattcatatacaaacacacacataggtacttggtgtataagactgtattattctatttattgtggattcctttccaagccagtatatatagatctacattattctttttaatggctgtgcttattaaaaacaggggcagcagagagaggtcagtgaagaatgggatttaataagcatagaagcagagatgtgttgaggagtagatgtggtggtagaaaatgattagttttaaagaaattaatatacctaaaaccatgaaaaccctagaagaaaacctaggcattaccattcaggacataggcatgggcaaggacttcatgtctaaaacaccaaaagcaatggcaacaaaagccaaaattgacaaatgggatctaattcaactaaagagcttctgcacagcaaaagaaactaccatcagagtgaacaggcaacctacaaaatgggagaaaattttcgcaacctactcatctgacaaagggctaatatccagaatctacaatgaactcaaacaaatttacaagaaaaaaacaaccccatcaaaaagtgggcaaaggacatgaacagacacttctcaaaagaagacatttatgcagccaaaaaacacatgaaaaaatgctcaccatcactggccatcagagaaacgcaaatcaaaaccacaatgagataccatctcacaccagttagaatggcaatcattaaaaagtcaggagacaacaggtgctggagaggatgtggagaaataggaacacttttacactgttggtgggactgtaaactagttcaacccttgtggaagtcagtgtggcgattcctcagggatctagaactagaaataccatttgacccagccatcccattactgggtatatacccaaaggactataaatcatgctgctataaagacatatgcacacgtatgtttatcgcggcactattcacaatagcaaagacttggaaccaagccaaatgtccaacaatgatagactggattaagaaaatgtggcacatatacaccatggaatactatgcagccataaaaaatgatgagctcatgtcctttgtagggacatggatgaaattggaaatcatcattcacagtaaactatcgcaagaacaaaaaaccaaacactgcatgttctcactcataggtgggaattgaacaatgagaacacatggacacaggaaggggaacatcacactctggggactgttgtggggtggggggagcggggagggatagctttaggagatatacctaatgctaaatgacgagttaatgggtgcagcacaccagcatggcacatgtatacatatgtaactaacctgcacattgtgcacatgtaccctaaaacttataataataaaataaaatttaaaaaattaatatagagagtagagtcattggggaaagaggaggaaagagtagggatattcaactattttccataatgtctcaataattaggatcatgtagaattctatttcacagtggtaaagtgaaggccttaaaatgtatggtcatgaagttgccatgaaattccaaaaatttattttcccagattccataaatttcatgttgcatttgagattgtcagaatgacccattgggaacttgagctcactcaacaggagagtccattttgatgtgttaattgcattgtctccctttgtggggctctcagcacatctaagggcctgttgctgttattgggagctgaggatcccatggaatgccagtctccttcctgcctgtaacttgggcaatggtagaccaatcaggcttcactagagagccctggacctacttttcttagtgggtcctgcctcggagagctgtcactcagaccatgcagacttcagtggagaacctgcaggacttcaggactctgagaggcagaaaacgttcagattctcttcccctaaagacctggctagcagccaggcaaaattttgaagcttgtccagcaaataaactgcatgcttctcagtccattaactccttggcttctaaatcccatacgtaatatttcccagtttcattcttcatgtacagagtcctcttctcctacctattttgtaatccattgtctctctcaggtgttgatagtagttgccctcaaaggattagttacaactttaaaccccttgtgagatagtggtgagtgagcccttatcaataatctacccatttttcttctctccatccttctctgttttttttatgctaatcgctacttctgttcatacatttttttgatccttagggttgtcatttggttggragatttgaattatagactttgcatgcctgatgccaatgaggtgaaaagtcttattaataagaaagaccttcagagactcttgaaattcgrccaggtaagtaaagtttcattttataggaactttcctagatgggagatgagattgttagagttatgggaggtatatcttactctagggagtgatggaaacgtcttactgtcttgtgaaaacagtgtgactagtgatgcattgactacatacaagatttgtagtacttttattaagtgcttggatgggaggagggaagataacattagtgataaaaagtaaatacaacatttattcaaaacgtctttatcattaagagatttcagagatttgtctaaatgagttggtgaatgggtggggttaattggrgaacacttcctggaggaagtgggccttcagctatgttgatgtggtttggcagatggaacagtgaaaactgttctatgattacttggcaagctgaggaacagcttggaggtaaaagagggaggccctgtgaggggaactgggaagtacagaaaagaagtttgtctgggatcaacagcataggctatgggctcatgggaactagatgataagttgaagctagctggtatttaaaacctgcaggaaaagcattgagttggtaacatttacataaaacctgatattcaagaacctggtttccatatatttgaagcagtaaatttgcctcagaacctggcatgtgacttgaatttttacttcaacatatggatactggctgctaaaagtgaatgcttcttattgagggaggaaaatgttttgacttcattcgaataatctttaaatcgttatgagagccttttcaaccttcagacgtagccaacattcaggtgatttgcagcagaatggtttttgtagtgagccattcttgtctatgtctaccttcacgttgtggttggctgacaaatttctttgctttttctttattctgcctccaaaaggggtacatttaggataaattctgagtcttatataactctggtaaaatatttcagtgaggatctttcaaaacaatttgaaactattcgctgaatttggtttgcagaattattcattcaacatttgtgtgctttttctttaaattaaaattgtgctgggtggtttctgcccagctccaaggaacttacaattattcagatttcatttttccattttaccctctgccactattagcaataaaagaatagtgatgtgctaataacaagcatcctatctgagggtgagtttagatgctgtgggaatgctgagatttaattcataaggtatagaaatttcatttatgtactctcactacagttgtaaaggttgtggaactagatactttgaaataggaacagtggcttatcaacctgattatctcttatattaagatagtgttatcctgcttatttgatgcttctttctatctgtagctaaatattcagcgcacacagaaaaaagcttttgttgacttcaatgaaggggaaatcaagttcatccccacttataagtatgactctaaaacagaccggtgggattccaggtaaagtaataagaaccttctcacagagaaggttaaggcttgatcttatttctgaccctccatattggtaaggggctaggaattttttaggccatgccataagcagatatataaacctaatggctcagtgcctcagtgctattatagaacaataagagtgtttcatttatctatactcaaaggtgagcctatcttagggaagttattacttatatgtcaagattgttgaagttttatgggctacctacagtgccttatttctctcacctcagcaaacttgcttaaatttttgccttcctgattttgcctttgtttcttacctattacctgttctggctattttttttcccaaactacccagctatttaattcaggataccagaaggcaaaaacgaagccatgaagggttcttctagcaccagtagctctcaatccttaaaagactttagaatcccttagagaacttcaaaaaatactgatgcttggacctaatatctgccacagctggagaacactgagaaccactgtttagtagacccttttttttttttttttttttttgagacggagtctcgctctgtcgcccaggccggactgcggactgcagtggcgcaatctcggcgcactgcaagctccgcttcccgggttcacgccattctcctgcctcagcctcccgagtagctgggactacaggcgcccgccaccacgcccggctaattttttgtattttttttagtagagacggggtttcaccttgttagccaggatggtctcgatctcctgacctcatgatccacccgcctcggcctcccaaagtgctgggattacaggcgtgagccaccgcgcccrgccagtagacccttttgatttcctaatcatcctagtaaagtgcccccagtaagttcttagtgagtatttgtcctctacctactatctctttcttttcttttcctttccttttttctttttcttttcttctttttctttctgtttctcctagctggctgagcacagaaacttgaaagagaaagaatccccacgcatgttcagctgttttgaactctgagagtactggcatgggtggggagtcgatattcctatgctcctaggtaactggccagcaaatgaagtgacactgttagatcttgtacactttgccatgtttgtttcactcacctgactttagagtcagctgcagagctactgatgagaaatatctgtgtcaccttctggatcagggtacaaggtgttgcttcttttaatagaatgatgaataggttctttttccctacccttggtattctgtggactgacatttgctcagacttgcatggtttgattttatttcgtctctattagaagaagctagacttgtccataaatgtctggtttaaaggagaaatcaatactgttattcctctccaaarattaagcccagtctaggaagagaagattggagttttagacttgattagttatctatctgttgtgaagtgttgttgatgctcatagagtaaaggaaaaggaagtgttcaaaatataatccaaatcttctgaggatattttaagaacgtgctattttctcctgtggtgacattgttgaagatgtactcccaatcttaacagaaccattcattcattagataactattcgttgagcacctactttgcaccagataccatgctaggttctaggagttcagtggcaaacaagcaaatacagtcccttcacagagcttgcaaaatagtagggaggatgacaggggttgttagggaaggagaagtacacggttctttgggagcatgtaacaagagagcctaaccctgatctaaaccagtgtggtaggtattatgttcttgtgtgatatgttctctttataactcgtttctttacttacagtgggaaatgccgggttccagcctggtgtgaccgaattctttggagaggaacaaatgwtaatcagcttaattrtcggagtcacatggaactgaaaaccagcgaccacaagcctgttagcgccctcttccatattggggtaaacacttgtttgtacattcatttatttgtgtgttaagtatcaattactagaggattatttagactcagaacagatcagtaattcagcaagccataaatgttccataaccaaataaccatttgcagcattgagaggttagtgcccccaaccctcccaaatgctgtccgtatagctcttaatgctccaggccttttagtgacacagatgtttctcatgctacatagtggttaggtggtaacttgagcttcctaaagtaggtatgcataatgaagagttaaaagctaagttttatcagatagtaaagaagggaaacaccaggagggagattctgggtggaagggtagagacagcaggagcaaaggcacagactgatcagaatacagccaactctgtatattgtcttaagggatatagtgtcatccctacacttattttttcttttttttttttttttttttttgagacggagtcttgccctatcctccgggctggagtgcagtggtgtgatcttggctcactgcaacctcctcttcccgggttcaagcgatgcccctgcctcagcctcccagagtgctgggattacaggcgtgagccaccgtgcccagcgaatttttttttaactctgttctatcctgggctgcattaatggccagttatttaattttctgtctgtattgtgagtaaagtttttttcccattgtatttttaaactgtgtgttattggtatgtaggtcatatcttgtaatcatgctgatttaatttgttacagccagtacatttaggttatttcttgtggatttttcagatctacagccctataatctgtcagaatgtatatagtgcagtgcttagtagaatggactttgtagtagacttctgggatttgcatccgagttcaaccactttctaactgtgtaaccatggacaatttatgtaacatatttatgcctcagtttcctcctctattaagcgtgggtaatattggtacatactcatgaagattaatgagttcggacatgtgaagagcataatgggataggtttctttcctctgtgtgtgtgttgatttagggggcttctgagatagatatcaccaacctgttttatcctgctcctgttttaaggaagaaagactttggggcttttcatttaagatcagaattatttattggtcttagaatagattttaaattttatcaagacaatcatgactttacttttgtccattttgaaattttaaaataataatcattaataatagtaactgttcctcagatagcagctagtggctgtgtggcagggactatgtgaggcaatttgcacacatctcatttactcctcacaacaacgctttgagttaaatacagttgatccttcaacaacatgggtttgaactacacagatccacttatatccagatattttcaaccaaatgcagatggaaaatacagtattcacaggatgtgaaacccacgtataaggagggccaactgtgggacttgagtatgcgtgaatttgattatacacaggccatgccagaatcaatcccccacagatctcaagggacaactgtatttcccatttaacagatgagcagatggagaacagcaagttgaaataacttatttaagagcattcaactaggaggagagctgagattccaatcttaagttggcttaactcccaactctgtgctctttctactaccccacaatacctctataattctatagaacttgatgaaatatacctttagataacttcttttagcccatctaatttctagtttgtacttgcaggctgcccctttttcttcatttgaattctcttaatccattttgagagggtatctttcctcaaacactaacctctttggttagatcaggtatgcctggcttttttgtttacatttcttttcaaaaccttcagatttttttgtttgtttttgttttttgttttttggtttttttttttttttttttgagacagagtctcgctctgtcacccaggttggagtgcagtggcacgatcttggctcactgcaagctccgcctcctgggttcacgccattctcttgcctcagcctcccgcccagctaattttttgtatttttagtagagacggggtttcaccatgttagccaggatgatctcgatctcctgaccttgtggtccacccgcctcagcctcccaaagtgctgagattacaggcatgagccaccgctcgcagccaaccttgggatgtttttaatactccatacacattaatgcagagcttctagtgggatatttacattttttttcaggcttcctgtgtatttatgtatatctttaataaagatatgccttttgagtttttaatgatttttaaattatacagcaatgacaagtgcttttaaaaaaattaaaaggaaatttaagcagaattgacagataaggcagaagttcttcaatccctgttctgtctcctactcccaactttgcctaaacccccattccccagccaggccactacccttaggagtttatatctttctagaccagtgctgtccaatagagctttctgtgatgatggaaatgtcctgtatctgtgctgtccagtccagtggcttctagcagcagggggctattgagtacttgaagtgtggctagtgcaactgagaactgaacttctaatttaatttaatttaaagtaatttaaattcaaattccctatgtggctagtcactattgtactggacagtgcagttctagacctttgtatatgcttttttgttcactcatagacaaaatactgatttgtgtgtgtctctatatcataaacggtcttatatgtatgtgttggtctgcaacttgatttttttttttaactcagcagtgtgtcttggagaacctcccatcttattacataaagacctagctcattgtactttttttcaaattcctaattttgtcagtaatttcctttactaaaatggatgtgtcaggttgtgaaattctttggggttccccccctcctcattatctttgatttgccattaagtgctgtgatcatgataacccgctgagaaaaagtttgattttattgagtaatcaccccatgttttggattcttgggcatgctatgattagaggctttaaaaaccacactatattttcaccaccattggcaccaatgactgttaacaaaggagccaagtgcaccgtggccaattaatttcagaagactttctgtgggctggctgagatagagctaggatagggttccaaccctgcacttggtactgtgatctgttgcattggttctcagacttcagtggatgtaagaattgcttagagagcttkaaaaaaagtgtggatgcatgtgtcctcacccctagaggctgtgattagtagacccaggcagctgtgcttttaagacatactcaagttgattctgtcacatatctagtatattggaaagagtcttaaactagtccagatgtcacctttggtattcactgtagcagtgagcaagtttgttgattgttttgtatcttaatgttctcaactatcggaacaaaaatattccttgctttggtagccttccaggttgtgaaaataaaaagacatgtgcaaaatacttttggaaattaaaagttgcaaagttttgtaaaagtataaaattcatcttaaactaatgctatactatggaccctggtgatggtaaagtgattgtttgatcctcggttctctaagagttacagttcaaatatgtgaaaaacttccccagtctgagatacttgactcagctttgatgttcttattttcaacattttaaaaaatttttatttcacttcaagttgtgggatacaagtgcagaacgtataggcttgttacataggtatgtgtgccatgttggtttgctgcacctatcaacccatcatctaggttttaagccccacgtgcattagctatttaaccttaatgctctccttcccctcgccccactaccccgagtggcctggtgtgtgttgttcccctccctgtgtccatgtgttctcattcttcaactcccacctataagtgagaatatgcggtgcttggttttctgttcctgtgttagtttgctaaggatgatggcttccagcttcatccatgtccctgcaaaggacatgactttttttattttttgaggtggagtcttgctctgttgcccaggctggagtgcagtggtgcaatcttggctcacttcaacctccgcctcccgggctcaagggattctcctgcctcagcctcccaagtgactgggattacaggcacccaccaccatgcctggctaattttttttttgtacttttagtagagacagagtttcaccgtgttggctggggtggtttcgaactcctgacctctagtgatcctcctgcctcggcctcccgcagtgctaggattacaggtgtgagccactgtgcccagcctgatctcattcctttttatggctgtatagtattccatggtgtatatttaccacattttctttatcaagtcttattattaatgggcatttgggttggttccatgtctttgctattgtaagtagtgctgcagtaaacatatgtgtgcatgtgtctttatagtagaatgatttatattcttttgggtatatacccagtaatgggattgctgggtcaaatggtatttctggttctagatccttgaggaatcgccacactgtcttgcacaatggttgaactaatttacactcctaccaacagtgtaaaagcgttcctacttctccacagcctcaccagcatctgtttccacatctttttagaacctttgctgcatgtatcaattttttttgacatgaatttttgtgaaatttcctagtctaaaaaagaaaccgatatctcaagttaaaatctgttagttatgttaattttggcattggtttgtatgaagttttaatatttaaaaaaacacagctatatcaggaagctgaaagtgctgtgtcaggtggaaaatttttttatcagtggagatgtgtttatacgttgtcatggttttactctagtctaggacattttgtttcagccattttctaaaatggctgtaggttccatttattaatatatctctgctattatgtaatctgagcagtgatattatacttcttggtattgtacatagaatctaatagagttaaaagctttttaataatatttgctgccacctcaccaagttatgattgttagaaacagtaattgctgtgttttgacactgtcattttgtacagtgcaagcaatcatttttaccacaattatcacattttttccactaccaaataacttaacaatgaagcaagaaaatattcttcccaaatatttattattaccaagcttcttaacgtaggggtttaacttttacaggacgttagccaattaatcttacctttaccttaaagcgtgtgcttctataatgctttgttcaatttatgtttgctttagtgaccttaaaaattgttagagactcttggaggtataaaagttgagaacacataaaactaaagcaaggatctgttttctttcaggtgcaagytgtggatgaagcaagatatagagagtgtttgaggatgttgtttgcaccacagtttattttaaatagttactgtaatgaccagttttaaattgttagataatctccaagggagatgagctagaaggatataagactgaaaagaggatacattttctttcaggtgaaggttgtggatgaacgaaggtaccggaaagtctttgaagatagtgtacgcatcatggacagaatggaaaatgacttccttccttccttagaactcagcaggagggaggtgagcaaaaatacatgatctccctgtctactgctcactgtggttagcacagaagaaactgctacttagaaaaggctacatagcaacgtggttaagcccatgtcgctggagtcagactgcctccattccagttgtagcacggctgtttagtagatgtatgacctcaggcaagtatcttacccgctcagagccgcagtttcctttcctggattaaggggtagttgtaaggattacatgagttaatacatgcaaagctctcagaacagcacccggcacatagtaagccctccgctgttagatgctcttatttaatatttcagagttgctagttaatttatatctcagaaaccaggacttggtcacaggatgaatactctgaaccaaggttgggttaccctcttaggatcctaggaatgatcagagtagcctggagaagtagcaagagccacctaactccttctctgctggtgtgagtataataatacatgcaagtggatgttgtgaagttggttcagttggtgaatgtctatggcatttgcacacctgcttaacaattaccttactcctcatatcctctatggaataatccaactgacttacttcccctactagtgatgcatgtttgtgtctgtctgttattccccagtttgtgtttkaaaatgtgaagtttcggcaactacaaaaggagaagttccagatcagcaacaatggacaggttccctgccatttttctttcatccctaaacttaatgacagccagtastgcaagccatggcttcgggctgaaccttttgagggctacttggagccaagtgagttttccctttaccattgtctctgctggtgatgtcatgactcccatccccttggtttaactttctgttttctaaccacatgtctcttacctttactgtcatattggtgatacctctggtgtgtgtcctgtctcttccccctcattgcttaatgatttttttagaggacacttttctgttggttcttatactcttttttgctttcccactggaggttttcctattaccatgtatcatctcttacatttcagatgagacagtggacatttctcttgatgtgtatgtcagcaaagactctgtaaccatcctgaactcgggagaagataagattgaagatattctcgtccttcacctggatygaggcaaagattacttcttgactatcagtggaaattacctcccaagttgttttggcacatccttagaggctctgtgccgtatgaaaagaccaatccgagaagttcctgttaccaaactcatagacttggtaagaactgtcccaagacataaacctcttttacatttaattttcacaatacttaagtgacgtcctcattatctttgtgctttctgtcttcttttggccacgggggatgtcaaatgataaagaagaatgttactttagcactgttttgattagattaagcctaaggggaaagaggggggactaatctgcagttggctcttgttgtgagtacaatacataatactaagctcaccaaataagattaaagactcccctctcaaagatataatgcttgtttgttaagctcttcatactctcaagtcacttttgtataaattagcatgtacgtgaggtatgctaagtggggcaggcagaattatcctcatttgagcatatgagaaaactgaggcacagagacattgacgtgcccagagtcaaataccatcagttagtaacaaatctagcacccagatttcctggctcccagtttagtattcctcactaataccacattatatctaatcagagtaaaactttgctatttatggaagcatagaactatcctggaaccctggagtacctgaatcagaatccctgggggtgcttattacaggtaccctcacttctggcaatggaatcagaatctcaggatatggagcctacagatctgcattttatccgcattccagatgcttataatgtacattgaaatttgatacttacttaatgtgatgtgcttaagaaagaaaaggaggttgattttcccacctctccctcaagccaagctataatattaatgtttttatgaaggaagtacttactatcttcagtaacataagttgatttagtaataaagttcattgtattaagaaatttccttctaaatgaaaatattgttggattgtatgcagaatctctttgggctacaaaagtatattcttggtttttttaccaaagaaaattaggtgaggtgacagcatacgttatccttaccattagtattcacatggatcctttaggcctagccagagcgagtgattgtatctagcagggaggtctagaccagcaggcaggctgctggcttgtctgagtccgatctgttctgttgccatggaattgttttagctgtgactcagatagcagattaaaacactgagtccagccccggcattctttcttggaattatacttatttccccagagccctcatgactgagtatattacctctgtttgagagagaaccattttcttcagaaattcatatcctaccgttctgctgtttttcatgataattgtttttctcctaacattatatttctgtcttttagattttagtatttcaccttttagaatacattttggatgatgaagttgtttttcttatttctcctaccccctttccttcatctcagacattatttcccagctttctttgtttcagctttttattatgaaaaatgtcaaatgtgcagaaaaatggaaagaacagtacaacacacccccacatgccttctgtacatatatacacacagatgttttttgctgtgtcatgtaaaatttagtggtaatatgtcacttcaccactgaacacttcagcctgcatctcttaacaaaaagggcacacttaagcacaataccattwttwtgtataagaaaactaacagtaatccatagtatcatttaacattcggtccatattcagatttcttcagttgtcccaagaatttctgttatacctttttttaaaccaaaatccaatctgggttcatatagtatttggtgaggtctctgaagtctctattggagtagtacagttcctactttctttagtgacattgacttttttaagagtccagtacaaatgtccagtcaagggtcaaccatttcctaaatttttctggttgtttccttcttgttttttttttttttaaacttatcccatttatactctctccttccaccttcatgtaaacaggaacctacccttatttttagtcagagtcagtgaagatattagaatatctttgccattaatatgaaaaactgcaaagccattaatatgaaaaactttgcagtttttcatattctgggattggccagaagaggctcaaccctcataaagtttttattttatgtaaagtatactatcaggtaattttaccatgtttgcccatgaacagaaaggaaccaaaatcattagaggaatgaatggctctttgggaagcctttttccttctttttgtgcacaagtgattgagggttaaaataatagaaccctgatcatttttaattacagaatttctgagtttttattaaattgtatgtgtgtggwcatcatttttcttttaaagcttttattttgtaggatttagggttcttttcacagtctgttgcatttcagtgttattaaattcctgtatctcattgatgaggaaattatctatacaggttgattatccattatccaaaatgcttgggaccaaaagtgtttcagatttcaatctttttcagattttcaaatatatgcattatatacttaccagttcagcttccctaatctggaaatcggaaatctgaaatgcttcaatgagcatttcctttgatcatcatgacagtactcaaaaagtttcgagttttggagcattttggatttctggattgggaatactcaacctgcattactgtggagcagtaaacaagaaatctaaaaacaattagtatcccatctttaataccttctcactctgttgtgacttgattttgaccttctgaaatgattcctcaggtatagtattcatgttttttttccccaagacccaatatcgtatttcaaatctcatgagatgatgctgttaataatggtacctgccctctgttgtattatttgctctaaaattttggtaaagccagaaacgagttcaatgtatgtgttgtctctctatgtactgttttagaaagatccttatgcactgttttagaaagatccttatgccacaccatcttcccaccaaatgcagaatgaaataactgacataattatttttcatccttccagcccttttcataatagtgactttgccactcctagaatagttgagattagcacaagtgggaaacggatgaaaatctaccatttgtaatcatctttattgtttttcagaattaagatagatttttctgttatattaactagaatattaagtagcaaataatcctcaatattgattcattacacactggatacaaagtattatggagtttatgtgagttcccataatttagtggtgatgaaagtatatttgcacataaaatatggctaaactttaagtcatggttaatagggagtttggttaaagataatctgaacattaaccacctttactggctaatgtctggtgtgcttggtaagtcagtattttggaaagtcgtttaaagtgactgctatgaaggttgtagtttgtattaacaataggttcctttcctatgttgtttattcaagcccttatatgctataaaagcttattgactgaccagctaatccctatagaaatcagaatcagcctgttttcattttaatgaatatttgatacatgtaacattaacatgactgagaaataagtttagcacataagaataaagtgaactaggaaggtgatttggagttagttatagaagtattttcagtcaagtccaagtacttaagaaacacttattaatatagtgggtgagcaggctcttccaggcttagaggacatcttgaataaagggtagaaggtgaaagtgaaaagaccatgtatgaaaaactgtaagatttccctgggacaagtgaagatcaaggataagaatgtatgaagctggttagggagaatggggcaggtggtagagagtcttgaagtcaatagataagtttatgcatgagccagagggtatctagaaccatcagaagggtttgctgattagtatgaggttgcaaattgatatagttggaagaacattctggtgttacttgtagaatggactaattgaaaggagacaagacttgaacttgccagatgtggctaagttgtaaatacggagatgaaaaaagttgagggatgggtagagaaactatatttgcttggggacatatctgttgggagaacaatatcaaaagtttgaaataacaggaataacttgttaatttgtccgtagtgtttttttcactatgtttttactttgtcttactaatctaaccatccatttcttactctgttaagtatatggcttgtatttcttctctatttcatatgaactaatcctttttagaacttcattttccattcagttttcggctatttatttatttatttttgagatggagtcttaccctgtcggccaggctgtagtgcagtggcacaatcttggctcactgcaacctccatctcccagttcaagtgactctcctgcctcagcctcccgagtaactgggactacaggcgcgcgccaccacgcctggctaatttttgcctttttagtagagatggggttttactgtgttggccaggctggtcttgaacacctgacctcaggtgatccacccgcctcagcttcccaaggtgctgggattacaggcgtgagccaccgtgcccggctatgctttttatttttaaatttgcatcttccacctctaattgactcttttattttagctgcatttaccacggggaacagtcttctgagggtgaatgttggggtaaagaatgatttgcattgcatttgctatgtgccagtgttgtcccactggggaaatcctgaactaagttctctttttaaatgtaatccatatatagccttttgcagagaatgggcatctctgctctttaaaattggttgaactaagtgattcatagtagaaaccttaggattattataggagtaagctgtttactaataaaggttaagtgatgcttctgttttcaaaattgagaccaaggttgaattcaatgtaatttctatgttgtttctttgtgcctgtacctagagaagtaaatctcttgtccctccatcagtatttaatcaaagtccttttgattcttctttcagaattttctcttgtattcattcatttgtaagtgtatgtatataccttttattatatatatatatcctttaatatatatacttagaaattatatatatatatatacacacacckgtgtgtgtgtgtgtgtgtgtgtgtgtataaaattttccattattaagatgtttaccttcttctgcttgacctacctcggtagcctttgaatgatccctttgtctttctctctctctctctctctctctctctctctctctctctctstctctgtctctgcccttcattttttcctattcagggctgtcagattgatctttctgtactactgctttggggcctatcacttccttgcttaaaggtagtcagtggcttccccatgcctgctgaatacaatccaaatgccttaatctgtcatgcaaggtcctcctaagtctgacttcaacataccttttcagatttatttcacactatttttcttggcattctccatgccccccacaaacagatgactaacttcttcctaatatcaatttgtgatttactgtctctgtgccttttgtttatttctgcctcttccacttgtaatattctctccccatctctaccctttaaaattctgtgagtcttttaaagggctagcaatgatttattgagaactcgtattcatgaattataacaataccagtctgtaaactctggaactcctcaccccaactcagttgcaaatcagagtcagggacaaaccaggtctttctcctttatcctcatttctcattgccttcccctgcaaaggcattttagcacaatgccttgtactggaggatggctgctgcttaaagaaaacttttttgagagcctggttcgacaggttagtatacaaaatctctgtctagttttattcatatcatgtattagatattcatgggaggaaaaatataaaatgtgtcagatagattcttcatttgataacaagtcctaaattttacaagaggttctagtctaaaattgtatcagatgttgggcactcaaaatcaacttgacattaaaaggtatcgtaattatagtactataaatatgtaccttataaagactattctaattgctttatttcatgtgatatttaagagtctagataaacccacaaaagcatgtttaattcgtgaagtatctaccaatattaaaacgcctaatccccatggataacagtagtgtgggaggaatgcattcagtattaccactaggaatgccagggagcacatacttttcctcctccctctccactcccagctcctgtgcatctcagacagtaagattgggatttctccttttacctagcagaactaagacatgtaatttagacttgagtgcttagtggtccatagtcagattcgaaacaatccaggttgggagtcactggggaggtatgaggaactttgaggaacccagaccttctgctggcatactgccccatcacccattggttttaggctgcttcaaggtaaatattactatccctattttagagatgaagaaactgaggctctatgaagtttggtaacttgtgtgagggctatacaaaattgccaagaggtggaacgaagatttgtacccaagcctgtccaacaccagtgcctatactctttccattaaccacgctgtcttttaagtggggtttctcactgtccttagcctgttatggagaatacattctcacagttttcctctacctctctgtccaggaagcagtcacattgtcctttttgaattgtctaacggaacatagtgataatgactgtggagttggtcagacctgggatccaatcctgattcagccacttactacctaatagtgagtgtggccttgggcaaataatttaagctttcagagcctcagtttcttcatctgtaaaatgggaataatatctactttgcacatgtgtacagattaaatgactgtatataagcactttgcacagttcctgatacatgacagatgctccctaagtggtggtggtagttatcatggctgctattattattggattgtaataacagcataaaagataggaagattaaaaagataccttcttacctatcccctgcctctctttttttctcttatgcccaataggaaaataaaaatgggataatgatggatcttctgatccgcaaaggtctgaaatgaaattcatttatagttcagaaggaccttcaaatctgggcactctgggggcctttgaggaggggattgggtacgaggagatagaaaggaatctgggatgctgcttaggagactggctggggtgagaagaatgaaaatggaaagtagagtggtttaccatctccttccagatggccrctgttgggcccacagccatattctttcattgaggtatatacctcaatgcacctgcctccaagcagcagacaggaagagacatcaggggcatttggctgggtcagttggcagatgccaaagggcactgaagtctagaactgcacatatttcttgagtgatattctcaaactgcacaaaaatttaaaatgtatagtaaactttgtgtatgaaaaatgtatttcattttcaacaatcataatttatttgaagaattcaaagctgtttaaagcatgtatatctggtaaratagtgagttctaatactgatctgtttctaattctgtaaattaattctaatcatattctgtctgtcaatgactttcttttcctgctccgctctcaggaagaagacagcttcctagaaaaggtaatgcaatccattggtggttatgagagtttccctgtgcttgattaacacttaactgtggtccctggaatttgtccctaggctttcccatatcagagacctctgacttggtgagactcccctaaagtcctgccrgctgtccttaagtgtgtttgaagtacaggaaagatatttactgtagcagtcaagtcattgagactcagtacataaaaacagtaggactcaaggttctagatttgtatttttgaaatgagaagtaactacagagccgtcttgatgtatctgaatgctcatgaattggaggggggtaccagttagctgtcctccatttccaatgacaataaaacctgaagaagtagctttctgttgcattaaaaatgatttgaggttaatgatcatagcaattaatttcagaaaaaaatacacagatatgatcaagaaatagagcatagaatagaaccgtggacctgaacaagatcataaaagatcatctggttcaggcctctaccttcagacagggtattttctccattctaatagatgagacaaccaaggcccagaaaggttgaaaaacttgctgaagtcayrcacygtacccacttggtggaatttaatgccttttgatgatggggatggtatactgttttcatgctttagttattaacactaagtaaggttacagagtgtgggcttatcaggcgctgaatgtgtcttgttgaaagaagacaaagtaccttggttttcctttgaaaattagagttcaggataatttgtgaaattattcaagtattttctgtgtatgatctttctctagactttggagacacaactgtggcattccatattatcatacaggaatttgaaaatgaatagtggatggtgtatataatctactgacactttattaacctttttaaaccaccaaggtttgagacagctgtgcttcctagctcttccctgttaagagcagtccatgttctgtctttttatcttaggcagtgccttgtgttgccttaatgccttagtacaggaaaagctccagttggatgtcagactttttaaaaagtacatgaatcagtgctgcataatttctatatggcaagtttggaggcatctgctaaagaatcagtacacgtgctgcatttggtccagagagttagcagagtgcatgatggacagtgttttgtctcaaataccatgtggatgcttggatttgatatttgtaactggaaagaagtaaatggatgagccattgatagacattctggcaactattaggaacatgaatatcaagtgatagaatcccagggaaagaaaggaagcaaactgaatgtggggaaaaaaaagaaagattttaaatggtaaccaactgtcacactcccttctctttcttattcccttrgaaaggcacagcagcttttaaaggtcatcagtgcttgttaaagaacacaatgttaagaagagacctcagctcggctgtagtgtatgtggtctctgtcaaagtagtgacatgctcctttttttttcttttaaagctacgtgactgggggttgtggatggaattcacaagttgcacaatgttaggcaagaatttcttagttaaacatacagaatatatatgacctcaagctagaggcgggggagggaggaggatgcaaaaaaattggtcatggttctctccactgggatttttatgaagggtgccttcaggtgcctttactatttcaaacattttttcatgtaatttatatttgattacatgaacctaagataactgagtttatttcctagccatttccaattcacatatagtgattgatttgatttatgtcacttctgggtttttctcttacaaaattctttcagaagaatataacagatagtagaaagatagatgaaaggagtaaaagcccctagaaatcttggctgagctattcctagaaactgtaacttctggactcagaccttaaacttttcgtggtatttctgcctcttggttagctgtattcagtttactatttttggaccttaaggcttacgagttttagcaccttaagattagaacttccatcaagcctgaagtatttacatatgtgggtctaatgttgtggagagttgtctttaattcctgaaaactaaagaagctaatttaaatcaacattgaaaacaaacaacagtatctgtggtaagacctgaaggaagagtaagttagaaataaacaaaaacctaagtgtagaccttgatctctcaaactactgtattgacaattgtaatttaatagtccccaagtcaccagtgctgtatggactccactgtgactgtatcaccggagcactggttctcagtgtcacctttgaaaggatttaaacacaaggcatccacgtaataaacatcataaacgcaaatgaaatgcagaacaattaagtgaagcatttaggaaaggacatcctttaactatgggactcgctatcaagtgccttctgaccaggagtgtccccagtgagaagaaatggaaaatcttaagagatgaagatcacattttacctgcatgaccagaatttgaaggactttaagttatacaccaaagtctttattctgagacccctttgattctcatacttttccatctattaggagaaatcccttctgcaaatggttcctttggatgaaggtgccagtgagagaccccttcaggttcccaaggagatctggcttctagtagatcacctattcaaatacgcctgtcaccaggtaagtgagagtagaccttccctacaactttggaaggtgtgtaactactataggaaatcacaacacctcacgtcagcatagcgcttttaactttcccragctacctgcacacagtggcactgtcagatcgactgggtgggtggaagtgtcctagtcacagatgtcacagctgaagcatgtaaaggtaagttatttactaagacaaaggcctaagtgtagtygtggcagagccaggaccaaattaagagcacctgtctcctggctaccctctcattttccctggacagctgcacacctgagtctataatgcctactttggctatgagtcatgtaggcattagagattgtaaaatccaaagcagattttaaacccattttttaacttggtcctaatttttcttttaaatcctaactaaaatgccaccccacctcattcgcccccaaaagagatatttcttgggactaaattgaaaggtaatgttctcttacctactgacgaataatgtaacttgaaagcaaggtttagtatgagcatgcgatttcctccttccccagcgttcagtagtactagcatttgaatgtggttattctgtttggactctgccttctgctgcttgtcaagaggctacaagtaggccaggcatggtggctcatgcctgtaatcccagcattttgggaggcagagacgggcgcattgcttgagctcaggagtttgagaccagcctgggcaacacggtgaaaccccatctctataaaaaaaaattttaaaggaggctagaattagaacacctggtttcctgctctagccatctagtcccctgccttattaggtacaggctaaaacctttgaaaagatcattttcctatttgaaataacatttcacatggattagagaaatgctaaaggaaaaatgtgttattttcacacctccatttgtaattattaacacacataccacccttcccttttgcttcctgctgctcttctgatccttgggtaatcatcataacctcaggagtgattatcttgcctgtcccttcattctgacttctttggtaggaggacctgttcyagacccctggaatgcaggaagagctccagcagatcattgattgtctggataccagcattcctgagacaatccgtatcctttgcgaccaaagcttaagaagctggatgagtacttgrtcaaactcttcttcgcacctatatttgatttttgtggttctatatttattttctttgtaatatcttttattataagataaccactgactatccacttgtttctcatttcctttcaggaacttttgacctctttccatatccagctcttactaaaaggaagcaaggggtagataacaatgacttaaaagcatgggacatagaagccacagcactggtactattctccttcaggtgatcagtcactcctgccaccacacgtactgttgacagggcagggagaaggatgggaaacatgggcacctggtttataggactgctccagtgtcaactgtcactctgcaggctatattcccctgaccctgaagctgggccaaagctgccaagagtctttgaccaattctgtaacaactcacctgcagggcacttgaatcaataaaatatcaaacccccattaggatcaatgtgccctgaataagaggagggaaacagtccctgtaggagcttgaggaaaggagctcgtcggggctctgtgtggcctttctcctggagctcctttcccttgacttaagttgattcagctggcagcaaccactctgtggctgaagcactgctcattttcttggaasccctgccagagccagtcatctgttasgagctgtatcagygatgtcttgactctgcttatgatccccggatctgccgayaggtgggttctactgacctggggatgtgtttgacgcagattgccccatagagaagtcgtcagttttacagagccagataggcagccagctgtctggtaggatgggtctgcatctgttattaatggcaggacaccaacattgagagttgctacccttaaattttaggttgtgttgtttcctacgatatttgccacctttttcccrttggcctatttctgtttacagaaaacatagtggggtggatccctctactctggggtaaattggtgaagctgattgtacgtggaattctggctgacattaccaggaaggatgggtgacacttgggagcctttcttctttttctcttcttggtgtgtgtttttaatcctgaaatgattttaatgcacagtagctgacagtacctgtgaattggactagtgagtattgagaggagtccccatccatgctaagtgacattgtaaagaaaaccattcaaacaaaaaagaacagaaaaccattcagcttggtaggtgccgtggctacatgcctacggaaatgggaaaagaacagatgaacactgacctattgtgaggcagggtgtgcgtatgaatgtgtgatgaccacgtggcctggtcattgagtggacagggaccaaacagcacggccactcttactttgaagttataatttggaaggtattgtgttggccatgaggagataatagaagttagacagatgaaatgggtcctgcaagggttggattatagactactattacagcagctgtaagttcctcttactttcatcttccacctgtttttctcactgcctgcccctatttttaaaaacaggtgatctcccagcttccgagatgccatagaaatgttttccgttacttgatggcattccttygakaactcttaaaattctctgaatacaatagcgtcaatgccaacatgatcggtaagagtgcttcatgcaacacggggcgtttgttgagaatactcttagtgcattgtatccagtatataccttactgcatatgcaggcacatggcagtcaatagtccttgtccccaggccctccagccctgaggttttgcttaggttatgtctgacagaagtttccgcttgtctttctctcrtcttgtagctactctcttcactagtcttctcctgaggcctccacccaaccttatggcaagacagactccaagtgaccgccagcgtgctattcagttccttctgggctttctgcttgggagcgaagaagactaaggcttttactgttctctgatattctagaagcagacgatctcgggctccaagtatttcagaatgatttaaaaagtcatgccacaggaagggtctattgcagaatttcaagttctgtttatagtaaaaaggaagagcgtttcctaatccctcctttaccatatcctacacagaaaaatacttttagacttatattgccaagccaaagttaccatattttggtgtttttgtgttttctctttataaggcaaaaagatctgtatttacactccttcacctarggatgtgtttgttgccctcctacccaattgtcatgattgtccttagtaccctaggcctagattctgagatcttcccattctaggcctacaagcactacttkctgtagctgagacttgtctagagtcctttgttttgcacttttgacccaccccttcctggatcactcctttgcactccactcccctcgttctgtcactttgaacgaagtctgagtgaggctagtgactccttgggtgtcctcaacagtgaattcactgtctgcgtgcagttattacatgcatttgtgcatttctactacaatggcatctttatgtctctgtaacattggccttttcatggctccacactgggtggaaccatattctcttagatcacatttagtagcataactgtagggactattagagatggcatctcatcgatgagagagaatcacaatcagaatggaagcactttgagtatctgaagagtgagagcattcatgtttgacaggtcctgcttcccactatccttttcctgttattattcaaattttacacaaggactaatcctgggtgtctctgagacccatctcctgcctagacatccacctccagagcaacactggccccacagtaaaagaggaagtcttgtacctcaggcaggcccatctagagctattgctccttcccacagcaaaggtattgtggatgacccttagaatccattctctggtcttctgaaataccaagggcagatgtcacctccttcctcagcaggactgactctgggctctacaaccagctccttcacataaagggtttagagactccccttggctcccagtcaccatatccagtgttgtgtaaagagactggccaacaggaccaaccaagcaccttacctctcccatacaagatgaccctctgagcttttcatttattcaagctctgtggtacagcctttttttaaaataaattaatctatattggttgacaaacaagccaccaaccactgactgcaaaactgcctgatgcagttgggttcctcctggttttcttttgttacaaccacccttgcctgtttacattaattgcaaggagcataacgtacaggctgtatgtacaatcctgggcattgactctgtgacatttctagcatatccaaggcaccaccagtgatttctcctgtttcttggtgggggtgggggggaaggtacgtattctgcaatatggctaaaccctttcctgattgagagttaaagcaataggagtcaagttactggtgccacagatctggaggtatgataggtcaggggctaggtgttgaacttagttaatggaagactgagagcagaacaggtttgtcatctccgcaaggccagaaagtgatcacaaaaagaggcagatgatagayactggggtagggtcataccacagggaaatacctttcctgggcttgttttctagcatatcactgacctgggatctttgggtgatcaagggtgtggttagtggaggctctgtgctgcacgtatgcagtatcctatctctttctacatcagatcaaaacactaagttggtgtactgcctcgaccttttttcagctcatcctggaacatatacagagttgagagttttagacaatctctaggtagaggagacaagatgtagacccagacagaagaaatctgcttccctaccatggctattccagcaccccaacctgtaattgccaagtcctctaaggtactaatttgtagctgctctgaagtaaggatttcggattcagctggtagggaaagactctgcacctgctgtcttagggaagaaatggttcaaatccatgtggtgacattgcattagtctccctttcactgttttcttattctgtaattgtttgttatatttcccaaaaacgtcttgatcactaagcaaagctgctagtggsattctatatttcgtgtcatcttttttattataatttattgcaaatttttttctgaataaatatatgttgtgtgaaaaagcaaagtgtgattttggtgaggaagcactcagaagggagggcttatgtgtcactgggttccattcgacttgactgcagtccccatcagctgtgcctgcactgtcatcacctgtcttacagggaaataccatttataagaattcttagtatattcaccctcagagatgagaagaaaccatgcgttttcagaggctaataaaggtgtcctgtactttcagaggccagccaagtacccttattttaaccctaaggattcaggcaacaaaacaactcaattagaggaaaggatgttgattcttaatgcatgtaaatgtcacactaggtcagatctgtgatccctccggccccagaaacaaaccctaagatacacatctggggagaacccagctacccctgctcagtagtctcagtagtttagacgcgcttccccaaagagcttgttttcacataatcctattttgcagcttttgaaaaccagttttgaacttttatgacttcttggggtgatcaagtccataaatttagtacttttttgttgttctaatctgaactgcctaacacgttgggaggaaaccgctgatttgagcatggtgccaatgcttccctgccaatctccattatgaatttgtggattctgattccattccctttgagactgaagaagcctcagctggaggtttcttctctactaaggccctcttccaattccctccaactgtgagcttgaccctgatgaatgtgctgactcagtgttgtcataaacaactttcaaagccccacccaaagccttggcaggagaaggtgtttctttctgagagtgattttccccccagcagatggagactgacaccagaagtttttacatagtagcaggcaatgagaatagcaggcaggtggtcagtctttccagaggttagagaggaaatggcatccccagctgtgaggcttctgttataggagacccattaggacctttctgattgcagggcaagttgaagaactggctcttggtgtagcctcataatgtaaaagccacacattgcaacagtggcatcactaaatgttagggagagaaccttagtggtgacctaatccaatctcattgtttggatagggaaagtctcagaggggacaatgactgacctaaggttacttaggttagtgacactgcatggcatagtggcatttgttttttcaagcagttctactctgcttgcccattaattcctttggtggcatcttatcaatttccgtggctgtaaatgtctgtaatacccctgattccaaatgttacgtctccacctcatagctctcttccgagttcctgcccagtatatccaattagttagctggcatctcccctcagatgtctcacaggcatgtcaagcttcacacgtccaaagtggaattcttttacttctggttcttttactaccacccaacctagatcctctacctgtcttccctcagctcagagaatgtcaacaccatctgcccagttgctggggctaagcatctaggagttagccttgatttctctctttcctaccgaccgaccacctcagcaacgtgccccacgcgtctgcttttcatcacccccactgccaattttattggtcaaggccaccaccatcatcccttcttagggtgtcgtcatggcctcctgcctagtcttctttctctctctctctcttttttttcttttttgagacagggtcttactctgttgcctcagctggagtgcagtggcatgatcggctcactgctgcagcctgacttcccaggttcaagcgatgctcccacctcagcctccgagtagctgggactgtaggcgcacattaccaagcctggctaattaaaaaaaaaataattgtagaggtagggtccccctgtgttgcccaggctggtctcaaactcctgggctcaagcagtcctcccaccttggcttcacaaagtgctgggattagaggcatgagcccaccatgccctgcctggtctttttaactttgctgccctccaatccattttccacgcagcaggcagcatgacttaattacatcagtctcatccctcccctgttgataacccttcagcgacatttacaatgaaacctaagcttcgccatggcccaccaggccctgcatcaatgggtctcaaatcttcatgtgcagaagaatcacctggatacattgttaaaaagcagattcctaggctccagaaattctgagtcagttggtctgagaggaggcacaggagtctgcattctaaatcaggacccaagagcattttgatgcaggaccacactttgagaataccaccctaaaggatctgacctctgcctaccataacccttcctcacccctgccaatatactctgatactgtccttttactcctcccagtgagctgaactctttccagcctcagggcctttgcatgtgctgtttacccagaaaactccttcctctctctttcttgcctcagtccccatctttgctgtgcctaaccctaagtcacccgccctgtcccattgactctctgccctcattcctgggcttcctggtatagcatgctggctgactgcccctgggcttgccatgtactcttccacaatcttcctcttcctctcttgatgacctcacgtacctgctccacggggcctggggaggcaggaagctatagtggttcttcacataggctctaatgaccagactgcctgagttcaaatcccagctctgccacttctagatgtgtgaccctgatcaaaagttaattgacgtctctgtgccttggtttccatgtcttttctctccagctttattgggtataattgagaagacaaattgtacgtattgaaggtgtttccacatcttaaaagtaatgatagcacctttcctcatagtatcatcatgaggatgagatcagatactacatttccaggccttggaacagtgcctggtgcctaagtgctaaataaatggcagctagtgcaattattcccaagccctccatgggcctccaggcccagaacccgcttctgctgcccttcagctcccagcaagtgactgtaccctttactttgtgaaaatgtcaaaacagccttgccccctgcacatcaaaatgtcttcagcttaacctcatccctccccctttccatctgtctgagaataagcggtcctcctcgccaagaccagctcttccacctgcacttttgagcccttctcctccaccctctctggacttttccccatcaaccatcactcctcctcctacatctcagtatgggttattcacttgacaagtatttgttgagtggctcctgtgcgccctgtgctgttcaaggtgctggggatctagaattaaaccagacaaggttgccgctctcatggtgccttcatcaagagggcagggcagggatgagggtggacagacatgcaaattaacagtacccaaggtcactacagatcctgacaagtactgtggagagtatcaaacggggatgcactcgagggtacagcggggggccttggtcaggaaaagtttatttgaggaggtgatgttttagctgagacttaaacctcaggaagccaagacaccgtatcttgatttgaatacccccaaaaagagccacacgtgcaagatctggcaaaagacattctgagcaaaggaaaagagaaatgcaaaggccctaaggcagcaaaacagctggctgtgctcaggggacagccaggcagaactctgtgagggacaggacttgctggacaactgatgagcaggaacgtgatcacagagggcctgaggaaccccaggcaggagcttgcatttcattcgacaccacagggagccatggctggctttactcagggaagtgacgtgatgtgacttctgtatgctccttctcctaaccttaggaagagtaataactaataactctagctgtcatttatcccagatactaatacatttaacatcacttttgcctttacgatagcctgataaagtactacattatcccactttttttttttttttttaagacggagtctagctctgtcacccaggctggagtgcggtagcataatctcggctcactgcaacctccacctcccgtgttcaagctattctcctgcctcagcctcccgagtagctgggattacaggcacgtgccaccacgcctggctaagttttgtatttttagtagtgacagggtttcaccatcttggccaggctggtctgaaactcctgacctcgtgatccacccgccttggcctcccaaagtgctgggattacaggtgtgagccaccatgcccggccattagcccacttttataggtgagaaaactgaggctcagagagacagcataacttggtactcggctagtggctgaccagaaaatgacttctgagcccaaaatttgtgctcttaaacacagccattgtctccccagctggagtgggcatgaaggtgagggtgcttcttaaaacccctatcccttctagctacatcccaagatttcatgtcagctagattgcctgctggcaggtcaaattcaacttctctttgaccttgaccagcttctcctggcatcctcctctctcccatcacccaggcctaagcttttggttatttttggcccctgccccactttctaatcagttaccaattgcaattcaacaaatatttatccagcacctgccaagtgcaggctaccatgcagggttctgaaggaaaccaaaatgggtgagactggtcgttacaagacaagacagacataatatttttgtttgttttgttttatttgacacggagtctcactctgttgcccaggctggagtgcagtggcgcgatcttggctcactgcaacctgcacctcctgtgttcaagcgattctcctgtctcagcctccctagtagctgggactacaggcgcgtgccaccacacccagctaatttatttgtatttttatttttagtagagacgggctttcaccatgttggccaggctggtcttgaactcctgatctcaggtgatcagcctgccttggcctcccaaagtgttgggattacaggtgtgagccactgcacctggccaatatttttttaaaagaaggaaaaaaaggaaagatggatgaaagaagggcaggaaggaagaaaagagggaggaagatgagaaaaagggaagaaagcaagaaagaagaaggagggaggaaggaaggacctccacggaaaaggggccgagatcagctcaaccgcagtctctagctggcccctcctttccactgcgcatttcccagcccctccaactcctgccccacccccccaccaataaaattcaaacactcattgcctcatgtaaggagttaaatcgcctgatgtatttaactcctttctaactaatttctcagttgccagtttctctccctgtacacatcactgcactgttttgatgtctctcccctattccagacccctgctggccccccagcccacttgccacagaagttccaatccttctgcctggcatgcaaagctctccttagtctcttccacccacctctcaggctgagtctcccactcgaccttctcatgccgttcccttccctaaactcatgcgcactctctgctttggctcggtggtctgtaccagccacctggaaccctccagcccccacctctccacctgcccaaaccccatcaaacccaaatgtcacctcttccaggaagccttttcccacaacccctgcccaccacccccctcccccgaactcctagaacctgccctctgtaccactattttaacacactacataccaaaggatgttgttgcccctttgggactggaagcttcaggagagtgggaaccaagctgggcgtattttagtttccccacaatgccttgcagagagtaagtgttcaatgatgtttggctaataaataaagattgtctgttaaagcataagtgtatccaataagtgttcctgaaatgtatatacatttaattattca

SEQ ID NO: 94888 - DNA, 14544 bp, Homo sapiens
gggaggcctgaggaaacttaacaaacatggcagaagggaaagcaaacacatccttcttcacatggcggtaggagagagaaatgagagccaaccgaaaggggaagcaccttatgaaatcatgggatctcatgagaacttactatcacgagaatagcatgaggaaaactgcccccatgattcaattacctctcaccaggtccctctcacgacatgtggggattatgggaactacagttcagatgagatttgggtgggggcacagccaaaccatattagaggtcatctagcacttcgtttccaattcaggaatcccttttacaaaatccttggcaaatkcttatctagcctgtttactatttttttgtttgtttattttcttttttagaatgttattttccacaatgggttgaaatcagcctctttataatattgaccattagtcctaattctatgctttgaaataaaacagagaggagttgaactatccaccactctccaggttataaaagcaacaaatctagaaatcattcctaattcttttttttcccactccttctgtacttctctcactgatttagtcctatcagttctaaatctaaatatacatttcatccatctacctctttccatttttactgccactagatggtagtccaagccaccatcatctttgacctagacaaatctaaacaatctctaaacaatctcttctaaacaattagaagagattgtttagaaaaattcttttctaaacaatctgtgtttcaattctcatctttctaaaatccactttctataccagtggtctccaaattggaatacatacaccaaagggtaatgcaagatgattcattgggatgcaaaaagaaataaaagaaattctacttacatttatttttatctcatcccctttaatttctattctgtgtaagttttataatgttcctaaattaatacagtatgcatgagtgtaatttataaataagtaaacgtgcatatattaggggaacatgcttaaatattgaatactatttttcagatgtgttctaattaacataatgggattattactcgtcagaatttgcacactgcctttatataaagattaattacaactatagctctcatttgtctcttgctttttattaaatttgtagtctgatatattcaacttctcagatccatttatgtagtcttatatagctgacgtgtaaaaaatggatttttaaataaaatatcttttatttatcccagttagattttcttacatcttgttttaaattttgagacaatcttatagaaaaattgcaagtgcagcacaaatagcatttttcctgaattaagagttaagagccaacgtgatgtcccatccctcaatactttagtatttcctaccaacaagagtattctcctgtgttagccacaaaaccatcaaaatcaggaagcattgttattccattttaatcctgagatcccatttaagttttgccagttctctaaatacgttctttattgaaactattccaattcaaaaccacatattgcatttaattgtcatgtctccttagtctctttcttttaattccttccagtttttattttaggatctaggggtttacgtgcagttttgttacatggataaattgcatgtcacggaggtttggtgtacagatatatcgtcacccaggtagtgagcatactacccgatgggtagtttttcaagcctcacccttctcccaccctccatcctgaagtgggtcctggtgtcttttgttcccttctttgtgttcatgtgcaatcaaagtttagcactcacttataagtgagaacatgtggtatttggttttctgtttctgtgttaattcacttaggataatggcctccagctgcatccatattactgcaaaggacatgattttgttcttttttatggctgtatagtattctgtgggttatacgtaccacattttctttatccaatctcctatttatggggattcaggttgattccaggtcttgctgttttgaatagtgctgtgaggacttattttctgagttgtttttctttcttttctttactttttttcaactaaatgaaacactcctacctgccccacagacttgtggaggccagagaagagcatatcagtaaaaaaaaattttcatattatattcactttcattaaagtgtaagattatcattcttacccccaactaaagtgctaacatacagttgatttttcattattttattgaaaaagaataataggcagccctttcaaatgctaaatcattcctaagctatttacctaatgctgatcctttttaaaaaaagacaatgaagctaacttggcaggacttttcttttttgactttgtcccatttgttatttttgaaatgcttacaaatcacatactttaaaaaaatcattctcaaatttttctgggatcaacataagtctcactatccggtttacaaatccttcctttctttaattggaaagttagaacagatttgcttctcaagacttctggcatctttcctctgctccttgatttttcaaaaagtactgatattaactcttaaaaagaacagagagtgcatcggactttgccactgttgatcaagaatcagtttcacagcctggtggggcaggttgagggtgctggggagaaaaccacaacttctctacatctctattttctcatctataaaatgaacttaaaaaatctgacttctcactgttgtagtgaaacttaaatgcaataatgcatataaaaaatctataaattaaaaagcgttatgcaaatgttagtgacaccgattcagcattctgggataattgttaaagctatcgctgaataaatataccttccttactagactctgctcccttccaatgcttgcagcaacccaatatgtattattatccctattttacagatgaggaaactgaggatcagagggattaagtacttcccaaaaccatacaggtaataagcagtggagcaaattcaaacccaggtctgtttgattccaaaacctacacccttaacccacaccccaaattacctgaaacttcctcctattccaccatagaggctggaactcatttaagcaggagctgctctgaaaacctcttccctgttataagctgctgtcaaacttttatgttgctggttttaaattttccaatttaaaaaccattctactttctagagaagacagaaacctcatagttgattagtagctctgaactcctatttatctgcagacgctacaccattttctgaaagcagcaaacctcttcttactttcttttttttctgcaaacgtttcctgtattttatgtttttcataagcctcttttcctgttgcctttgccaataggtgagaaaatgaccaatttagttagaaatgcttaactggtttaccatttgatgaattaaatagacattccagtcaaatcaattttctgcataattattttgttaataactgatccccataaatgattcccaaaatttttacccgtatagatgtttccctttttaatttcctccaagtttccattaatgggtatttactaatttgtcatgtacttgtgtgaaaaattagttttttttctaattttagaaaacattcacttgtgtctaaaacattcacttgttaaaaaattagttttttcacaattgaatgttttggatcctggactggaccaaaaattatcaagaacaggccaggtgcagtggcagtactttgggaggccagggcaggtgaatcacctgaggtcagaagttcgaaatcagcctggccaacacagtgaaacgctatctctactaaaaatacaaaaattagccaggcttggtggtatgcacctgtaattccagctactcgggtggctgaggcaggagaatcatttgaacccgggaggcagaggttgcagtgggccaagatcgtgccactgcactccagcctgggtgatagagcgagactgtctaaaaaaaaaaaaaaaaaaaaaaaaaaaattatcaagaacagtaacaatgccttctaaacttggtacttatgatgtttatgaaaagattatttctttaggaatttcttacattttaaattaccacaatcatgactattgcaaaactgacagctaaatgatcagtggagtaaacagggtccatgtgaatgctgctttgcaatagtgatcagatatcactccagtgcccacagaaacatcagtgtgtgttgcaattaacacttcaaaaagctcatagtttcatcatgctatcattaaaacattaaaaataaattgaactattcatccaaggcatgtataacatgttggcctttcaggttaaatcactgtgaaaaaagctgcttttgacctcaatattttttttgtaatttgattccaagattatttacatatttaccctaacaattttctgcaaccttaattttattttcatttttatattttctattttaaaagtgtttttcaacttataactatagaatcaatttttaaatgtcagaaactaactagtatatcatggcccaagtgaaaattcatacacttgtgtaataataaccccttcttggaaaacgcccttggcaaataccactggaaagagaaaaatgcaagaaattaacattcacttaatttttaacatattagaaagtgttacgctttcttagactattttataagtgattatagttttttaaaaagagacactgtgggaaacatacataaggacttattacctgttgtttttggaaaaatataatttgtagcactagctaaaacatttattctaaaatgatttttaaacaataatgtattgtgtagtcagaaacctctatctcgtttcagagatctaacagattagagattaagggccaggcactgtggctcacgcctgcaatcccagcactttgggaggccgaggtgggcggatcacgaggtcaggagatcgagaccatcctggctgctacggtgaaaccccgtctctaatttaaaaaaatacaaaaaaattatctgggcgtggtggcaggcgcctgtagtcccagctactccggagggtgaggcaggagaatggcgtgaacccgggaggcggagcttgcagtgagcctagatcacaccactgcgctccagcctgggcgacagagcgagactccgtctcaaaaaaaagaatgaactattgttttacaatcaaacaggagatttttctctaatttttccttgtatttttagtacttaagagttagcttgaaataaatgatctcaggaaactaggagctaatgatttagaaggcccctaggttaaaagcaataataataataacactctgattccgtatatcttttctcttaccttgtcagttttcagtcatgtaattaagagattaaagtgtattcaaattaattccactataagaactttaaaagactttgaggctgggcacagtggcttcgcacctgtaatcgcagcactttgggaggccaaggcaggtagatcacttgaggtcaggagttcgagactagcctggccaacatggtgaaaccctgtctctactaaaaatacaaaaaaaaaaaatctgggcatgttggtgcatgcctgtaatcccagctactggggaggctgaggcaggagaatcgcttgaacctgggaggtgaaagttgcagtgagccgagatcacgccactgcactccaccctgggtgacgactaagactccgtctcaaaaagactttcgagataagtggcaaaattttactttcaaaagtactggcttagattgaaatgcatttcaaatgttaaataggaagttaattagagtaagacttgtgagtaaagagcagaaatgctgaattggtcatttatcattggggtcaattataatttaacaatgatgcccatagaaacattttttaatttagggatcattgttttatgtagaatatctcttttatcctgccctgataacaatttttttctcttttcttaaggtatcagatacacaccggacttcaacattctatcataagacctacccaacccaactgtttacctctggacaatgccaccctacctcagaaactgaaggaggttggatattcaacgcatatggtcggaaaatggcacttgggtttttacagaaaagaatgcatgcccaccagaagaggatttgataccttttttggttcccttttgggaagtggggattactatacacactacaaatgtgacagtcctgggatgtgtggctatgacttgtatgaaaacgacaatgctgcctgggactatgacaatggcatatactccacacagatgtacactcagagagtacagcaaatcttagcttcccataaccccacaaagcctatatttttatatattgcctatcaagctgttcattcaccactgcaagctcctggcaggtatttcgaacactaccgatccattatcaacataaacaggaggagatatgctgccatgctttcctgcttagatgaagcaatcaacaacgtgacattggctctaaagacttatggtttctataacaacagcattatcatttactcttcagataatggtggccagcctacggcaggagggagtaactggcctctcagaggtagcaaaggaacatattgggaaggagggatccgggctgtaggctttgtgcatagcccacttctgaaaaacaagggaacagtgtgtaaggaacttgtgcacatcactgactggtaccccactctcatttcactggctgaaggacagattgatgaggacattcaactagatggctatgatatctgggagaccataagtgagggtcttcgctcaccccgagtagatattttgcataacattgaccccatatacaccaaggcaaaaaatggctcctgggcagcaggctatgggatctggaacactgcaatccagtcagccatcagagtgcagcactggaaattgcttacaggaaatcctggctacagcgactgggtcccccctcagtctttcagcaacctgggaccgaaccggtggcacaatgaacggatcaccttgtcaactggcaaragtgtatggcttttcaacatcacagccgacccatatgagagggtggacctatctaacaggtatccakgaatcgtgaagaagctcctacgraggctctcacagttcaacaaaactgcagtgccggtcaggtatccccccaaagaccccagaagtaaccctaggctcaatggaggggtctggggaccatggtataaagaggaaaccaagaaaaagaagccaagsaaaaatcaggctgagaaaaagcaaaagaaaagcaaaaaaaagaagaagaaacagcagaaagcagtctcaggttcaacttgccattcaggtgttacttgtggataagcacaaatatttcctgtttggttaaactttaatcagttcttatctttcatctgtttcctaggtaaaccagcaaatttggctcgataatatcgctggcctaagcgtcaggcttgttttcatgctgtgccactccagagacttctgccacctggccgccacactgaaaactgtcctgctcagtgccaaggtgctactcttgcaagccacacttagagagagtggagatgtttatttctctygctcctttagaaaacgtggtgagtcctgagttccactgctgtgcttcagtcaactgaccaaacactgctttgaattataggaggagaacaataacctaccatccgcaagcatgctaatttgatggaagttacagggtagcvtgatkaaaactacctttgataaattacagtcaaagattgtgtcacctcaaaggccttgaagaatatattttcttggtgaatttttgtatgtctgtcatatgacacttgggttttttaattaattctattttatatatataaatatatgtttcttttcctgtgaaaagctgtttttctcacatgtgaacagcttgcacctcattttaccatgcgtgagggaatggcaaataagaatgtttgagcacactgcccacaatgaatgtaactattttctaaacactttactagaagaacatttcagtataaaaaacctaatttatttttacagaaaaatattttgttgtttttataaaaagttatgcaaatgacttttatttttatttcctgcataccattagaakaattttatttcatttcttcaaattaycaagcactgtaatactataaattaatgtaatactgtgtgaattcagactataaaaaacatcattcagaaaactttataatcgtcattgttcaaycaagattttgaatgtaataagatgaatatattccttacaaattacttggaaattcaatgtttgtgcagagttgagacaactttattgtttctatcataaactatttatgtatcttaattattaaaatgatttactttatggcactagaaaatttactgtggcttttctgatctaacttctagctaaaattgtatcattggtcctaaaaaataaaaatctttactaataggcaattgaaggaatggtttgctaacaaccacagtaatataatatgattttacagatagatgcttccccttggctatgacatggagaaagattttcccataataataactaacatttatattaggttggtgcaaaactagttgcggtttttcccattaaaagtaataaacttactcttatacaaagtggacactgtggggagatacagagaaatggaagatacggatcctgcctggagtaggtaaccttgcttggaaaccccacatgcaaacgtcatgaggagaattaaaggagtattatcagtaatgaagtttatcatgggtcatcaatgagcatagattggtgtggatcctgtagaccctggtgttttctttgaagtgccctctcctaatgcagaggccttgaagcttacagtatacacttgaaaagtcacagatagctagaattatgatctttgaagttataactgtgatctgaaaatgtgtgtggtggtatgacagcataccattaaatacatttacatcacagctcaaaggactgtgatataatccatttatatcacaactcaaaggactgtgatataatccatttatatcacagctcacagtttctgaaaatgtataaaagaatctataatctagtactgaaattactaaattgggtaagatgatttaaatgattttaattttaacattttatttctagaatatatggctccattttattttatagtgtaaagttgtatttcctaaagtttgtgttttgtcgacagtatcttttaaatgagtcttaaaaataaaggcatattgttcatgtttttctttcctggtggcacataaatgacatgtcttaaaatagatggcatcttatacattttttaaaaatagacatctttacactaaaaaagagttctgaagaaagtaagtttgggagatgctgggttaaagaacgtcaaaggagtcactttaatgcaggtttttcttttagaggagtttttaaaatcttagcttgtattgtaaccctgacagaaggaaaatgttatacagtatttcataatttcaccacaaaactgctgtctgtggcacaatgcacaggactagggttctgaggaactatactgttattggaaacatagtgtaaacatagaatcttctagaagttcctagaaagacaaaaaaagaagcaaagaggcaaattaggattaagaaataccagtaggcatcacctattgtgatgtaattctaagttctctataaatgattataatcttctcagtgaaaataatttagcccacagtgttctactggaaatggcttcatggatgttgatcactgttttagagagtacctgccacctgcccagggctctaggcaggatgtggtttacaagaagtctcagtgtcttgccctcaagaaattaaaatataatctaatagtcatgtataagtcatgaacaaaaatgtttctaaaaatgctggcagcaaatcactagggatttcaagatggccaggaaggaaaacactgtgtccttgagttttgtgccctaatcactgatgccatgttaatatgaggaattcattctcaggtgttagcttcctaaactgtgatcttcaggatgtgtttctaggctgcctgtggttctttcaagtgtcaactgcacctcttttaaacctctgatctttcttagggtttcaaaagaaactctcattagctttgtcagaaaataatttttgaatatggctatgtttctgggttgagaagggatataaaaacttttttccaatgaaaacatcaacaacaaaaatatttgtagtacctttcagccagtgaaaacatctacctcaggtctgtcaaatttcaagtctaactaaagaacttgtttcatctgtttttacatactctttcttccttttttctaaaaattgaatggatatttttgttttcttgaccagaccccttttaaaattcttaagaacagaggaacactgtcattgatagttgaataataatacttttttgtactttcaacattcctctctgagaatataccatattagtgcgcacatctccacattatttctttatattactgaacagtattttattatatagatatgccattttttatcttttcacatgttaatggacacttgggttgtttccaggtttaagctaatataactaaaaatgctatgtattttcaagtgcaggtgtttcttgattttctaaggcacatgaattttgcatcaggatcagcttcctaagcattttattcataccatttttgaacatacaaattgtgaatttgtcagtagcagaatgtgtgatgttggcaggaaaaaatttccttgccaaaagcagcacaattcctttatggtatgtttataggtgaattgtgtcttcatccaacgggttcatagtattcattcagtcattccacgaatacatgctgcatcatactctctcaggcaatgttgtaggatcttgggatatatcagtgtatgaaatgaataaaaattcttacccttgggcaggttatcttctagctgagtgaagcagacaataaataataaacataactaattataacattatataccatataaagtagtgtgaaaaaagagtagatcaggataaggggaggattcattctacaccaagtttatccatccattctttcagcatttgttaagtgccccatgtaatggtgtgcatcgggatgtgatggcaagtgacatcacgcagagtccttgccttcgggtagtgcccctacgttcaggtggtagtgcacattctcctagaagatgcagccatgaacccaataatcaaacacttcatctccaccatcctcccaccatggctaccccactttcctgcttgatctttctcattagcatttaatatccttcagagtttactcacaagttttccttgttgtctgtttcattcccctagaatataaacttcttaagaaaagtgacttctgtaagttctgtttacatatgcatggccagtatataaaatgatgtcctacttatacttagcactcaatgtttttgagtgaatacataagataatcacatttatccatatgttcaaccacatttgcctaagtttccactttctatttctggtacagggatttcattgttgaaaaatagaactaatcatccttaatacctttaacagcaatgatatgaaatgcagaaatttctaacactataaaaaactaactctaataatgtatagttatagcaatagggtgttacagcaaaagtgaagcaaaaattacacaaaattgagagcaaattttatctatcatctttattacataacaggatagaacatgattattctaacactacttggaatattacagaatacattagcttaaatgagttcccagaaaaaaatagatgagggcttaaattgtcaataattttttgtaccaaatcgtgaaaggaaaaaaatataattagaaaataaacctctatgtcttcatagaattataaagccaaatggaatatacctcacatccttgggtattttattacaaacctctccaatttggcagagcagaaattctgctttttttaaagatatatttttcttaaatattttactagtcatagcatctctatgaatttggttgattcattggttaaacatggtattatttaaagcacagaacctgaatgttgcctttggggattaggtagatttgaacatatttatctaactttcaatttcatatctatgatttgaaattgccttatgctcaaatttactgcaatcctataacattttttgtcagatgttttatgcaatattagataaaatcaatcccaataattgaaaaacaaacaagagaataacaaagtcttattagaaatgtctacctatccactctttgtagaaattcttcagccaataataagtagagagcatcttattgcataatcaaagaaaagtaaaatttgtctttcagtataaaaatccaaaaataatttttaatatcacttcggtcatattaatctctctagaaacaatgctttaagaattaaagttcttcaactttgagaattatgaacagggaataccttcagctgaccttctaaatcctaaacaactgtgagaaaaaaacctttttataaccaaggtttttaaaaaactcttgatttaatttagtatctgaaaccatattttttatgtcatcatcaccagaatttccagaggctccctttgggcaaatagcgttaagtcctcagtcagagagttattctgtctctaaggcaaatcccactaaaacttatctacctgtagctattcttaattaaataatcccctctagcacctatgaggtggggaattacaagcataaaaagtcctgcaattatttctactatacagtcagacatagtagcaacaaaacaatacagtgttttactaaacttttttttttcttttctccaagttttgctctaagtcctaacagttaacatagtgtttcagagattaaggtcacagctgctgaggaatcctgctctctcccagctgggagcaatggcggctgcagtggcagtggagactaggtgaggcgggtgggtggagaggtttttccccttacctttttatttggccccttgcctctgcacttctcagcatcctggctgtgctagggctatttctttctgaactcatatgcaaccataactccgcattttactttcttggcacccttctccatacctgagtcccacatccgtttctgccacagaactaggcacattatacctatgtccaacagaggtatcagcaagtgaattcctcccttccaaagttctcccagcataaagcgatgagtgtgtagagctatctccgccttctggtgacgagaaggcctgagccccaccccaaaaccttcaaggagctgagatcagagtggaagtgagcgatcaggaagccaacaaagtgttcccacctgagtaagtgagataccgctcccttcaggtccaagcagtttagcagctgcaatgtccaaagcctgcttcagctttgggaactaattaatcctttctctttctgcctagaagagagagcagtgaacaaggtaacttatattcgggacctatccaaagcctaccttgggtatttcttctcttacatagaagagtgaacaacatagatttctcacattctctacccacccacccaaagcccaacgttgagaattcctagatcctttcttctcttgctaggaagagagggcaaaaactaaaagccttctctaaaacctaaaaccatttgggctgcttgttccaacctacccccagccttcgaccaacaattgtcttccaatcttttccatctgtctgctgttggctcttgctgtcttctttcaaatcctgttagcctgggggccatcctctatgtctttcagaaaaccacgtttcaaacaggatctcatgcttgtcagtaaacttggtaagtttttatgatctgtatttattccttgttatcctgaatgcaagcatgaagtttctggaactcagagtcatcattgttcattacagcaataactgcagcagtgtcgcacaggtgatgcaaggagagccacatgtttaggactacatgtacaggggtcgcatcataggagaggaaacctaaaattatgaatctggaaatatatatatataaaatgtcctccctctcctcccttcctaagaaacatttgctccctggtcttttacaatcctttggactgtaaatgaatgttctgaagaaaagagaggggaaagtaccccaaaatgcaagctgttggctctgacagaagttttattactctttaagaacagataattccctatctaacaccctttaacatccaagcttgtcctttaacccaggtgccagtaacatttgtcagaaagtcctaactatgcagaaacatgagaatattcactttctgacatagatcagtggttgcagatggaagttggagca

SEQ ID NO: 94889 - DNA, 16558 bp, Homo sapiens
tcagtggaggtctggctctcactgacccattgttagcaagaggaacagggaggtggccaggggtggaggggcagctgtggtcactggcccagtgggagggagctaggccactaggaaccggtcaggccagcaccatccctatccccatgctagccaccacacccaccagctctgccacctccctgctgcatcgaccacttagctctggcagtataggcagcagggcaggctggggcatgctgatacccgcctctgtctgggaagtcgaaggaacagaacctgttcaggctggcggctcatttggatgaacagggagtgtgtgaccttgggcgttgagtcctctccactccctgggcctcagtctccccaacatcaaagaagaaggcaaatcacctttttttttttttttgagatagggtctcgctctgtaacccaggctacaattgtgactcactacagcctcttgacctcccagctcaagtggtcctcccacctcagcctcctgagtagctgagactataggtatagcctcgcaccaccacacccagctaattttttttttttttttttttttttttttttttttgagacggagtcttgctctgtcgcccaggctggagttcagtggcgggatctcggctcactgcaagctccgcctcccgggttcacgccattctcccgcctcagcctcccaagtagctgggactacaggcgcccgccactacgcccggctaatttttgtattttagtagagacggggtttcaccattttagccgggatggtctcgatctcctgacctcatgatccgcccgcctcggcctcccaaagtgctgggattacaggcgtgagccaccgcgcccggccacccagctaattttttaaaaacattttgtacactttgggaggctaaggcgggaggatcacgaggtcaggagctcgagaccatcctggctaacacaggtgaaaccctgtctctactaaaaaatacaaaaaaattagctgggcgtggtggcgggcgcctgtagtcccagctactcgggaggctgaggcaggagaatggtgtgaaccagggaggcggagctttcagtgagccgagatcgcgccactgcactccagcctcggagacagagcgagactccgtcccaaaaaaaaaaaaaaaaaaaatttgtagagacaggggtctcactttgttgctcaggctggttttgaactcctgggctcaagcaatcctcccgcctcagcctcccaaagtgctgagattacaggcatgagccaccacacctggccaaatcagctattctgaaaggcccctttaatctctatgagccccagactttcaaactgtaaggaccttaggactgtaactaaagttctacagagcctaaacccctcagctaaagagcctattgttggaaagttctgagtccaagattctatctttggaacattctagaattctccaatttgtctaacccagaattctgagtctttctgtaccacattctacctaacccagggttgcactgctctggaagtctagatggatggtatagtgcagctggtaaaagcatgagtaagaagtcagacttcaaaaattcaaatctgagggccgggcatggtagcttctgcctgtaatccttgcactttgggaggccgaggggggaggatcacttgaggccaggagttcaagaccaacatggccaacacaatgagaccccatttcttaaaaaaaattaaaataaaatcatcaaatctggcagcaccaccgtccaaccctgaccacagtacctcagtctcgtaatccgtaaaatggggatgaaagttcacctcataggactactgtaagaatccacctggtcagaaggtgcaggaagaattcagagctctgagaattgaggcctcaggaagaagagactacaggaataaaaactcgggcatttagaatttcagagatacacaaacaatactttgttaactgttaaaatagataaatgagcaagtctgtgcagccctaatgccagctgtaagtgactctttttttttcttttggtagagatttagtctctctcgcgcctgtggttaggctggtctcgaactcctagcctcatgggatcctccccggctcgatctcccaaagtattgggattacaggcgtgagccacggcgccatgatccccaaatttccaagattctcagattccatactgacattctctggctctcaggaaatgccaaccctgggtgtggggctgtcgcggggacaggcggtggggacgtcggagccaccagggggcggtcacgcccggacccccgccaggagggcggactgcgcctgagctcaggcccggggaatgcgcagcgggcccgggcaggtgctgtacatcccggggcaagggagctgggccgggcggggtacaagggcggggcgcgggggtggcgcgggccgtgtgtctgttcccaggcctctgcccctgacctctgcctccgagtcctctcccatgtgctcccctctagctctagctccgagctctcccgcgggctctgggccagccgcaggtactctcccctgggctcctctctccgctccacccctggctctccttccctggcctcctctgcaccccagccaggttctttagggctaaggatcctgtggacttcctggaggagtcatcttcagtaggaaccgggtcagagagccagactgagctgggaacacccaggctggactcctacagccctgtcgggtcacactgaatctggagaggctccactgtctctgggactcggtttcctcctttgtggacgtctatggaatgggctagggcctttcttgctctaagcctctacttgggcttgttatttagcttctctgtgcctgtttcctcatgtggaccatgggaagaattaataccttcgcctcaaaggggtatgaggattgagtgacataatttataagccgtgattagaacaatgcagtgcgcgaaataaagttcacacatacaggattcataattaccagatgtccttggctgttcattataataacacagggtctggcaacagagtgaggggtccagactcaatgtaatttttttttcccctaaaagggccctttcaactctttctgagatcatacaagccctgagttttgacacccagggtctcaacttcctgagcccttgcctctcagagtcctaaatttcccctgtacattcctgagtctggccagtgatcaccctcagtcacttagggacgggagggctgggagagccctggaagattccagacagaagctggcaaaagcccagggtgtgggcaatatccactctccagcctccgtttctccactcgtaatgaggagtccttccctggggtcagcaaaccttattcaaagggagacctctcagtcacccaagattcctctagacaatgcgagctttcctacctacctacctaccagctctgagcttggtacacccagagccctgttttggcaaccacggttattatttttaatttcatttcaggttatcatcaaatgcccttcaagcccagacattgggaaacactcctctctcatcagatgctcgcctcccccattctgtttttaatcccccttcttaggacgcatgggggtggagagaacggggagatagacagagggaggtgcctggtcctgccctccccccgcctcaaggacagacagacacctccagaattagcctctgtccctcccttatctcccacaataccccaggtcagacagatgggcgtggaggtgacatttctcacctcagggtcagggcaaggagccctgaggcagaaggttagtcagaaaatctggcgggggcggatggaatcccgtcccccagagagctgcagaagaaggaggaggcagaatcctgaccctacaaactctactgcctgtgtgagctccaagcctcagtttaccccttcctctccgtgtaatggttaaatgcccggctatgcaaacctcccagaatccaatagccgctttccggaattctgccctgggttctagaactacctctgcaaacccagctgtttcccaccccataaggcaataggggagcccacctccgccagggggtgccctagggcggatgtcccttctctggttaggcaggtctgacgcccaggttaatgacatgttgggttcgctcagcggcacagaggaggttggagatctgcctcggtgttttctctcctaccccgcccccatccccgagccgaaaagtcgggggagagccgggacacagcctccggagggaccccgggtacctgtcctgctccacttcaggaacccaggctccactatccctgccccacccttaattctgctcagagacctagaagatcggtcgagacagcagcttgaggctggcagggtggtcacccattccaccttgagccccaccagtctgagcctctcatttctgaccaagactcggggattcgaacccctatactacccaaagactcggcttcctagagccccccagttcgagggactcaggaattccagctccaacgtctccccgggatgaaggggtagaatccctccattccaagaattcaggcatccgaacccgctttccttccctccagtaaaacaggcaacggagtttccttctaaggatccaggtgtcggcgcgccccaaattccgccctgggacctggcgtccgagtcccctcccaatcctcccagggacgcgggtgttgggctttttcagggcctctggtccccaggagggtgaaactcacggatccgggcagatcctggcacctgggggcttcctccagctcgggctccggcttggggagcggagaacggggcggggcaggagctgggaacaggttagacgacgtgacttgggctggagggaggcgggtcccggtggggagggggagccaaggtcgcctcgagcaccttgggacttgtagtcccggagggacaggacgtagcccaagacgatcccatttggattcacccagagtccatttcacagacaggaagggcgaggcccagaagccgagagcgaccaggccagggagatacagaagagccgagacgcctgcctcgctgtggctggagactgactcctgagcccttgccccaccccttcaggcgcactatcccctttcctgatcagtatcccccagggtctctgagcccgaatctccccgtcgataaaaagcgcgggttggatcttcaaaggatgtcccagcaagagttcaaaatcttagtttggactacaacccccagcagcctccgcgaccgccctcgggcgactctttgcctcgggtcctgtgggaattgtagtcctggagcccgcaggggctgcaccccggtgtctctctcgcccacgcgaaggaaaccgtctggagatcctggataggggaaacatttccccttccccttgaccctccctccgctctggaaagcctctcccacctggggagaaggggtgccccaattctggagtaggatcctaaatcttggcagagggggcgggaagtggcgctgacacactggccaggaatgcagtcgggtcaccctgtctagccaccgtctcgcggctccaaccgccgcccaacgcggggcggccccagtgggaagggaagtgggtgcgtcccccaaatctgtgtccacgtgccgctgtttacacgctccctggggcagggaggagtcgccgatcaggtcccttcctgaaagtcatcgaggtttcccacgcatgagactaaacccccgagggcatctacaagtcccatttgatccacaaacgctacaccgtgcccagcaccactccacgcgtgtggggctcctgggtccgaggctccgccctcgagaaccacaagctcctccccctatgtttcccgctcccccggagtccagaagccccgcccctggctggaacttcacgccctccggacggattgcccctatttctccattttcccgcttctcccagtcaagttctgaacttgtgaggcatctgggcctccccagaagacatttaacacagaaagcacagccctactaactagtattcttacctgtctcttcaagaatttcagaccaatcgaccgtcctgtctctttaaggcttaggaagagcagtgtggctgcccctttaaggaggcgttgcaacaaaccatattggacagacgatgggggcgacccatcgggacccgacgggcctctgactccagcaatacagcgaatcagcggctttcgggaatacatttttcggaaaaagacttcttcctcggttttctgctctgcacacgttgaaattttccccagtttttcctgcagatcgggagtcgagcaatgcctacccccgcgctcccgcaccagttgggcgctcccggatgatgccctacccctttggatccacgtggtctgcaacctggtgcgagcagcccgggctacarggttrcctgaggtgtgggtcccaggatggaggagccccaggccggcggtgagggtgcgggttgacggggtgcrkagggtgcgttggtggaaggagaaaggggcgtccgagagggttcgggcggaaaaggaggcgtacctgcaagcaggacttgcgaagagcgtgcattcccagtgggcgaacgggaattcgaacggagagagggttatcttgtggggggctacccgtggagagcaaggcgcccccaggggttggatcggtgaaattgaggtcgcccctggggaacaggtgggcagaaaggagaaaccaggttgaggggactggagtgctcacgaggttaagaccaatggaccgataggcgcgccctgcaagattggaccggcaaggaggtgtcagtcgaccccatttccccttctgctgcagatgctgctcggttctcttgtccccccaactttaccgcgaagcccccagcctcagagtcccctcgtttctccttggaggcgctgacgggtccagatacggagctgtggcttattcaggcccctgcagactttgccccagaatggtgagtggtcttgttgacggaaaagagggtcccggtccagaccccaagagcgggttcttgaatttgtcacaggaaagaattagaggtgagtcacagagcacagtgaaagaaacaagtttattggaaactactcctttacagagtagagtgtcctcagaaagcagggggagaaacccacrgccctttgttagtatttctacttataagaaactataaggaactatagttaaacttggagtgtgcagataagctcactaaaggtaggggctattggtgttatccacgaccattaatcctgcaacctaagcttgctcatttatgttatatttaagtaatgggggctgcattcttaggacatttggacattctgcaggcttggtggaacatgttctgtatggccataaatattctgtaattataattggtggtcagcctgggatgtggttattttcaggccataagcatgaaccttgtaagtgcctagctactcactttaagatggagtcactctagtcatgttttattaaaaaccagaggccagccaggcgcagtggctggtgcctgtaatcccatcctttgggaggccgaggcgagcagatcacttgaggtcaggagttcaagaccagcctggccaacatagtgaaattgtctctactaaaaatacaaaaattggctgggcgtggtggcaggtgcctgtaatcccagctacttgagaggctgaggcaggagaatcgcttgaacccaggaggtggacattgcagtgagccgagatcatgccactgcactccagcctaggcaacagagcaagactctctcaaaaaaaaacaaaaaaaaaawcaaaaaaccttccctctcctgttccacttaagcctctgccctccctgtttctctctgtagcttcaatgggcggcatgtgcctctctctggctcccagatcgtcaagggcaaattggcaggcaagcggcaccgctatcgagtcctcagcagctgtccccaagctggagaagcgaccctgctggccccctcaacggaggcaggaggtggactcacctgtgcctcagccccccagggcaccctaaggatccttgagggtccccagcaatccctgtcagggagccctctgcagcccatcccagcaagtcccccaccacagatccctcctggcctgaggcctcggttctgtgcctttgggggcaacccaccagtcacagggcctaggtcagccttggcccccaacctgctcacctcagggaagaagaaaaaggagatgcaggtgacagaggccccagtcactcaggaggcagtgaatgggcacggggccctggaggtggacatggctttggggtcgccagaaatggatgtgcggaagaagaagaagaaaaaaaatcagcagctgaaagaaccagaggcagcagggcctgtggggacagagcccacagtggagacactggagcctctgggagtgctgttcccgtccaccaccaagaagaggaagaagcccaaagggamagaaaccttcgagccagaagacaagacagtgaagcaggaacagattaacactgagcctctagaagacrcagtcctgtccccgaccaaaaagagaaagaggcaaaaggggacggaagggatggagccagaggagggggtgacagttgagtctcagccacaggtgaaggtggagccactggaggaagccatccctctgccccctacgaagaagaggaaaaaagaaaagggacagatggcaatgatggagccagggacggaggcgatggagccagtggagccggagatgaagcctctggagtccccaggggggaccatggcgcctcaacagccagaaggagcgragcctcaggcccaggcagctctggcagctcccaaaaagaagacgaagaaagaaaaacagcaaratgccacagtggagccagagacagaggtggtggggcctgagctgccggatgaccttgagcctcaggcagctcccacmtccaccaagaagaagaagaagaagaaagagagaggtcacacagtgactgagccaattcagccactagagcctgaactgccaggggagggacagcctgaagccagggcaactccgggatccaccaagaagaggaagaagcagagtcaggaaagccggatgccagagacagtgccccaagaggagatgccagggcygccactgaattcagagtctggggaggaggctcccacaggccgggacaagaagcggaagmagcagcagcagcagcctgtgtagtctgcccccgggaaactgaggaactaaagaaagctgaaggtgcccacctgggccaccagaaggtgacacccccagaatccctccccagagactgcaccagcscagccagcaggagcctggcctgggaggacgatttattattacactgggggtttccttggcagctggggtcatcagggtactttcaagaagggctcgtgcaggacatcaaacagcctccgggcctggatgggagggagaaaaaaatgaggaaccagtcattaaaggagctgtttcctgggtaaatctagagtggggttttggttctttattttcccctataccctsaagcatytatccattgagttacaaacaatccagttacaatctttttaagttattattattattattwttttttttttttttgagatggagtctcgctctgtcgcccaggttggagtgcagtggcgcaatctcggctcactgcaagctccgcctcccgggttcacgccattctcctgcctcagcctcctgagtagctgggactacaggcccctgcccagctaaytttttgtatttttttttagtagagatggggtttcaccacgttagccaggatggtctcgatctcctgacctcctgatgcgcctgcctcagcctcccagtgctgggattataggtgtgagccactgcgcctggctaagttattattatwtttytgagacagtctcctggtgtcacccaggctggagtgcagtggtgtgatcttggctcactgcaacctccgcctcctgggttccaacgattctcctgcctcagcctcccgagtagctgggcctaaaggtgcccaccactatacccggctaatttttgtatttttagtagagacaggggtttcaccatattggccaggctggtctcgaactcctgacctcgtgatccacctgccttgacctcccaaastgctaggataacaggtgtgagccaccgcaccctgccaagttattttaaaatgtaccattattattgactatagtcacctggttgtgttatcaaatagtatgtcttattcattctttctttgtgtgtgtgtgtgtgtgtgtgtgtgtgtgtggtacccattaaccttccccatctccctgccagcccctaactaccctccccagcctccaggaactatccatccactcttatctccatgagttcaattgttttgatttttagatacacaaataaataagaacatgcaatgtttgtctttctgtgcctggcttatttcacttaacataataatccccagttcattatgttgtaattgacaggatctcatgttttttttgttttgttttgttttgttttgaaaagggtctcgctctgtcgcccaggctggagtgcagtggcacaatcttggctcactgcaacctccgcctcccggattcaagcgattctcctgcctcagcctcccaagtagttgtgattacaggcacgcgccaccacacccagctcattttttcatttttagtagagacaaggtttcaccacgttggccaggctggtcttgaacttctggcctcaagtgatctgcccgcctcggcctcccaaagtgctgggattagaggtgtgagccaccgcgcccagccaggatctcattcttttttatggctgaagagtatccattgtgtgtaagtaccacattttctttgcctggtcatctgctgatggacacaggttggttctaagttttggcaatgtgaactgtgctgcaacaaacaggagtgcagatacctgttccatacactgatttcctttttttggggatatacccagcagtgggattgctggatcatgtggaacctcaacttttcagtttttagaggagcctccaaactgttttccatagtggttgtactgatttacattcccatcaaaagtatatgagggttcccttttcttcacatcctcgccaccatttgttattgcctgtccaccatttgttattgcctgtcctttggataaaagccattttaaggccgggcaccatggctcacacctgtaatcccggcactttgggagaccgaggtgggtggatcaccagaggtcaggagttcaagaccagcctgaccaacctagggaaaccccatctctactaaaaatacaaaaactagctgggcatggtagcgagtgcctgtaatcccatctactcaggaggctgaggcaggagaatcgcttggatccaggagacggaggttgcagtgagctgagatcatgccattgcactccagcctgggcaacagagtgagactccatctcaaaaaataataataagccattttaatagagctgagatggtatctcattatagtttatttttggtttttggttttcttttttgagatggagtctcactctgtcacccaggctggagtgcagtggtatgatctcggctcactgcaagctctgcctcccaggttcatgccattctcctgcctcagcctcccgagtagctgggactacaggtgcccaccaccacacccagctaatttttttttgtatttttagtagagacggggtttcaccatgttagccatgatggtctcaatctcctgacctcacgatccacccgcctcggcctcccaaagtgttgggattacaggcgtgagccaccatgcccggcctatttttggttttttttgagatggagttttgcttctgttgtccaggctggagggcagtggtgtgatttcagctcactgcaacctccgtctcccgggttcaagagattctcctgcctcagccactcaagtagctgggattacaagcatgcgccaccacacccaactaatttttatatttttagtagagatggggtttcgccatgttggccaggctgatcttgaactcctggcctcaagtgatctgcccgcctcggcctcccaaagtgctgggattacaggcatgagccactgcacccagcctcactgtagttttgatttgcatttttctgatgatcaatgatgctgagcaccttttcatatgcctgcttgccatttgtatgtcttttgagaaatgttaattcaaatattttgcccactttttgattggattattatattttatcctatagagttgttagaactcttatcttctgattattgattccttgtcagatggttagtttgcagatattttctcccatcctgtgtgttgtctcttcactttgtggaatgtttgctgtgcagaagccttttattcttttttttttttttaatttttgagatagagtttcactcttattgtccaggctggagtgcaatggcgctatcttggctcactgcaacctccacctcccgggttcaaacgattgtcctgcctcagccttccaagtagctgggattacaggcatgtgccaccatacctggctacttttttgtatttttagtaaagatggggtgtctccatgttggccaggctggtcccaaactcctgacctcaggtgatccagccgcctcagcctctcaaagtgctgggattacaggcccaagccaccgcacctggcttagaagctttttaatttgatgtgatcccatttgtccattttgctttagtttcctatgcttatagggcattactcaagaaatctctgcccagttcaatgtcctggagagcttctcaatgttttcttgtagacgtttcatgcattgaggtcttagatttaagtctgtaatccattttaatttgatttttgtatatggcgagagatagctatctagtttcattcttcctcattggattgcttctgctttgagacaggatcgctctgtcacccaggctggagcgtagtaacatgcttatagctcactgcagcctcaacctcctgggctcaagcgatcctcccacctcagtctccccagtagctgagactacaggcacgtagcaagctcacaccaccatgcccagctagttttttttatttttagtaaaaatgaggtgtccacttgcccaggctggtctccaacttctggcctcaagcagtcctcccgccttggcctcccaaaatgttgggattacaggcggaagccactgtgtctggtctttggttcttttttcaccttaaaactttggggtctcaggttgtgtttatttggggctctctccttcccccaactccttgggttctttcccagagctcttactttctgagggcccaggcctgggcataaggccagatcttctcttgatgcggcgatgagctgttccagagactgaaaggtgaaagcgaggggtcagggcagttgagcacaaaagcctcccctgtcccagctgaggaggggcctcagatattccccaggggagatgagggcctgtgggaaggcaggacgggcaaggggtgggcagggagatggaaggaaatgggtgacaggctttctaaaaaaggcaaggggacagaaatgcctatggggcaggggagccattccttactccaaatgtggtcaggagggtctgactgtccgttttgttgactgacttcacggtggtcagacattcagtcacctggaaagggtggaggcaggagtgtgtcggaagaagaaaggccagcaagactgagcctaggagggcagggctgggtcacagctgtgtccccagactgcctggcgtgcaggaagcactcaataaacgctttttttcccaactgattaaaaagtcatctcaggctgggcgtggtggctcatgcctaataatcccagcactttcgaggccgaggcgggaggatcacctgaggccaggagttcaagaccagcctggccaacacactgaaaccccatctttactaaaaaatacaaaaattagacaggcatggttgtgggcacctgtagtcccagctactcaggaggctcaggcaggagaatcacttgaacctgggaggcagaggttgcagtgagccgagatcatgtcattgcactccagcctgggcaagagagtgagactccatctcaaaaaaaaaaaaaaggaattaggcaggtaattgggcagagggaacagaaggggcaagtgcttggagaagcgagctaggcctgggagaagtgaagtgtgaagtggaggccacggggcttctgagcctgacgggcccttgttgagcctggtgagaagtctgggctttctctcggggtactggggagccatgggaggattttgagctagggagggtagcagcagatttgtgctcaggaaaacccctctagctgcagtttcggtgggatgggccaggaaagacgaggcccagggatgaatggacagtgccttaaaattggaactgaagctcaaccacccaggagctgcggggaggcccaggcagggatgggaggtgaggtggcctcacccgggagacgaagtcctgctctagcttctccatcaggaggtccgctggtttctgctcataggccttgtaggtctccaggtaccgcccagcttcctcggggctgggataacaggatacagggcagccgggaggtgaggtatcagattatagatttgcttcattatggtcagtcataagaattgccaatactaggccgggcgcggtggctcacgcctgtaatcccagcactttgggatgatgaggcaggcagatcatctgaggtcaggagttcgagaccagcctggccaacatggtgaaacctcgtttctactaaaaatacaaaaaagtagctgggcttggtggcgcgtgcctgtagtcccagctactcaggaggctgaggcaggagaatcgcctgaacccgggaggcggaggttgcagtgagccaagatcacgccattgcactcccgcttgggcaacaagagtgaaactccatttcagaaaaaaaaaaaaaaaaaggccgggtgtggtggctcacgcctataatcccagcactttgggaggctgaggtgagcagatcaccaggtcaggagatcgagaccatcccgactaacatggtgaaaccccatctctactaaaaatacaaaaaattagccgggcgtggtagcgggcgcctgtagtcccagcttttcaggaggctgaggcatgagaatggcgtgaacccgggaggtggagtttgcaatgagccgagatcacgccactgcactccagcctgggcgacagagccagactccgtctcaaaaaaaaaaaaaaaaaaaaaaacaattgtggttgctaaaaatcaaaattccagcccatcccccgccaaatacaacctggtagtaaccactgctgggcgcatcttgatatcttttctggctacaggccagctcttgggagcccaaccccacttctccctgggtaaccctgggccagtggtttgctctctgggcctgtttcctcactgtaaagtggggtggtcaggcatagtggctcatgcttgtaatcccagcactttgggaggctgaggcaggaggatcacttgagctcaggagttcaagaccagccgggacaacatagcaaggtgttgtctccacaaaaaattaaaaattagccaggtgtggtggcgcgtgcctttagtctcagctgctcgggaggctgaggcaggaggactgcctgagcctgtcaagttgaggcttcagtaacctgtgatagcaccactgcactccagcctcagcaaaagagcaagaccctgtctcaaaaaaataataataaagtggggaggatggtatgactttgaagatcagagaatactctggaatgctctgtaagtgccaaaagccacgcctggcactgctgaagaaatgttagctattttggaagggaagtcagcacacaaagtgtttgtactgggtttgacaggaggaaaaccagaaacactgcttattttcccgctgcagcaagaagccaacctcatgaaatgttcagcttccaaccgggcacagtggctcacgcctgtaatcccagcactttgggagggtaaggcgggaggatcacctgaggtcaggatttcaagaccagcctggccaacatggcaaaacccgtccctactaaaaatacaaaaaaattagctgggcgtggtggtgcacacctgtaatcccagctacttgggaggctgaggcagaattgcttgaacccccaaggcagagccgagatcgtgccactgcacttcagcctaggggacagagtgaggctctgtatcaaaaaaaaaaaaaaaaaaattaagaccttgttttacagatgaggaaactgaaggccagagagaggcagtgcctgcaccaggcccacacaggaaggagaagggaagggctgggcagggtgggatgggggag

SEQ ID NO: 94890 - DNA, 52343 bp, Homo sapiens
  misc_feature (1)...(52343): n = A,T,C or G
aaaaaaaaaaaaaaattagctgggcgtagtggtgggcacctgttatcccagccacttgggagcctgaggcaggagaatcgcttgaacccgggaggcggaggttgcagtgagccgagatcgtgccactgcactccagccaggaaagagagtgagactctgtctcaaaaaaaaaagaaaaaagaaagaaagaaaattcctcacaaagcctttatcagtatctgcacctagtgcattattattattattattattgtttttgacacaaagtctcactctgtcgcccaggctggagtgcagtggcatgatctcggttcactgcaacccacacctcccgggttcaagttattctcctgcctcaacctcccgagtagctggaattacaggcacacaccaccaagcctggttaattttttttgtatttttagtaaagacagggttttgccatgctggccaggctggtctcgaactccagacctcaggtgatccacccttctcggcctcccaaagtgctgggattacaggtgtgagccaccgtgcctggcctattgttattgctattattgcccccctccaaattccactagcctgtgaaactcaggctggtttctcttcctccaggcagctctccaaacagctcatgtttttctttctttttttttttttgagagggagtcttgctctgtcaccaggctggagtgcagtggcgcaatttcggctcactgcaacccccgcctcccgagttcaagtgattctcctgcctctgcctcctgagtatctgggactacaggcacgcgccaccacgcccacctaatttttgtatttttagtagagatggggtttcaccaggttgaccaggatgatcttgatctcttgaccttgcgatctgcctgcctcggcctcccaaagtgctgggattacaggtgtaggccaccaggcccagcaaaacagttcatttcttatagctcccagccccaaaatagtcctaggaggaagtcctttctggagtctgaccctcagtctgcctgcttcaaatgcgctctttcatccctctttcacttcccactttcccagtcccatggagtgatttgaacctcaattccatcccgtcccaacttcacccttcatttacctttcctgaaaccagaccacggctgggccttgtagccattggggtgttccagatgcagcttcattgagtcccaactggccctggagaaggtctggaacatgcccatggtataggaaggaaagtgagactcagggcatttgggtacccagtaacacaggactacagagctaaagcctgcatctgcaacccagattctagacacgcacacgcacatccaaggacacacacagaggaagtaataatactgacaacaatcaaaacaggtattttgtaaatgtttgttttctgccaggcattttctaaatgctttccatatgaactcatttactctcccacaacagtcccataaactgggtctattattctccctatttgacagatgaggaaaccgagtgcatagaggtcctaatgctagcaggaggaaggccacacagttcggccggacgcggtggctcacgcctgtaatcccagcactttgagaggctgaggcaggtggatcacttgaggtcaggagtttgagatcagcctggccaacatggtgaaacctcgtctctgctaaaaatacacaaaaattagctgggcgtggtgcaggcacttgtaatcccagctacttgggaggctgaggcaggagaattcgggaggcagaggttgcagtgagacggaatcacacgtctgcactccagcctgggtgacagagtgagactctgtctcaaaaaaaaaaaaaaaaaaaaagacaacagagttcaaatccatagtttttaggggttttttaaatttttgtttttgttttttgtttttcttttgagacaaagtctcactctgttgtacaggctggagtacagtggtgtaatcacagctcactgcagccttgatctcctggtctctgatgatcctcccaccacagcctgccaagtagctgggattccaggtgtgcaccaccatgcccggctaattttcgttttgtttttattgttgttgttgttgtttgagacggagtttcactcttgttgcccaggctggagtgcaatgacgtgatcttggatcactgcaacctctacctcccgggtttaagcaattctttagcttcagccttccaagtggctgggattacaggcacccgccaccatgcctggcttttttttctttatttttagtagagatggggtttcaccatgttggctaggctggtctcgaactcctgacctcaggtgatccaccctccttggcctcccaaattgctgggattacaggcatgagccactgcgcctggcctaatttttgtattatgtgtagagacagggtctcaccttgttgcccaggctggtcttgaactccaggtctcaagtgatcctcctgccttagcctcccaaaatgctgggattgcaggtgtgagccagtgcacctggcctcctactccacgtggccctgatatgtgccatgaggctctgatatgtgccmtgcactgtggggggtgccaaaaattagagctacatggctacagagaccctcctgtgctatggcccacgcagcttctagacacacacagaagacccagtaccacaaaatcacttgcagggttacatggatgtgtgtgctcgacatggacataagagtcatcgattcatttacccaacaaggaattactgagcaccttctctgtgcagggtggtgctggggacctggcagtgaccacaacagccttgggtcctgccctcacagggtgcacagtccagtgggggagatggacagtaaacaaaggaacaaatatataattagacattgcaatgaatgctgtggagggagctctgaaaaataatctgtacacaaacgcaggtacctgcatggttacacacagaaatccagaaacacacatggctaggcacggtggctcatgcctataatcctagcactgtggtggaaggccgaggtgggaggatcacttggggccaggaattggagaccagcctgagcaacacagcaagatcctgtctctacaaaaaaaaccagaaaattagccgagtgtagtggcgcttgcctgtagtccccactagtcgggaggctgagacggcggggatcgcttgagcccaggagtttaagactagcctgggcaacacagccagaccccatctctaaaaaacaaacgaaaaaaccagaaacacacacacacagaaccagaaatgcacggctagaggcaaaaccgtgcacatccatgggtacttatacaggcattgtttcacatagatgaccacatgcaagactcacaactgcacacacattcatatctacacagtcagcagggctacacactcccatacacccagatacacaagtgcaaaccacagaaaccactcactgagtcctgcagttttgctctcacacaggaaataccagatgtgcacattgtcaccgactgttgctcacctatagtcacatccattcacactgtcacacactcaatttcttctctctgctcggagattcgccccagccctggtcacatgaagctactggatgggggggtgttgggagtgtgtgttggggatgagttgttagaacctcccagctgtggacagcttcccggacacaggatggaaggaccacgggctgcctgtctcttgaaagaggctcgagaaagacaggcaagagaaccccaagggagcggggaaaggaacgggagggctttggggctgtggcttgagtgtgaacagattgtctccccttgtctgtctgtctcccctggtggggaccccaaccgcaacaatgcacccggaaatccggcagtccaaggcagaaacggcaggccagcgaagtgtgtgcttgtccctattttggttgtgatggtttgggggggatatgagacagccacagcgcgggaggcgctggacagacggacatgccggggaggagggggcgcagacggacagatacccgagcggaggcggtcccggggcagacaggaggagcgggcgacaacagacggcggctgtctaaagggaaaccggtaatttgggaacccggttctcccccgcttccatcaccgcaatcccctccaccccccgccccgggctcccggcgggccggtctgtccgcccgggccggtcctggctgcgccctgtgcggccgcgccacccagcccgggacaaacagccctcgcgttgctaggcgacggcgttccacagtccgtcgcgtcaccgcgtctgcgcgggcgtggggggggggggggggggcggcgcacggagacggcggccgcgtcgtttgttgatgttgcccggcaaccggcgcggcgctgccgggcaacgccggccgactgttcattctctctctctttttttttttttttttgagacggagtctcgctttcgctctgtggcccaggctggagtgcaatggcgcgatctcggctcactgcaacctctgcctcccgggttcaagcgattctcctgcctcagcctccacagtagttgggattacaggtgcgcaccatcacgaccaatttttgtatttttagtagagacggggtttcgccatgttagtcagtctggtctcgaactcctgaactcagttgatccacccgcctaggcctcccaaagtgttgggattacaggcgtgagccaccgcgcccggcctggactgttcattctcttaaaggagcaggagcattttacagcgccgacctcggccggccgcgtggcggaactgaggcgttagagggaaagaagagggttccttccctggctcatgaaggtttaggggattggaggctgggttagccttcttgaggaagagaaaagatataaggcgggagctctgggtatttcaactagagtgtttggagatgttagtgcaatattgattgcacgtgtgcataggcatgcttgtggacctgtatgcatgggagtaggtgatagagatacagggctagcaaggactgggtttagttacccactccggaaccttgacctgtgacttcctctgagcctccttccttcctgaaatggaggtgataacatcacccacccctagaattgtgaccatcaaatccggtaaagcacttagtacataataagtgctccgtataaaataggtttaattatgttatttaataactggattctgtccctaactcgctgggctttttttgttttgtttgagatggagttttgctctttttgcccaggctggagtgcaatggcatgatctcggctcacggcaacctttgcctcccatgttcaagtgattctcctgcctcagcctcccgagtagctgggattacaggcacccgccaccatgctgggctaattttgtatttttagtagggacgaggtttcaccatgttggccaggctggtcttgaactcctgacctccagtaatccactcacctcggcctcctaaagtgctgggattacaggcgtgacccaccgcgcccggccattttgttggttttttttgagacaaggtctcattctgttgcccaggctagagtgcagtggtatgatcacagctcactgcagcctcacttcctgagctcaagcaatcctcccgcctcagcctaccaactagctgggactataggcactggctaattttttaatttttaatttttattattttttgtttttagagacgggggtctcattatgttgcccaggctggtctcgaactcctcctgggctcacccaatcttcctgccttggcctcccaaagtgctggggttgcaggcgtgagccacagcgtccagctcctcactgggttttggaatacataagacggtgtttgtaaagtacttactgcagcccggtgcactcaatacacagcagtcgttgtattactagaggtgtttttattattgtttcctccactctgtaaaggatcacgtgataaggcactagcagatgtggttggaatccttgctgtgctgaatcctggctgtgtgaccccaagtaagtgccttgccttctctaaccctctgcttcctcttcagtgaaatgcatgatcccttatccttcacaatcacttccaggtaaaggtcctgggcgaggggtcccctctcactgggcatgtcaggtcagtgccccgtgtctgccgcatgactcacagggctacgttatgtaaagctccttgattctgcacagagggcaggttatataaacgtatttaatgtgcatcctacatatcaagcctggggaggagacctggcttggtaaggctgagattgctaaaccatggcactggctgtttctgggaagtagggcctattaaagcatgggccaaggagacggtattgtctccttcaaaagaaaatacatctctcctggggcggggtggggggtctttctaggcccccaaatagctttttgtctttctcagcctctgatgtgtgtttatctctctctgcattttttttaaattaataaaaacttttttttaaataaagatggggtcttactatgctgtccaggctggtctcaaactcctgggctcaagagatcctcccatctccgcctctcaaagtgctgggattactggcgtgagcaactgtgcccagcctctctcttctttttttctgaaccctatctctgatctctctgtctctgtctcatcatctctatgtatctctgtcactttctgcttttattcccgtgagtccctttctgggtctctgtctctgtttgtgattttcctttattacttaactctccctcaggttgtttccaaacattcttaggagaaatctgagtagcaccaagcccctcgcagctgactgctgtgtgatgttggggtgagctgtctgctctctgggccttgactcttctctgtctgtaaaatcagatgcagtaactagtacaagcaggcaggggtcccagtcactggggagtattttaaaggtgggttcctccagttccacacccacaagctgtgggtcagaatctcagagaaagacgaccgggcgcgatggcttatgcctgtaatcccaacactttgggaggccgaggtgggtggatcacctgaggttaggagtttgagaccagcatggccagcatggcgaaaccccgtctctactaaaaatacaaaaattagccaggcttggtggcatacacctgtagtcccagctacttgggagactgaggcaggagaatcacttgaacctgggaggcagaggttgcagtgaactgagattgtgccactgcactccagcctgggtgacagagcaagatactatctcaaaaaaaaaaaaaaatctcagagaaagaagcccagagaattatgctatgtgagttactccccaggtgattctgagcaaccagccagaattgccgacctggggctggacacacctgtccagaggccaggttctcatggtacataataggtgaggtcctatggaaacacacagccagggacaagagtcattctgcggcagttagaggatcctgagtgtggaggcgtgagagagacagagctgggtcagagtgagacaaaggtcagagatagagacaagaaaagaaaacagagagatacagagacataaagagatagacgcccggcacagtggttcacgcctgtaatcccatcactttgggaggcggaggcaggtggaccacctgaggtcaggagttcaagaccagcctgaccgacatggtgaaaccctgtctctactaaaaatacaaaattagctgggtgtggtggcacgtgcctgtagttccagctactcaggaggctgaggcaggagaatcgcttgaacctgaaagggagacgttgcagtgagcctagatcccgccactgtactccagcctggatgacaagagcaaatctctgtctcaaaaaaaaaaaaaaaaaaaaaagaagcaaatctgtgttttctgcacactgcctgaaaatgcattcccagagcagaaggccacatttccgtgtgtatgcgtgactgtgtttcacatgttgctgcacgtagtgctggggtgtgccaggcctaggccgtgattggatgtgggagccagatgctgggctgggaggttctgggtggaccctctgtgcctgtgccaacctgcctctaagcaagtgtcctgggccagcattctccccatctggctcctactttcttttcttttctttttttttagacagagtctcaccctgtcacccaggctggagtgcaatggcgcgttcttggctcactgcaacctccacctcccgggttcaaatgattctcctgcctcagcctcctgagtagctgagattacaggcgcctgccactgcgctcagctaatttttgtatttttagtagagatgaggtttcaccatgttggtcaggctggtctcgaattcctgacctcgtgatctgcccgccttggcctcccaaagttccgggattacagttgtgagccacctctcccggcccagctcctactttctacaccggctccatgtgactgatgaggacatggctccgggagtcctggggcccacatggatragtacaggtttagatgtaaatctaggcactgagagtgttatgttcgggtgtgtgggcttgggaatagccgtcccaatagaggggtaccatctttggagctagactgagccgtgagaccttaggcaagttaagcgacctctttgggcctcagtttgcacatctgtaaaatagggatgttaacttttatggggatgtggtgagtaccacctaacataatggaaagtgctgccatctactgatggcttgctatgaatgtgcttgtcagcaaattttgcctctcttaactcaaaggcctccagaatcgatccctactacctcctarwccaagtcaccattggactcaactggaccatgacagtgactggtctccctgactccacacttgtcctccaaagtctattccccacctacaacccaaaggaccctgttaaaataaaaaacaagccaggcgcggtggctcacgcctgtaatcccaacactttgggaggctgaggtgggcaaatcacctgaggtcaggagttcgagaccagcctggccaacattgggttgagtgaaacctcatctctataaaaatgcaaaaaaaaaattagccaggcgtggtggcacgagcctgtaatcctagctacttgggaggctgaggcaggagaatcgcttgaacccaggaggcggaggttgcagtgagccgagaccacgccattgcactccagcttgggcagcaagaaagaaactctgtctcaaaataaataaataaatwaattaattaacaaataagaaacagttcacatccctcttttgctcaaaaccctcccatagctcctgacccactctgtaaaagacttcacctcagcccatcgggccctgcgggatcagcccttagtctctctgacctcttctgctccagtgccctccccacgttctctctgtccacccacactagctgcctccgtgttcctccaacacaccagacatgtcttcaccttacaccctttgcacttgcttaggccacatatctgcatggcttctcccaaaccaacttctagtctttgctcaaacatcaccttctcatttaggccttccctgaccatcccatttaaaatagcaacccccaaccccctgtctctgcttttcccagcacttactactttccaaagtactatataatttgcttaatttgctcatttgttcatttattgttggtcatcccccttccaatttccaaagagtaagcttccagaacagagagctttgtcttgttcaatactgcattctcacagtcyttaccagtgcctggcgtatagtagatgctcaataaatacctgttgattggggcaggtgccgtggctcacacctctaatcccagcactttgggtggccaaggtgggtggatcacttgaggtcaggagttcagaccagcctggccaacatggtgaaaccgtgtctctactaaaaatacaagaaatagctgggcgtggaggcacaggcttgtaatcctagctacctgggaggctgaggcaggagaattgcttgaactcaggaggcggaggttgcagtgagcccagatggtaccattgcactccagcctgggccacagagcgaaactcctctcagacaacaataacaacaacaacaaaaaatcggttgaatgaatgaatgatgagtgtacatgccaggaattgtgctacaagctctgggtctgcgaattcactgaatcgtcagaacagcctgatttgctaagcgctgcgtattaatgtccccattttacaaatacagaaacagagtcagagaggggaagtccctcgaactgagtgcaaaggtcctgaggactaaagatggattattctgccatcaggggcgtccctgccggcctcggtgttgcccgtgtgtaactgcattatttctgtgcttatttctgggccccgtccttgttcgatctgtcgcgtggtctttccttatatctctgcgccccgacagttccctgttgcttcggcctccacgcatgtctccgaatttcttgctccggggccctgatctctgtatctcctctttgctgcgcctcagtctccgggtttctgcgccctgaggcctctgggggccaaggccgagggtttggcgcgcaggcctgggtgctccgtcccggcccggtggcctcctgaccgcccagcctcatctggcggccctggggcggggcggggcctgttgcctggagaccagtgttttgccgcagcaaactgggtctctgggccaccgcgggggggcggcctgggaacccgcgccgggcgtgggagcgcgcccgggaggggcgcgggccggccttgggcctaggggcggggaggggctccggggtggggggcgaagcggctggctgggggagggggggaaatggggaacaggatttggggagatgaggtagggacatggggcagttcgaggagacaggagggaactgcgggaggctgggattaggaggacaagagagtgtattggggtcagttggagggaagcgggtgagtcgggggctagggagggctgggagatattgaggaaagcttgggggagcccggggaggggattgggagggcctgggcaggatagtgggggtagttgagggggtgggaagaggggcccggtatggatgagtgaaggaaggaccggggacactggaagtttaggggattcgggaattacaagcgatgagtgtgagggcagagagtttcggggggcgttgggaaggtgtgaaaggacggggtacggggtgtagaggagagaggtttgccggttcggagaaagaaccgaactgcagggccacaggagggtagagttgggaggagataggatccccagggagaaggaggctaaaccgggccggaaacaagggtgaatcagaagagggggagcccctgccacttccaggttcctgcgggaggggccctccttgcccattgtccccggcccggccaggacatccggcgacttccctcgggacgcgacgacgggttgtgtaaccctgcccggcccgcctgctcccgggggcggggcctgagtctggactcccgggttcctctccgcccccatcccaagggagacgcctgggtcgggatcctgggggagcggctcgtgacgtcacaagtgggcggagtccaccaacggcgcgaacccgttttcttactcactggcgatctgggatctgggacccaaggtggggaggggtgttcttagcgatccccttggttgaagcagcccaatgaccgcgagggtaaactgagtcccagacggtgctgacccttttcattcgattcattcattcagtaagatgtatggagcgccggctgtgtcccagttactgccttaggtgatggggacacagcagtgactgatccttgcagcccctgggcggaccccatcccaaactgagtgtgactgactacagccatacctccttggagcctggcctccttcactagacaaatcaataagatggaccctcacatccaggcagctgggagacccctccctagtgcagagggcaccacacatccctcagctcctgagtccctggtctgtgtgtgactgcatctccccttcctcccccgatggcctgtcacttcctcttatcttcatcccccccgcggggcatgactagggatgctggtcttaaggcagttggcaaatcactcagacgtcataactaagccggctgtgctatcaccgagatgtgtccctgagatgtcattaagcagcctgcttcttctatacatacctctggggtgctgtgggtctgaggaggggccacgccctgctgctggtggttcctcagcctgccaaacagagttatctacttccatccaagccctccatcagaaggttctggaagatgccttcctggctacccttagtcttcttccaggcagccttccttgactccccacccctgtcaccctccctgggatttgtatcctggcctgaaccttgcctctttgatctcatccacttccttgcctcaactttgaaaagccttcagaaccgggccctcaaaaggacacatccttgcacctctccaagcctcagttttcccatctctaaaatgggcatagcaatggggtctggcctactcactgagtgctgaatgattccagccacttcatttctgtgatgggctttgcataggccagggacatcgtgagagctcagtgaatcctactggccaagatacataaaaaatagttaatattgagaagtggggatcagagtgggagggaaatttacttttccaaggtatacccttttgtagttaccaaaactttttttctttttcttttttttttttttgagacagggtctctgttgcccacgctggagtgtagtggtgccatctcggttcactgcaacctccacctcctgggctcaaccgatcctcccacccacctcagcctcctgagtaggtgggaccacaggtgcatgccaccacacttggctaattaaaaaaaatttttttcccagagatgagatctcactataatgtcgaggctggtcttgaactcctgggctcaagcaatcctcccacctcggcctcccaaagtgctgggtgggattacaggcatgagccaccgcacctggcctctaaacagttttcaaaattaaaaaaaataaaataaaaaaaaagtgctgtgcacagtggctcacacctgtaatcccagcactttgggaggccgaggcaggcggatcatgaggtcaggagatcgagaccatcctggctaacactgtgaaaccccgtctctactaaaaatacaaaaaattagttgggcgtggtggcatgcgcctggcctgtagtcccagctacttgggaggctgaggcaggagaaccacttgaacccaggaggcagaggttgcagtgagccgagatcccgccactgcactccagcctgggtgacagagcaagactccgtctcagaaaaaaaaaaaaaaaattaggctggacgcagtggcttacgcctgtaatcccggcactttgggaggccgaggtgggcggatcacttgaggtcaggagtttgagaccagcctggacaacatagtaaaaccccgtctctacaaaaaaatacaaaaattagccaggcttggtagcaggcgcctgtaatcccagctactcgaaaattttagaagttacttaaaaattaccatctctgcactgactctgaaacttatctaggtatcttccacccacatttcacctcagggatgacccccccgccatccaccctgctacctgggtggagacctgggcctcaactgggtatctctcccacccactgcagggtcagggccaggcccaagaccttagtcactcattctgacctctgtcaccctcagggaagtcagtgtgctccctttaaacccccagaacatgcagtgtaggtccttgaggcctgacactgatgcttggagtgggcactgagaatctcaggatatggaaatggggaggcccttagatgatctcagtgcaaagggaagacctaggcccagggaacagagttctgactgttcccaaggcctggagctgttgtgtccaatcactgacttgcaagggaggaaagaatcttagtggaggcgggctctgtagctcatgcctgtcatttcagtgccttcctaggaggaggccagaggatagcttgaggccaggagctcaagaccagcctggacaaggcgggcaaggcatggagactctgtctctacaaaaaaatgaaaaattagccaggtgtgctggtgcacacctgtagtcccagctactaggaaggctgaggtgggaggatctcttgaacccaggagttcaaggctgcagtcaactaagatcccagcactgcattccagcatgggcaacactgcactccagcctgggcgacagagcaaggccttgtctgaaataaaaaatattagtggaggtgggtaaataaagaaacggctcaaggctgagccctaactctggtgacacagtgatcaaatttggtgacaaagacggtcatccttccccagcctgagccccgaccctggtcacagaatgagccgtgatgctggccatgcctcgcctcagctctgaagactaggccagactgaagtgtcccatgctccaacccccagatctaagcctacccctgcccacagtagaaacaaaccaagaaatcagatcctcacccccagccctcagccctcagcccgcaggtctcctgactccctgtgatcctctcgccctgctctgcccccataaaggttggccttgaggacagagatggtaaggggcagattcaggacgacaggagattggcgatgagggtggagaggggaaatagggacaggagtaggacaggctgggggatgcggatgagtaccagtgggggacatcgctgggggtgtaggggaggggggagttatgatgaggaatggaggtgaagctgaggatgggggacaggggatgaggatacaatgtgggggacgtaggaaggcagccaggctagcggcggggcggggtcgcagtcgggggcgagtgtgaccgccagggcagagtgggggtgcgctggggacagcggcgcctgctcggccgggctgcgcccagcaccgctccccccgcgcgctcccccttccgctccccggaagcgctgagtcgtcctgccttatctgggggccgctatttcgggctcggctcggagcgcggcaactatttttagcggagctggggtaaaaatggacgcggcgccgcgcgggttcccgaggccgtgcgcgccccctcgcgaccactgagggccccggggaggagcgcgcgcctgagtcacagccgtccccctaccccgaggcacggcgagggggcctcgatcgggggcgccctggacaccccgcgtgcacacccgcctcccgggctcccgggcgccggcgagccggcagggcgcagaatcttccaggggcgtcgggacgcgtccgccggggttcagagccgacggcggagttttgggcaggggcgccgcgccccctggtggcccccgcagggatcgcaggcaggagctgggcctgagtccgtctcagcttatctattcatttatttttattatgattatgattatttctttgagatagaatctcgctatattgccccaggattgtctagaactcctgggctcaagcgatcctgctacctcggcctcccaaagtgctgggattaaaggcctgagccactgcacccggcctattattattaactactattattatttttttaaatctgacctcgtcgtccacacccattttataaatgaggaaactgaggtccggagaggaactgggttgaggcattgcagcatgaaccgcaatgtaccatcatttcaacttgagcttggacacttcctaaatggggaattcactgcctcccagaaaacgaggcgctatttgtttttttgtttgtttgtttttgttttttgagacagagtctcgctctgtcgcccaggctggagtgcagtggtgcgatctcagctcactgcaacctacacctcctgggtgcaagaaattctcctgccttagcctcccgagtagctgggattacaggcatgcgccacaacggctggctaattttgtatttttagtagagatggggttgggagaggaagaacagagagatgcggttaaaaaataccaaactacagtcagataagaggaataacttcgggccgggcgcggtggttcacacctgtaatcccagcacttcgggaggccgagtggggcggatcacttgaggtcgggatttcgagaccagcctgaccaacacggagaaaccccgtctctactaaaaatacaaaattagccgggcgtggtggcgcatgcctataatcccagttacttgggaggctgaggcaggagaattgctggacccagggaggcggaggtcacgctgagccgagatccagccattgcactccagcctgggcaaaaagaacaaaactctgtcttaaaaaataataataataataaataaaaataattagccgggcgtgatagtgcacacctgtagtcccagctactcagaaggctgaggtaggaggatcacaggagcatgggaggcaaaggttgcagtgagccgagattgtgccactgcactccagcctgggcgacagagtgagactgtcttaaaataaataaataaacaaacaaacaaacacataaaaaataaaattacacatatggatccagcaatcccacttctgggtgtatattgcaaataaattgacatcaagatgtcagggccaggtgcggtgactcacgcctataaatccagcagtttgggaggccgaagcaggaggatggcttgagcccaggagttggagactaatctgggcaatgtagtgagatgccatctctacaaaaagcacaataataaaaataaaaaaaatcagatgagaggccgggcacagtggctcacgcctgtaatcccagcactttgggagacggaggcgggtggatcacgaggtcaggagatcgacaccatcctggctgacacggtgaaatcccatctctactaaaaatacaaaaaaaatttagctgggcgtggtctcacacgcctgtagtcccagctactcgggaggcggaggcaggagaatcacttgaacccaggaggcagaggttgcagtgagccgagattgtgccactgcactccagcctgggcagcagagcgagactccgtctcaaaaaaaaaaaaaatcagatgagaacacgtagtgacaaaaaataaaaaataatatttacaaatttaaaaaatttaaactctattttagcaactttgaaatacacaatacattagtattaactgtggttaccatgctgtgcaatagatcactgaaatatatttctccagtctcgctgaaactttgcaccctttgatcaacatcttctcttttcccaaccctctcccacttccctggactctagtagccacctttatactgtttctatgagctcgactttttaagattccatataaaagtgggatcatgtggtgtttgtctttctgtgtctggtttatttcacttagaataatgwcctccagttccatccatgttgtcttgaatggcagaatttcctcccttttcaaggctgtatagtattccatcgtgtgtatatgcaacatttgctttatccattatgtcccttgatggacacttaggttgactccatatcttggctattgtgaccagtgctgcaatgaacttgagagtgtagataacccttcgacatcctgatttcaattcctttggaaatataaccagaggtatatgagtctgctagatccatatgtaygattttatttttacttattatatatatatatacacacacacatatatattttctttttcttttttgagatgaagtcttgctcctgtcgcccaggccgaagtgcagtggcgtgatcaaggctcactgcaacctctgcctcctgggttcaagcgattctcctccctcagcctcctgagtagctgggattacgggcgtgtgtcacaacgcctggctaattttgtatttttagtggagatggggtttcaccatgttggtcaggctggtctcgaactcctgacctcaggtgattcacccaccttggcctcccaaagtgctgggattacacgcgtgagccactatgcccggcccttattttatattttaaagtctcactatattggaatccactatatatggagtctcactgtatggcccaggttgatctccaactcttggtctcacggggtcctcccacctcagctttccaaggagctgrkattacaagtgcaggctaccatgcctggctgtcacacatgtcgttttaaatgtttaggccagggtggctcacactcgtaatctcagccctttgggaggccaaggcgggcagattgcaatgtcaaggccaggagtttgagatcagcgtaggcaatagagcaagaccccgcccccccgcttcatctctacaaaactwtttttgtttgtttgtttgtctgagacggagtctcactgtcacccaggctggagtgcagtggcgtgatctcggctcactgcaagctccgcctcctgggttcacgccattctcctgcctcagcctcacgagtagctgggtctacaggcgcccgccaccatgcccggctaattttttgtatttttagtagagacagggtttcaccatgttgaccaggatagtctcgatctcttgacctcgtgatccgcccgcctcggcctcccaaagtgctgggattacaggcgtgagccacggcgcccggccgaatttctcttgttttaagtcactgaattggggataatttgttatagtagccgttaagaaactaatgcaatctgtttgagcttctgtcccctccacgctaacggcagagtttctgaggcttttagagaacatcttttccaacccttccacatagggaaggaaactgaggctcagagagaggatggagactgaaggagacctcaggcttcccgctcttcatccaggctccgtgggtcactgtggcaatttacagatatttttcccgttttaaaaaaaataggctgggcacggtggctcatgtctgtaatctcagcactttgggaggatgaggtgggcagatcaactgaggtcaggagttcaagaccaacctggccaccatggtgaaaccccgtctctactaaaaatacaaaaaatattagccgggcatggtggtacatgtctgtactcccggctacttgggaggctgagacttgagagaatcgcttgaatccgggaggcagaggttgcagtgagccaagattgcgccactgctctccascctgggtgacagagtgagactccatctaaaaaaaaaagtacagaatgtggactgaacatggaggctcacacctgtaatcccaacactttgggagtccaaggcaggaggatcccttgaggccagcagtttgagatcagcagcctgggcaacatagcgagamcccatctctacacaaaaatagccagctctggcggtgcacacctatagtcccagctacttgtgaggctgaggtaggaggtttgcttgagcctaggagtttgaggctgcagtgagctgtgatcaccacactgcactccaacctgcgtaacagaataaaggtctcaaaacaaaaacaaaaaggccagaatgtttattgagttttcttttaaggctgagacagagcacaaggtttggttggagtcctagtttgtttgtttacctgctatgtggccttggataagagtctaccttccctgtgcctcagtttctccctctgtaaaatgggcatggtgagataagtcatctcagagggttgtagtgtggagggctgctgtgagaatcaatgttactgtgcggcatagtcctggaagtgtttgaaatgctgtaaaatgggcctggcacagtggctcatgcctgtaatcccagcactttgggaggccaaggtggatggatcatgaagtcaggagtctgagaccagcctggccaacatggggaaaccccgtctctactaaaaatacaaaaatttggccaggcaccatggctcatgcctgtaattgcagcactttgggaggctgaagcaggtggatcacctgaggtcaggagtttgagaccagcccgaccaacgtggaaaaaccccatctctactaaaaaaaaaaatacaaaaaattagccgggcgtggtggtgcatgcctgtaatcccagctactcaggaggctgagacagcagaatcgcttgaacccaggaggcagaggttgcagtgagccaagatcgcactattgcactccagcctgggcaacaagagcgaaactctgtctcaaaaaaaacaataaaaataaaaataaaaaaatttttaaaaaaggccgggtgtggcaatgttcgcctgtagtcccagctgctcgggaggctgaggcaggagaattgcttgaacccgggaggcgaaggttgcagtgagctgaggtcgtaccactgcactccagcctgggtgacagagcaagactcagtctcggaaaacaaaagcaaaaacaaaaaaatgctgtaagacaagaaaaataaatgagatgcaacgattggaaggcaagagagaaaactgccagatagattctcttttcttttttttgagatagggctttactcagttgcccaggctggagtgcattgtcatgatcatggccctctgcagccttgacatttttgggctcaagtgatcctcccaccttagcctcccgagtacgtgggactacaggcacatgccaccaagccatgcgatttttttttttttttgtattttttggagagacacggtgtttcaccatgttgcccaggctggtctcaaactcctgggctcaagcgatctgccagccttagcttcccaaagtgctgggattacaggtgtgagccagggcacatggacaggtctcttcttcttcttcctctttttttttttttttttgtgtgtgtgtgtgtgtgtgtgtgagacattcttgctgttggccaggctggagtgcagtggcacaatctcggctcactgcaacctctgcctctcgggttcaagtgattctcctgcctcagcctcctcccgagtagctgggactacaggcgcatgccaccatgcctgactaatttttgtgtgcgtgtatttttagtagagacggggtttcaccatgttagccaggatggtctcgaactcctgacctcacgtgatccacccaccttggcctcccaaagtgctgggattacaggtgtgagccactgtgcccagccaggtctctccttaaatgctcctttgacagagaaacctccgctaccctcccatccactcgtcctctccttcaaagttaaaatgatgttccacattcttgtccttcatgacactaatcaggtttgtatgattgttagttcattgattcttttttttttttttttaaagacagagtcttgctctgtcacccaggctggtgtgcagtggtacaatttcggctcactgcaacctctgtctcccgggttcaagcaattctctggcctcagcgtcctaagtagctgggattacatccgtgcaccaccatgcctggctaatttgtttgtttttgagatggactctcactctgttacccaggctggagtacaatggcgcaatctcggctcactgcaacctccacctcccaggttcaagcgattctcgtgccttggcctcccaagtagctgggattccaggcacatgccaccacgcctggctaatttttgtatttttagtagagacggggtttcaccatgttgcccaggctggtcttgaactcctgacctctggtgatccacctgccttggtctcccaaagtgctgggattacaggcatgaggcattgtgcccggcttaatttttgtaattttagtagagacagggtttcaccacgttgcccaggccggtctcaaactcctgacctcaagtgatctgcctgccttgttctcccaaagtgctgggattacaggtgtgagccaccgcacccggcctaatccatttatttatttatttattttgagacagagtttcattcttgttgcccaggctggagtgcagtggcgcgatctcggctcaccgcaaactccgcctcccaggttcaagcgattctcctgcctcagcctcccgagtaggtgggattagaggcatgtgccaccatgcccggctaattttgtatttttagtagagacagggtttatccatgttggtcaggtcatgttggtcaggctggtctcgaactcccaacctcacgtgatccgcccacctcggcctcccaaagtgctgggaatacaggcgtgagccactccacctggcccccttacactcctaattattgaaggcctctgcctgggcaacatagcaagaccccgtctctacaaaaataaataaaagcagccaggagtggtggcatgcacctgtagtcctagctatttgggaggctgaggtgggaggactgctttagcccagttcaaagcgtgcagtgagttatgactgcaccattgaactccagcctgggcaacagagtgaaaccctgtctaaaatttaaaaaatgtattgaggaccccaaagagtttttgttgatgtgtatgatttctatcaatatttactgtaatggaaatcaaaactgagaaattttagaaatatttgttgattcatttaaaagtagctgggtgcagtggtgtaaacctgtaatcctagctacttgggaggctggggtggaagtatcgcttgagtttgagaccagcctgggcagcgcaacaagacccccatctctaaaaataactaataataataataataataataataataaattaattttgtgttggccaggcgtggtggctcatgcctgtaatcccagcactttgggaggccaaggcgggtggatcatgaggtcaggagatcgagagcagcctggctaacatggtgaaacaccgtcactactaaaatatgaaaaattagcccggtgtggcggcacatgcctgtagtcccagctactcgggaggctgaggcaggagaattgcttgaacccgggaggcggaggttgcagcgagccaagattgcgccattgcactccaggctgggcgacagagcgagattccatctcaaaaaaataaaaaaataaaaaattaattgaatgttaatgtaagttatatcttttacatgaaaataaccatgttttccaaaataaaaaaaaatttttttgaggcagggtctcagtctgttgtccaggctggggtgccaggggtataattaagactcactgcagcctccacctgctaggctcaagtgatcctcccacctcaacctcccaagcagctgagaacgtaggcacgcgccaccaagcacagctcattttaacattttttgtagagataggggtcttcctaagttgcccaggctggttttttttttttttgagatggagtttcactcttgttgctcaggctggagtgcaatggcatgatcttggctcattgcagcctccacctcctgggttcaagtgattctcctgccttagcctcccaagtagctgggattacaggcgtgtgccaccacgcccagctaatttttgtatttttagtagagatgggtttctccgtgttggtcaggctggtcttgaattcctgacctcaggtgatccaccgcctcagtctcccaaagtgctgggattacaggcatgagccactgctcccggccctccaggctggtcttgaactcctgggcttaagccattctcccaccttgacctcccaaagtcctggaattacagggatgtaccaccatgcacagcctgaaacaaaaacttagtgagaggaagggcattgttttaatttttgcaaatcactttcacgtcaggcttaacagaagacagctgggtcctcacgtgtgtgtctgcatttggtctgttgcaatatcatggaaactgcactggctgatatggtgaaaccccgtttctactaaaaatacaaaaaaattagccgggcatggtggtgcatgactatagtctcagctacttgggaggctgaggcgggagaatcgcttgaacacgggaggtggaggttgcagtaagccaagatcgtgccactgcactccagcctggggaaggctgagaccccaccccccaactaagtattattattatggtgtatcatatattatgtcaatattattatggtaatttttttttgagacgaggtcttgctctgttgcccaggctggagtgcagtggcccaatctcagctcactgcaaacttcatctcccaattctcccacctcggcctcccaagtagctggaatcacaggcacccaccaccatgccctgctaattttttgtatttttagtagagttggggttttgccatgtttgccaggctggtctcaaactcctgacctcacgtgatccgcctgatgcctcagcctcccaaagkgctgggattacaggcatgagccaccgcgccccgcttatgataataattttgtatttgtagacccccaaaggggtgctggggaaccccctaaggttctttgggctgcaggctgagactcactccctagcttttggttccacaggacccagatgtatgtatgctggaaaccgaacacctttggagccaaggtgacctaggtttaagagaaagctctgagtgcaagcagtgagatccagtacttttagcccctttgggcctggtgtcttcatctctaacatagggatggcggtgataataataataaaagtacatccctgcagggctgcagcgaggcccacaggagataaggctcagaatcatgcgtgccggtcacagagcatgcaatcaacatttgctattataacgggaaatgtcattttattttatcaccrgcaccttttattcatgcagttaatttatcccaaggcctgtcctgtgctgggcagcgctggggacaaggcgatgactgagatggccttgaccctgcccttatggggctcccagttcagtgggtcacggagtttttatttgaggaattgctccggctggacgcggtggctcatgcctgtaatcccatcactttgggaggccgaggcgggtggatcacctgaggtcaggagttcgaaaccagcctggccaacatggtgaaaccccatctctactaaaaataaaaaattagctggktgtggtggcatgcgcctgtagtcccagctactcaggaggctgaggcaggagaatcacttgaacctgggaggcggaagttgcagtgaatcgtgatcatgccactgcactacagcctgggtgacagagcgagactctgtctcaaataataataatgataataataaaaataaaggaattgccctgggcaccaggtcctggaggtacatgagttctcaaggctgagaaggcaaggaagaacattctagggaatgggaacagtatgcaagaaatcgtgacaagtggagaatggcatgtgctctggaatggcaactacccagggtccctgagtccattcctttgcctccagaacatcccagttctcttgctggtgagaaacaagtgtgtatatctggttcacctcccctctttccgcctttctcattttgtataaataggtcctccattctgtctttatttttctttccttctttctttctttttttgagatggagtttcgctgtttttgcccagactggagtgcagtggcgcgatcttggctcactacaacctctgtctcccaggttcaagcgattctcctgcctcagcctcccgagtagctgggattataggcatgagccaccacgcctggctaattttgtgtttttagtagagatgaggtttcatcatgctggccaggctggtctcaatctcctgacctcaggtgatctgccctcctcggcttctcaaagtgctgagattacaggcgggagccaccgcgcccggcccagttctggggttttttgtgtgtgtggaagtcccacttctgatccaacctcagtctctcatgctgcagatctttcctttgctgtacatccatccacagcctctccagcggagacttgggatgtcccaccaaaaaaggtgcccgggaggacgcggagtaggggctaggcgcctccactgccccccatccgggggcctccgcttggggccgggtgagtcagcccccggcggctcccgcgtcatcccggccgctccgctccgcgctatttcgggctccgggcgctataaatagaggctcgccgagccgagccgcccccctccactcgggcccccctgcgtccccggccccgccgcgatcgccgggccgcgcgtcaccgcggctaagtttagaggcgggcggggacgccagcctggtcactgcgccccccggcggtgcccgcttccagagccttcggccgggctgctctccgccccccgttcaggtcccctttggcggaattgtcggtgagggtcccgtccttacagtctccgtccccaccccacccgttccggggcgaacaaagggctcgaagttgagaggaggggaaggtttgggatgggagcaggggccgtagctggggagtggcccaaactggagttgcggctgaattctggaacttggggcgtttggaagaaagaggcggaatcggagcttggatacggctgggggattcgaacgcgcaactctgggagccggggagattcgaatccgggattccaaagtttagttttgaaacagcttaggctgggagcagtggctcactacagtaatcccgacactttgggagggcgagaagggaggatcgcttgagcccaggagttcgagaccagcctgggctatagtgagaccccacccccccacccccacgcctytacaaaaaaaatacaaaagttggccaggcgtggtggcgcgcgcctgtggtccagctactcggtaagctgatgtgggaggatcatctgagcccgggaggttgaggctgcagtgaggtgtgatcgcaccaccgcactctagtctgggtgacagagagagactccgtctcaaaaaaaaaaaaaaaaaagaaagaaagaaagaaaaagaaaaaaagaaaagaaactgagggtagaaatccaacatccaacttgccaacttggaaataacgtagaacccagggcaattttttcccctcgctcttaactaaygttaaccgattcagaattccactgatcgcaggcggcgggccctttaccgcacttctgcttcaaggaaatgaatcgggagcggggaatgggccgccttctagggggtcctgcccccgctgggttctggcggagcagagaggccccggctccccaacacttccaatcctcttgtggtgcaccatcgcccccttgcagaaaacgcaggagttgcagggttaagtctggcaattccattccccaaggggataaytgagtcacaagcccttctacttgggatgacctacttctagaatcgctgtatggtcttggatacagaggcatatttcattttttctttttttcgttttttgagacggagtctcgctctgtcgcccaggctagagtgcagtggtgtaatctcggctcactgcaacctccgcctcctgggttcaagcaattctccgtctcagcctcccgagtagctgggattacaggcgtccgccaccacgcccggctaattttttttttgtattttttagtagagacaaggtttcatcatcttggccaggctggttttgaactcctgacctcgtgatccaccttccatcggcctcccaaagtgccgagattacaggcgtgagccactgtgcccggcctcctgggggaaaattatacctagtgatgagactattagactgattctccttccttcctactaggcgtgagccacctctcctggcccctatatcttctaacattgcaagaaacaatactaagaacctaggattctggatttcctttttctttcctttcttttctttcgtttttttgtttgtttgtttgttttgttttgtttgtttttggtctcactctgtcacccaggctggagtgcagtggcacaatcgcagctcactgcagcctctgcctcctgggctcaagcaattctccctcctcagcctcctgagtatctgggactacaggtgcacaccaacacacatagctttttttttttttttttttttttagatggagtttcgcttttgtcgcccaggctggagtacaattgcgtgatcttggctcactacaacttccacctcccgggttcaagtgattctcctgcctcagctttccaaagtgctgggattacaggcatgagctaccttgcccagccaatttttgtgtttttttgtagagatggggttttgtcatgttgccctggctggtcttgaactctggagcccaagcaatctgcccaccttggcctcctaaattgttgggattataggcatgagccaccgcacccagcctagaattctggatttcaattgttagggtgaaaagaaaaaggcatttgaggtaagcaaggttcaggacaataaatctgggcaatagatcaagaccttgtctcaaaaaaaattttttttttttttttgagatggagtttcactcttgttgcccaggctggagtgcaatggtgcgatctcagctcaccgcaacctttgcctccagggttcaagcaattctcctgcctcagcctcctgagtagctgggattacaggcatgtgccaccatgcccggctaatttttttttttttttttttttttgagacagagtctggctctgtcacccaggctggagtccagtggcacaatctcggctcactgcagcctccgcctcccaggttcaagcgattcttctgcctcagcctcctgagtagctgggactacaggtgtgcgctaccacgcccaactaattttagtatttttagtaaagacggggtttcaccatattggccaggctggtcttgaactcctgacctcgtgatccgcctgtctcggcctcccaaagtgctgggattacaggtgtgagccactgcaccgggactctaattttgtatttttaatagagataggatttctccatgttggtcaggctggtctcgaactcctgacctcaggtgatccacccgcctaggcctcccaaagtgctaggattacagacattagccaccatgcccagaaaaaaaaaattaagtaaaatgggaaaatgtagacacagatagacacccatagatgaaagactgatgtgaacaaagaaacagagggatgtcatgtacatgcaggcaagaataaataaaaagatcaatgaacataacagaaatgtcagaaatagacgtgtgtgtatgggaatttggtatgtgataaaggtagaatttcagaacagtggagaaaagatctacctttggtcaacttgagacaattggttacatcactcataaacaacgacctcggtgcactttcaaaaataaatcttggccaggcaccgtggctcrtgcttgtaatcccagcactttgggaggctgaggtgggcagatcacttgaggtcaagagttcgagaccagcagggccaacatggtgaaactccgtctctactaaaaatacaaaagttagcctgtaatcccagctacttgggaggctgaggcaggagaactgcttgaatgtgggtggcggaggttgcagtgagcctagattgctccaytgcactccagcctaggcaacaagagcaaaactccatctcaaaaaataataaataaataaataaatcttacatagattaaagccagatgacctgctcattctaggtcattactgtttgggaccgtgtctgtgtccctcactgaactgtaagctctgggaggacaacacggggcttttatcttttacgtagataaaagaaatgatagaatatatcattatagccgtgcactgtaatcccagcactttgggaggtcacaaagtgacctcaggatcagctgaggtcaggagtttgagaccagcctggccaacatggtgaaaccccgtctctactaaaaatacaaaaaaaaaaaaaaaaaaaaaaaattagccgggcatggtggcacatgcctgtaatcccagctactaaggaggcaggagaatcgcttgaacccgggagggggaggtgcagtgaactgagatcgcgccattgcactccagcctgggtaataagagcgaaactccgtctcgaaaaaaaaaaaaaaaagaaaaaaaagaatttatcattatgaccctgggttatggcagggctcttaacacaccaaaagcaaaagtcagaacggaacagattgataaatagttgcgcataaacacaaataacttctgtgccaaaaataactaaagttaaagcccaaagtagaaactaggaggaaatgtttgcaatatgggtaactaaggattagaatcagaatccataaagtacccctagaaattaatagtaataaaaaagccatacaacccattttaaaaatggacaaggaatatgagcaagcaattcacagaagacaaaatttacaagaccaatactttcacaaaaaacattccatttccttagtaatcagagagctgcaagttagaacagtgtgatactatcctttcaggaagtgactaatactaactcatcagccaggcccctgctcagatgtcccttcctccaggaagcccttccggactccggggctgagtcaggcgctccccctgacccccatcccacggctctcccgggatctcccatcccagacctgcccattctgggtcagcactgggaacgtgtctgygtcccttactgaaccgtaagctccgggaggacaacacggggctgtcgttggtcactgctgtgtcaccagcacggactcgcacaggaccgggaagagaggaagcgcgtggggggaataggtgtggaataaatgaatgaatgaggaaactgaagccaagtcaatgtctgagttggattcaaacttaagtctctccttactgagaggagggaccaagttggatctcctgcgatctgttctccactgagccctgccaggattctgggcacacagaagcgctcagtaagggctttgaaacttaacagtttgggagccagatcctcaggccacatctctctcctcccacgacctccgcggtcctccagaaccatagagagttgtacagagatcgccctgctctatgctctactctcctggggagcggggccagagaggccggaagtgctgcgagccctgggccacgctggccgtgctggcagtgggccgcctcgatccctctgcagtctttcccttgaggctccaagaccagcaggtgaggcctcgcggcgctgaaaccgtgaggcccggaccacaggtgcgggaggcggagactgcgggtggagattggcgccgcggaagccaatcattgccgagtctgagagatggacaaggccaggcgtggggagggcgtccagatgctagcctcgggggccggackaacggaaggcgggggatggtggggacggagccaatagaatccggtgggggcgaggggcggagcgatgggacttgtggacctgtaaggggcggggcgagccgaaggtggaggtcaaaggggcgtggcgttacagagcctctrgcgctgggtgttggggacctgacgctatggagctctcggagttttgtgggggacggctgtgagtggggggttcctgctgcgggatgagaacgtagacgccagtggctcactcgctcctggcaccttccctttcaggctccagatggaccctgggaaggacaaagagggggtgccccagccctcagggccgccagcaaggaagaaatttgtgatacccctcgacgaggatgaggtccctcctggagtggtaggacaaggagatgcggggcccctgggaggctgggggctgttaggacgaagaggataggatggggcctgtgggaccagggtgtgggttagtggatttgggggccacggacgacttggggaaacagtccttggtcctccccaggtcccagtttccccatctgtgaaatggatgggtggttctaagagagggctaaggcagaggccagacactggcattcagcaggtagcccctgatgtgttttacgaggccagcaccctgatttttcaagacatgaatttattgctcgtgtttaagaatcgccaggttttgcaatcttaaaaaaatctacactttagacatattttggtaaatggaaggacctggcaatattgaaatctccttcccaagggaaaacaatcgacgggtgatgagcattggctatgaagaaaaggaaagtgggctaaggatgtagggcatgatgggggagaggaccttcctactctatttatttatttatttatttatttttttgagacagagtctcgctcttttgcccaggctggagtgcactggcaccatctcggctcactgcaacctctgcctcctgggttcaagcgattctcctgcctcagcctcccgagtaactgggattacaggagcgcgcctggctaatttttgtatttttagtagagacgggtttcaccatgttggtcaggctggtctcgaacctcaagtgatccgcccacctcggcctcccaaagtgctgggatgtacaggcatgagccaccatgcctggccccttcctactttagataggaaggtcaagggagggcctctctgaggaggtgacatcttggtagagacgtgaaagaggtgagggagtgagccatggcgacatctggggtagagggaacagccagtgccaaagccctgaggtcagagagagcctgccgtgttcaagggcagaacgaagtctggtggggctggagtagagaaagcaaggagaagtggtagaaggtgtagtttctgaggcaaggagcagggacagatctagagccttgtgggtgatggtgacagctttggctttcactctgaggcaggagccacccaccagctctgagcagaggagggacatgaggacttagttaggggacagacttccagggggcgagggtgtgggcaaggagctggtgaggaagtgacttcagtggtccaagggtgaaacgctggtggctgggaccagagtggaggctgaggagtgggggagaagtggctgaattcagattttgagctctcagccttctggaagggacattaggaggaaggaggatgggcagccctgaagaggggagaggggtcaagtgctgtggctcacacctgtaatcccaggactttgggaggccgaggcgggcggatcacctgaggtcaggagttcgagatcagcctggacaacatgttgaaaccctgtctctactaaaaatacaaaaattagccagcgtggtggtacacgcctgtagtcccagctatttgggaggctgagacaggagaatcgcttgaacctggggggcggaggttgcagtgagccgagatcacgccactgcactccagcctgggtgacagagcaagactccatctcaaaaaaaaaaaaaaaaaattagctgggcgtggtggtgggcacctgtaatcccagctacttgggaagctgaggcagaattgcttgaacccgggaggtggaggttgcaatgagccaagatagtgccactacactccagtctgggtgacagagcaagactgtctcaaaaaaagaaaaagaaaggggagaggaactcacagggcctcagatgtcctctgctcaccccaaccagtcccctgcaaactccctttctccccacaggccaagcccttattccgatctacacagagccttcccactgtggacacctcggcccaggcggcccctcagacctacgccgaatatgccatctcacagcctctggaaggggctggggccacgtgccmcacagggtcagagcccctggcaggagagacgcccaaccaggccctgaaacccggggcaaaatccaacagcatcattgtgagccctcggcaggtgaggagggagacggagaagtgaggccttgaggttttcagtgggaaacgctgttctagggatgactccagtgsaaggaggtctgagttccagccactttgttctccccattcattcattcattcattcattcattcgacagcagtgtgtgggttgagagtgccccagctctacttgctggggctgtggctgtattggtgtagctctgtttcctcaccccaggtttgttaatttattcaaaatgtactgaatgaggctgggtgtggtggctcacacctgtaatcccagcactttggagaggctgaggcaggtggatcacctgaggtcaggagttcgagaccagtctggcsaatatggtgacaccccatctctactaaaaacacaaaaagttgctgggcgtgagggcaggaagtgttcaggaccacaggacacgcagactggggctggagggagagggctgagctggagacagaccckgggaccctttaggaaaggcctggtgccagtgggcatggaggggaggagcctggatcagaggatcagggactgtccagggttaggaggagagagaagctggaaaagaccctgccacaggtgggaggagggaggaggtgtgggaakaggtgcgaggaggcaggaggtgtgggaagaggtgggaggagggaggaggtgcaagaagaggtggaggagggccctgtggttatcaagggtcatccctattgatggcttctgcccttcgtccctccccagaggggcaatcccgtactgaagttcgtgcgcaaygtgccctgggaatttggcgacgtaattcccgactatgtgctgggccagagcacctgtgccctgttcctcaggtgagctctgcggcgccaccccagacttcaggaagggcaccccactggcctgggagggtcatgtcccagtgttctggactgttctrtgagaagcctctgggcatggtcctgcaggttctgggccttggtgggaccctgtgttggaggcagggggtcttggcctggaggtgcccagtgcaacaagagctggagcccgaactcctgggtctcaggaaggaggggctgggggccggactcctgggtccgggggaggaggggctgagggctggactcctggggatctgagggaggaggggctggggcctagactcctgggtctgaggcaggaggggctgggggcctggactcctggggtctcagggaggaggggctgggggcctggactcctggggtctcagggaggaggggctgggggcctggactcctgggtctaagggaggaggggctggggccagattcctgggtctaagggaggaggggctgggcccagactcctggatctgacggaggagggactgggtcactcatgtcccagacatccttgactggagttgatgagaagcaggatttctcccatctctaccctagttaaacaactttcccctccaacctaggggcccctctgcagacagggccagacagaggaagtgaaacctctgagttcctgtgctccctgcaggctgtgacagctgcagactgctgggcagagccagtcctagttccctgggtcatgaagccctcacygtagccctccaaggccagagcagatggtttggcagtgggccctgcttcccaccgcgagccatgcartgtccccgtgcccacactctctagggcccctggcacctgttctccccttgaagcccaagtctcttcccctcttcatgaagaagccaggggtctggtcttctaggtaagcacagccatgtggccctggctgccaatccctgcggagcatcttcttggaagagtgacctggggcaagtgacttaccctctgtgggcctcaggaccctctgtcccccatgccgtactctgagcccttagtattccagtgagagggaaaagggctttgggggtcttgaagagactgagacctctcaactcccgctccctgcccccaccagcctccgctaccacaacctgcacccagactacatccatgggcggctgcagagcctggggaagaacttcgccttgcgggtcctgcttgtccaggtggatgtggtaagcaggggctgctccctagccagcctcacngggctttgaggttgtgcagtgggctgttgaatcccttccaagaggaaatgcagctaaaacctcagcgaggaacgtttttcacatctgagatgacatgggtcaccaagacattatgttggcaaggagaggggagggcaaaattgtctatttcctctttccccacatccccttcaattagtcccagatctctgccacctaaatatctcttctttttgttttgtgtttgtttgtttgtttgtttgagacggagtttcgctcttgttgcccaggctggagtgcaatgacttgatcttggctcactgcagccttcacctctggggttcaagcgattctcctgcctcagccttctgagtagctgggattataggcatgcaccaccacgcccggctgatttttgtatttttagtagagactggttttcaccatgttggccaggctggtcttgaactcctgacctcaggtgatccacccacctcagcctcccaaaggctgggattacaggcatgagccaccgtgcctggccatatctctctcttttatttttttaagacggagtctcctctgtcgcccaggctggagtgcaatggccagatcttagcccactgcaacctctgcctcctgggttcaaacgattctcctgcctcagcctctcgagcaactgggatgacaccatgccttgctaatttttattgattgattgattgattgattgttttgagacagagtctcgctctttcgcccagactggagtgtagtggtgcaatcttggctcactgcaacctccacctcctggattcaggtgattctcctgactcagcctcctgaatagctgggattacaggtgcgtaccaccatgaccggctaattttttgtatttttagtagagatgcggtttcaccatgttggtcaggctggtcttgaacttctgatctcaggtgatcctaaagtgttgggattacaggtgtgagccacccccaccaggtgatttttttttttaatttttagagacagggtcttgctatgttacccagtctggtcttgaactcctggcctcaagcattcctcttccattgggttgggtgcagtggctcatgcctgtaatcctagctctttgagaggctgaggcaggaggatcacttgaggccaagagttcgagactagtctgggcaacatagtgaagacccccatctctacaaaatacaaaaaatatggtggtgggcacctatagtcccagctactcaggaggctgaggcaggagaattgcttgaacccgggaggtggaggttgcaatgagccaagatcatgtcactgcactccagcctgggcaacagagcgagactccgtctgaaaaaaattaaaaagatcataaaactcacatggctcctaagcaccctaggagaaagttctgctcccttccatgacctatggggccctgtgtgacctccaacctctacccagttctccaggcccgtctctaagattccatgctcctcatggaatttcacatcctctctcccgtagggagcgaattataattcctcaagccctctttcccctcccatcctttgcccatgctgttctttatgtctggaattcccttttctggtctccttttcatcctttcctcctcctcatcctcctttgggtctcagctctaatgtcccctcctccaagaagccctccctgatcccccaggcaggctcagtccctcctctggctcccacatcgcagccctggccactccagatcatcagtgtctggggacaggtctgtcctgctcatcagactgtgagccctgggagggcagagtcagggctgtctcagccactgctgggtcctagcactgcttagcacgggccaggcacccagtaggagcttagagagtgacaattgggtgagaggctcttggcatcctgagctactgtgttttcaggctttaattctttttttgttcttctttttttttttgagacagagtctcaccctgtcgcccaggttggagtgcagtggcgcgatcttggctcactgcaacgtctgcctcccgggttcaagcagttcycccacctcagcttccctagtagctgggattacaggcacctgccaccacgcctggctaatttttgtaattcctggcttctaggtttctaattctgattttctcctccagaaagatccccagcaggccctcaaggagctggctaagatgtgtatcctggccgactgcacattgatcctcgcctggaggtgagatgagggcttccctgcctcattcaggctccacctgggattggtccctgctcccccatcccaccctgcccagcccttcccttctccttcctgtgtgggcctggtgcaggcactgcctctctctggccttcagtttcctcatctgtaaaacaaggtcttaatttttttttttttttttttgatacagagcctcactctgtcccctaggctgaagtgcagtggcacgatctcggctctgccttgggggttcaagcaattctgcctcagcctcccaagtagctgggattacaggtgtgcaccaccacgcccagctaatttttttgtatttttagtagggacgggttttgccatgttggccaggctggtcttgaaatcctgacctcaggtgatcctcccgccttaccctcccaaagtgctgggattacaggcgtgagccactgtgcccggttggaagctgaacatttcatgaggttggcttcttgctgcagcgggaaaataagcagtgtttctggttttcctcctgtcaaacccagtacaaacactttgtgtgctgacttcccttccaaaatagctaacatttcttcagcagtgccaggcgtggcttttggcacttacagagcattccagagtattctctgatcttcaaagtcataccatcctccccactttattattatttttttgagacagggtcttgctcttttgctgaggctggagtgcagtggtgctatcacaggttactgaagcctcaacttgacaggctcaggcagtcctcctgcctcagcctcccgagcagctgagactaaaggcacgcgccaccacacctggctaatttttaattttttgtggagacaacaccttgctatgttgtcccggctggtcttgaactcctgagctcaagtgatcctcctgcctcagcctcccaaagtgctgggattacaagcatgagccactatgcctgaccaccccactttacagtgaggaaacaggcccagagagcaaaccactggcccagggttacccagggagaagtggggttgggctcccaagagctggcctgtagccagaaaagatatcaagatgcgcccagcagtggttactaccaggttgtatttggcgggggatgggctggaattttgatttttagcaaccacaattgtttttttttttttttttttttttgagacggagtctggctctgtcgcccaggctggagtgcagtggcgygatctcggctcattgcaaactccacctcccgggttcacgccattctcatgcctcagcctcctgaaaagctgggactacaggcgcccgctaccacgcccggctaattttttgtatttttagtagagatggggtttcaccatgttagtcgggatggtctcgatctcctgacctggtgatctgctcacctcagcctcccaaagtgctgggattataggcgtgagccaccacacccggcctttttttttttttttttctgaaatggagtttcactcttgttgcccaagcgggagtgcaatggcgtgatcttggctcactgcaacctccgcctcccgggttcaggcgattctcctgcctcagcctcctgagtagctgggactacaggcacgcgccaccaagcccagctacttttttgtatttttagtagaaacgaggtttcaccatgttggccaggctggtctcgaactcctgacctcagatgatctgcctgcctcatcatcccaaagtgctgggattacaggcgtgagccaccgcgcccggcctagtattggcaattcttatgactgaccataatgaagcaaatctataatctgatayctcacctccyggctgccctgtatcctgttatcccagccccgaggaagctgggcggtacctggagacctacaaggcctatgagcagaaaccagcggacctcctgatggagaagctagagcaggacttcgtctcccgggtgaggccacctcacctcccatccctgcctgggcctccccgcagctcctgggtggttgagcttcagttccaattttaaggcactgtccattcatccctgggcctcgtctttcctggcccatcccaccgaaactgcagctagaggggttttcctgagcacaaatctgctgctaccctccctagctcaaaatcctcccatggctccccagtaccccgagagaaagcccagacttctcaccaggctcaacaagggcccgtcaggctcagaagccccgtggcctccacttcacacttcacttctcccaggcctagctcgcttctccaagcacttgccccttctgttccctctgcccaattacctgcctaattccttttttttttttttgagatggagtctcactctcttgcccaggctggagtgcaatgacatgatctcggctcactgcaacctctgcctcccaggttcaagtgattctcctgcctgagcctcctgagtagctgggactacaggtgcccacaaccatgcctgtctaatktttgtattttttagtaaagatggggtttcagtgtgttggccaggctggtcttgaactcctggcctcaggtgatcctcccgcctcggcctcgaaagtgctgggattattaggcatgagccaccacgcccagcctgagatgactttttaatcagttgggaaaaaaagcgtttattgagtgcttcctgcacgccaggcagtctggggacacagctgtgacccagccctgccctcctaggctcagtcttgctggcctttcttcttccgacacactcctgcctccaccctttccaggtgactgaatgtctgaccaccgtgaagtcagtcaacaaaacggacagtcagaccctcctgaccacatttggagtaaggaatggctcccctgccccataggcatttctgtccccttgccttttttagaaagcctgtcacccatttccttccatctccctgcccaccccttgcccgtcctgccttcccacaggccctcatctcccctggggaatatctgaggcccctcctcagctgggacaggggaggcttttgtgctcaactgccctgacccctcgctttcacctttcagtctctggaacagctcatcgccgcatcaagagaagatctggccttatgcccaggcctgggccctcagaaagtaagagctctgggaaagaacccaaggagttrggggaaggagagagccccaaataaacacaacctgagaccccaaagttttaaggtgaaaaaagaaccaaagaccagacacagtggcttccgcctgtaatcccaacattttgggaggccaaggcgggaggactgcttgaggccagaagttggagaccagcctgggcaagtggacacctcatttttactaaaaataaaaaaaactagctgggcatggtggtgtgagcttgctacgtgcctgtagtctcagctactggggagactgaggtgggaggatcgcttgagcccaggaggttgaggctgcagtgagctataagcrtgttactacgctccagcctgggtgacagagcgatcctgtctcaaagcagaagcaatccaatgaggaagaatgaaactagatagctatctctcgccatatacaaaaatcaaattaaaatggattacagacttaaatctaagacctcaatgcatgaaacgtctacaagaaaacattgagaagctctccaggacattgaactgggcagagatttcttgagtaatgccctataagcataggaaactaaagcaaaatggacaaatgggatcacatcaaattaaaaagcttctaagccaggtgcggtggcttgggcctgtaatcccagcactttgagaggctgaggcggctggatcacctgaggtcaggagtttgggaccagcctggccaacatggagacaccccatctttactaaaaatacaaaaaagtagccaggtatggtggcacatgcctgtaatcccagctacttggaaggctgaggcaggacaatcgtttgaacccgggaggtggaggttgcagtgagccaagatagcgccattgcactccagcctggacaataagagtgaaactctatctcaaaaattaaaaaaaaaaaaaagaataaaaggcttctgcacagcaaacattccacaaagtgaagagacaacacacaggatgggagaaaatatctgcaaactaaccatctgacaaggaatcaataatcagaagataagagttctaacaactctataggataaaatataataatccaatcaaaaagtgggcaaaatatttgaattaacatttctcaaaagacatacaaatggcaagcaggcatatgaaaaggtgctcagcatcattgatcatcagaaaaatgcaaatcaaaactacagtgaggctgggtgcagtggctcatgcctgtaatcccagcactttgggaggccgaggcgggcagatcacttgaggccaggagttcaagatcagcctggccaacatggcgaaaccccatctctactaaaaatataaaaattagttgggtgtggtggcgcatgcttgtaatcccagctacttgagtggctgaggcaggagaatctcttgaacccgggagacggaggttgcagtgagctgaaatcacaccactgccctccagcctggacaacagaagcaaaactccatctcaaaaaaaaccaaaaataggccgggcatggtggctcacgcctgtaatcccaacactttgggaggccgaggcgggtggatcgtgaggtcaggagattgagaccatcatggctaacatggtgaaaccccgtctctactaaaaatacaaaaaaaaattagctgggtgtggtggtgggcacctgtagtcccagctactcgggaggctgaggcaggagaatggcatgaacctgggaggcagagcttgcagtgagccgagatcataccactgcactccagcctgggtgacagagtgagactccatctcaaaaaagaaaaccaaaaaccaaaaataaactataatgagataccatctcagctctattaaaatggcttattattattttttgagatggagtctcactctgttgcccaggctggagtgcaatggcatgatctcagctcactgcaacctccgtctcctggatccaagcgattctcctgcctcagcctcctgagtagatgggattacaggcactcgctaccatgcccagctagtttttgtatttttagtagagatggggtttccctaggttggtcaggctggtcttgaactcctgacctctggtgatccacccacctcggtctcccaaagtgccgggattacaggtgtgagccatggtgcccggccttaaaatggcttttatccaaaggacaggcaataacaaatggtggacaggcaataacaaatggtggcgaggatgtgaagaaaagggaaccctcatatacttttgatgggaatgtaaatcagtacaaccactatggaaaacagtttggaggctcctctaaaaactgaaaagttgaggttccacatgatccagcaatcccactgctgggtatatccccaaaaaaaggaaatcagtgtatggaacaggtatctgcactcctgtttgttgcagcacagttcacattgccaaaacttagaaccaacctgtgtccatcagcagatgaccaggcaaagaaaatgtggtacttacacacaatggatactcttcagccataaaaaagaatgagatcctggctgggcgcggtggctcacacctctaatcccagcactttgggaggccgaggcgggcagatcacttgaggccagaagttcaagaccagcctggccaacgtggtgaaaccttgtctctactaaaaatgaaaaaatgagctgggtgtggtggcgcgtgcctgtaatcacaactacttgggaggctgaggcaggagaatcgcttgaatccgggaggcggaggttgcagtgagccaagattgtgccactgcactccagcctgggcgacagagcgagacccttttcaaaacaaaacaaaacaaaacaaaaaaaacatgagatcctgtcaattacaacataatgaactggggattattatgttaagtgaaataagccaggcacagaaagacaaacattgcatgttcttatttatttgtgtatctaaaaatcaaaacaattgaactcatggagataagagtggatggatagttcctggaggctggggagggtagttaggggctggcagggagatggggaaggttaatgggtaccacacacacacacacacacacacacacacacaaagaaagaatgaataagacatactatttgataacacaaccaggtgactatagtcaataataatggtacattttaaaataacttggcagggtgcggtggctcacacctgttatcctagcastttgggaggtcaaggcaggtggatcacgaggtcaggagttcgagaccagcctggccaatatggtgaaacccctgtctctactaaaaatacaaaaattagccgggtatagtggtgggcacctttaggcccagctactcgggaggctgaggcaggagaatcgttggaacccaggaggcggaggttgcagtgagccaagatcacaccactgcactccagcctgggtgacaccaggagactgtctcaraaawataataataacttagccaggcgcagtggctcacacctataatcccagcactgggaggctgaggcaggcgcatcaggaggtcaggagatcgagaccatcctggctaacgtggtgaaaccccatctctactaaaaaaaaatacaaaaarttagctgggcaggggcctgtagtcccagctactcaggaggctgaggcaggagaatggcgtgaacccgggaggcggagcttgcagtgagccgagattgcgccactgcactccaacctgggcgacagagcgagactccatctcaaaaaaaaaaaaaawaataataataataataacttaaaaagattgtaactggattgtttgtaactcaatggataratgcttsagggtataggggaaaataaagaaccaaaaccccactctagatttacccaggaaacagctcctttaatgactggttcctcatttttttctccctcccatccaggcccggaggctgtttgatgtcctgcacgagcccttcttgaaagtaccctgatgaccccagctgccaaggaaacccccagtgtaataataaatcgtcctcccaggccaggctcctgctggctgsgctggtgcagtctctggggagggattctgggggtgtcaccttctggtggcccaggtgggcaccttcagctttctttagttcctcagtttcccgggggcagactacacaggctgctgctgctgctkcttccgcttcttgtcccggcctgtgggagcctcctccccagactctgaattcagtggcrgccctggcatctcctcttggggcactgtctctggcatccggctttcctgactctgcttcttcctcttcttggtggatcccggagttgccctggcttcaggctgtccctcccctggcagttcaggctctagtggctgaattggctcagtcactgtgtgacctctctctttcttcttcttcttcttcttggtggakgtgggagctgcctgaggctcaaggtcatccggcagctcaggccccaccacctctgtctctggctccactgtggcatyttgctgtttttctttcttcgtcttctttttgggagctgccagagctgcctgggcctgaggctycgctccttctggctgttgaggcgccatggtcccccctggggactccagaggcttcatctccggctccactggctccatcgcctccgtccctggctccatcattgccatctgtcccttttcttttttcctcttcttcgtagggggcagagggatggcttcctccagtggctccaccttcacctgtggctgagactcaactgtcaccccctcctctggctccatcccttccgtccccttttgcctctttctctttttggtcggggacaggactgtgtcttctagaggctcagtgttaatctgttcctgcttcactgtcttgtcttctggctcgaaggtttctttccctttgggcttcttcctcttcttggtggtggacgggaacagcactcccagaggctccagtgtctccactgtgggctctgtccccacaggccctgctgcctctggttctttcagctgctgattttttttcttcttcttcttccgcacatccatttctggcgaccccaaagccatgtccacctccagggccccgtgcccattcactgcctcctgagtgactggggcctctgtcacctgcatctcctttttcttcttccctgaggtgagcaggttgggggccaaggctgacctaggccctgtgactggtgggttgcccccaaaggcacagaaccgaggcctcaggccaggagggatctgtggtgggggacttgctgggatgggctgcagagggctccctgacagggattgctggggaccctcaaggatccttagggtgccctggggggctgaggcacaggtgagtccacctcctgcctccgttgagggggccagcagggtcgcttctccagcttggggacagctgctgaggactcgatagcggtgccgcttgcctgccaatttgcccttgacgatctgggagccagagagaggcacatgccgcccattgaagctacagagagaaacagggagggcagaggcttaagtggaacaggagagggaaggttttttgwttttttttttgtttttttttgagagagtcttgctctgttgcctaggctggagtgcagtggcatgatctcggctcactgcaatgtccacctcctgggttcaagcgattctcctgcctcagcctctcaagtagctgggattacaggcacctgccaccacgcccagccaatttttgtatttttagtagagacaatttcactatgttggccaggctggtcttgaactcctgacctcaagtgatctgctcgcctcggcctcccaaaggatgggattacaggcaccagccactgcgcctggctggcctctggtttttaataaaacatgactagagtgactccatcttaaagtgagtagctaggcacttacaaggttcatgcttatggcctgaaaataaccacatcccaggctgaccaccaattataattacagaatatttatggccatacagaacatgttccaccaagcctgcagaatgtccaaatgtcctaagaatgcagcccccattacttaaatataacataaatgagcaagcttaggttgcaggattaatggtcgtggataacaccaatagcccctacctttagtgagcttatctgcacactccaagtttaactatagttccttatagtttcttataagtagaaatactaacaaagggcygtgggtttctccccctgctttctgaggacactctactctgtaaaggagtagtttccaataaacttgtttctttcactgtgctctgtgactcacctctaattctttcctgtgacaaattcaagaacccgctcttggggtctggaccgggaccctcttttccgtcaacaagaccactcaccattctggggcaaagtctgcaggggcctgaataagccacagctccgtatctggacccgtcagcgcctccaaggagaaacgaggggactctgaggctgggggcttcgcggtaaagttggggggacaagagaaccgagcagcatctgcagcagaaggggaaatggggtcgactgacacctccttgccggtccaatcttgcagggcgcgcctatcggtccattggtcttaacctcgtgagcactccagtcccctcaacctggtttctcctttctgcccacctgttccccaggggcgacctcaatttcaccgatccaacccctgggggcgccttgctctccacgggtagccccccacaagataaccctctctccgttcgaattcccgttcgcccactgggaatgcacgctcttcgcaagtcctgcttgcaggtacgcctccttttccgcccgaaccctctcggacgcccctttctccttccaccaacgcaccctccgcaccccgtcaacccgcaccctcaccgccggcctggggctcctccatcctgggacccacacctcaggcaaccctgtagcccgggctgctcgcaccaggttgcagaccacgtggatccaaaggggtagggcatcatccgggagcgcccaactggtgcgggagcgcgggggtaggcattgctcgactcccgatctgcaggaaaaactggggaaaatttcaacgtgtgcagagcagaaaaccgaggaagaagtctttttccgaaaaatgtattcccgaaagccgctgattcgctgtattgctggagtcagaggcccgtcgggtcccgatgggtcgcccccatcgtctgtccaatatggtttgttgcaacgcctccttaaaggggcagccacactgctcttcctaagccttaaagagacaggacggtcgattggtctgaaattcttgaagagacaggtaagaatactagttagtagggctgtgctttctgtgttaaatgtcttctggggaggcccagatgcctcacaagttcagaacttgactgggagaagcgggaaaatggagaaataggggcaatccgtccggagggcgtgaagttccagccaggggcggggcttctggactccgggggagcgggaaacatagggggaggagcttgtggttctcgagggcggagcctcggacccaggagccccacacgcgtggagtggtgctgggcacggtgtagcgtttgtggatcaaatgggacttgtagatgccctcgggggtttagtctcatgcgtgggaaacctcgatgactttcaggaagggacctgatcggcgactcctccctgccccagggagcgtgtaaacagcggcacgtggacacagatttgggggacgcacccacttcccttcccactggggccgccccgcgttgggcggyggttggarccgcgagacggtggctagacagrgtgacccgactgcattcctggccagtgtgtcagcgccacttcccgccccctctgccaagatttaggatcctactccagaattggggcaccccttctccccaggtgggagaggctttccagagcggagggagggtcaaggggaaggggaaatgtttcccctatccaggatctccagacggtttccttcgcgtgggcgagagagacaccggggtgcagcccctgcgggctccaggactacaattcccacaggacccgaggcaaagagtcgcccgagggcggtcgcggaggctgctgggggttgtagtccaaactaagattttgaactcttgctgggacatcctttgaagatccaacccgcgctttttatcgacggggagattcgggctcagagaccctgggggatactgatcaggaaaggggatagtgcgcctgaaggggtggggcaagggctcaggagtcagtctccagccacagcgaggcaggcgtctcggctcttctgtatctccctggcctggtcgctctcggcttctgggcctcgcccttcctgtctgtgaaatggactctgggtgaatccaaatgggatcgtcttgggctacgtcctgtccctccgggactacaagtcccaaggtgctcgaggcgaccttggctccccctccccaccgggacccgcctccctccagcccaagtcacgtcgtctaacctgttcccagctcctgccccgccccgttctccgctccccaagccggagcccgagctggaggaagcccccaggtgccaggatctgcccggatccgtgagtttcaccctcctggggaccagaggccctgaaaaagcccaacacccgcgtccctgggaggattgggaggggactcggacgccaggtcccagggcggaatttggggcgcgccgacacctggatccttagaaggaaactccgttgcctgttttactggagggaaggaaagcgggttcggatgcctgaattcttggaatggagggattctaccccttcatcccggggagacgttggagctggaattcctgagtccctcgaactggggggctctaggaagccgagtctttgggtagtataggggttcgaatccccgagtcttggtcagaaatgagaggctcagactggtggggctcaaggtggaatgggtgaccaccctgccagcctcaagctgctgtctcgaccgatcttctaggtctctgagcagaattaagggtggggcagggatagtggagcctgggttcctgaagtggagcaggacaggtacccggggtccctccggaggctgtgtcccggctctcccccgacttttcggctcggggatgggggcggggtaggagagaaaacaccgaggcagatctccaacctcctctgtgccgctgagcgaacccaacatgtcattaacctgggcgtcagacctgcctaaccagagaagggacatccgccctagggcaccccctggcggaggtgggctcccctattgccttatggggtgggaaacagctgggtttgcagaggtagttctagaacccagggcagaattccggaaagcggctattggattctgggaggtttgcatagccgggcatttaaccattacacggagaggaaggggtaaactgaggcttggagctcacacaggcagtagagtttgtagggtcaggattctgcctcctccttcttctgcagctctctgggggacgggattccatccgcccccgccagattttctgactaaccttctgcctcagggctccttgccctgaccctgaggtgagaaatgtcacctccacgcccatctgtctgacctggggtattgtgggagataagggagggacagaggctaattctggaggtgtctgtctgtccttgaggcggggggagggcaggaccaggcacctccctctgtctatctccccgttctctccacccccatgcgtcctaagaagggggattaaaaacagaatgggggaggcgagcatctgatgagagaggagtgtttcccaatgtctgggcttgaagggcatttgatgataacctgaaatgaaattaaaaataataaccgtggttgccaaaacagggctctgggtgtaccaagctcagagctggtaggtaggtaggtaggaaagctcgcattgtctagaggaatcttgggtgactgagaggtctccctttgaataaggtttgctgaccccagggaaggactcctcattacgagtggagaaacggaggctggagagtggatattgcccacaccctgggcttttgccagcttctgtctggaatcttccagggctctcccagccctcccgtccctaagtgactgagggtgatcactggccagactcaggaatgtacaggggaaatttaggactctgagaggcaagggctcaggaagttgagaccctgggtgtcaaaactcagggcttgtatgatctcagaaagagttgaaagggcccttttaggggaaaaaaaaattacattgagtctggacccctcactctgttgccagaccctgtgttattataatgaacagccaaggacatctggtaattatgaatcctgtatgtgtgaactttatttcgcgcactgcattgttctaatcacggcttataaattatgtcactcaatcctcatacccctttgaggcgaaggtattaattcttcccatggtccacatgaggaaacaggcacagagaagctaaataacaagcccaagtagaggcttagagcaagaaaggccctagcccattccatagacgtccacaaaggaggaaaccgagtcccagagacagtggagcctctccagattcagtgtgacccgacagggctgtaggagtccagcctgggtgttcccagctcagtctggctctctgacc

SEQ ID NO: 94891 - DNA, 15900 bp, Homo sapiens
ttctatttctttccagatcctctctatcctcccacactccctccaactgacccctccgaccggtccctcttagaggctcacccctcacttccgtctccttccaatgcatctcctctcatttacctccaaatagggcagcccctccctccccatagcagggccctcccaggcaggctcctagtggccggcgccagtggatgggggaggggccaggtcgcctgaggcgggggctaagtttaggcacgctggggggagggggcctccccgcagctgttctggcccgtctggcccctgagtgacagcgctgcctggggccgaggctgggggagggggtcctccctgctcctgggccccaaagtgctggctcgaaggagaagggaccccatgctccctctgggtcctccctatactgcccctcggccccctagccccagcctgcagcgctgcggaagcagatcagtaataaaaatgctccggatgtgcaggagataagggcgagtttggaccccgttccgccgacctcagcccccgtccagcccgttccgcaagcccacctttactccccatatcggctccgagtgagaggctggggacaccgctgcttctcggggattttgcccacttcagtagaacccggaggacaggagtagggggggtggggcccctttggacccagccaatggctgtccacagaggtggggacaattccaaaattggaaccgtcttgtaaacagccaaaagcaatgatgtctttaaccattccatagctgttcctggaggcggagcatattttaaagtaaggctgggtcattttacaactggccaatagatgtggtcaggaaaaagagggtttttgtttgttttttcaaatagagatcgagtctccctatgttgcccaggctggtcttgcactcttggcttcaaaggatcctcccgcctcggcctcccaaagtgtttaggattacaggcatgagccactgcgcccggccaaaaagaagagtttttaaaaggcacagagtttacttataaatattctacggccacatctaaataaggagagaactgtattttttcagggatttggcctgtccaaaatcagccactaggaggagcactccagaagagggaggattattttattttatttttattttttgagacggagtctcgctctgtcgcccaggctggagtgcagtggcgcgatcttggctcactgcaacctctgccttccaggttcaagcgattctcctgcctcagcctcccgagtacagacggggtttcaccatgttggccaggctgatctcgaactcctcacctcaagtgatccgcccgcctcggcctcccaaagggctgggattacaggcatgagccaccgcgcccggccggggaaatttttttaaaaagcggagtttatcacgtctagccagatgtgatatcacgtctatctcttcccttttccactatgtactgttcctttgcgaggttggtccctttaattcaaaatcctctcaccttttgccttctgtgggccaatgcagcatcttcatacacgttgcttacctagaaggcgtggctccaccgtkaattctaattggtccgtgctatcgaggcactgtccccttactggctctcgctccagtggcccccactgcttttcttcctcttccagcaatggctcttcgggcccagagttcgaatctcgcgatcgggatggggacggagtaccggcctggggtgtcccagagcccggactgagctggggagtcaagacctcgggcgatgagggctgagcaagtcggagtcgtaggtccagttctgatacggtagagagaggaggccgtgagctttcttcttggaggtgccccaaggagaaaccacccacccctcttggctttggtcccagcacctcggacatctcaccttccccagcttctcctgtctccaatctgttgggttcttggggttcttcgtcttccagcggggtggagctgctggtggaagagtcctccccggatcccgttccccgggccacccagcccagatggtccaaccgaagcctcaggtcttccagagggcgctcggatggaggcgcggtgtcaggatcaccccgtcgtccaggctccggggattggctcaggctggggatgctctccaagctgtcgcccaggctgggctgagggtgctggtctcgtggttccgagactgagcggccctgggggcgggggcggcgggcagttgaatccctgcggcccccggagcccactacaccatcaaaggcgatgtaggagaaggtcagctcccggggggtgccccagtcctgcgacgtggtctcctcctcgtcctcctctgagaattcccgggctgtgtgcagctctcgaaaatcrgagtcgtcgttccctcctgcagtgggtgaaggagagccttgtttccctcagcaggtccctgagctgcccagccctgagccccttcacatgctccccacmacttaccttctgtggaatcaggagttgaggaggctgtagacggagcttcttctgcgagagggaaagaatcgaagactcttagaagcttagactgtccgaatcacagaagtgtcccagtcctggaatcttagaatatttgaatcacgggatttttagaacattctgcacacagactctaaaacctagcatcactgcctgatgaagctcagagtctttgaagtccaaatccaggaatcttaatcttagagtcttcaaagtaggaatcttaggaggtttcaattcattcattcgttcaacaaccacttattgagcacctactatgtgccaggcactgttctaggtcctggggatacagctgtgaagaaaacagacaaaatccctgccctcctagagctgacactctttgggatagacaaacaataaacaagtgaatatatgacgtcgggtgcagatgagcatagggagcaaagtaaagaagggtaggggaagagaaagtgaaggggtgctgtttctcatagggtggtcaagaaggcttctctgataagatgacgtttgagcagagatctgaaggaagtgaggaagccatgcagatgttcagggacgtcttccaggtagagaagaaagccagtgcaaaggccctgagccaggcaccatgcttggcatctgaggaactgagaggtgcgaagatatgactggagaagagtgactgaggaggagaggagtgggaggtgagaacagagaggtaagggcggtggggagagacagacgaggtggtcctccctttgtaatctgaagttaacgacaagatcatagaatgttgggatgatactcgaaaatgctgaaatcaccaattcttagaattttggcatctggacacgcgagacatggaaatggctagatctaagggtgttgaaatccccagctgtcagaacccccatgtgtgggacagagaacggtagacatggactgttatagctgtgagctcagagattgtgaggctaggcgttttcagctgggaatccagccccttagagctagttcagagctttgcacatagatgatgctcaatgcggtttggaaattgaaatctgacgccctgtgccctcacctcgtttcctcagctggggaataggaggcctggaatggtgtgggtcttccccaggattaccattaaccagtggtaaagaccgctaagaacccatgagtccttgcccccaaaccacggatggctgttttcccgggacagggttggacagtttgggcgaggtcggggctgcctcttggacagaaaacggggatgggatgcgaaggcaagtgattgggagccagacccctgttttccatcctggctctaccctccgttcaaccccctccccgccagctgcggccagcaccagagccaggggacagctccccgcgcgcgtcctcgctcccgggcggggccgggcggtacgtcccagagcgcagcgcgccccccgcctgctgtctcagtgccccctcacctccgccctgtttcgtccaggtcctccgggtcaggctacccccgtcgccgccagagcgcgggggaggggagagcttcctttgtctcctatgcctcctccccccatcccggctctcctgcgggcaagcgccgaggggacaccggggagtaccccacctgaacctctggggcccacaccaggccccagtcttcctctactcactgcagtgggcgaagaccggcaggacctgccccatggcccccctcgggcctgcatcgggacccccgcccactccggctgtgccgccctgggcccggggtcgcgggcgctcatctccgccgcgcccacgacgccgctgccattctcgccgcctcctcctcccgggctgctccagccgccgccgccgccgccgccgccgccgccgccctggtgctcggctcggcgggggcgggcggggccgaggtggggaaggcactgcagcgcgcggccgggggcggggccagaagacgggcggggcggtaccagagggagggtgaggggcggggaaacgccgaggatcaggcggaggggcgtggccttcttactaaaggggcggaaccaagagggtgggctacggagccaggaaggaggggaaagcggcctgaagggcggggcctagatcgcagagggcgcagcctttaggggaagagggaaggaggcctggagtctggcgagggacttgggagaggatggtgaacgagccacggcagagaggatgagagcgtggatccctgggtgggttggggtggtgctcggggtgccattgaggagggggtggaaagattctaatgctctgaggtagggtccgagcctagatttgcagagggagcgagaaagggggccgaatgaaacgattcagaaacttttggggcacgcggaggagctcaaacgtgggcagggctaaagcaacagggaattattcaaatataactgggtggggtcggattccaggcgattccaggtctgcgaaaattagaagggtctggagctgtgtgcctgaatcctggatgggcggggcctggaagagaaaataagcgaagccccagaggggaggggtcgaactaaaaacagtaaagaaaaaaaaaatatgtatatatatatatatatatatatatatatatatatatatatatctttttgagacagggtctcgctctgttgcccaggctggagtgcagtgatacgatcacggctcactgcagcctcgacctcccgggctcaggtgatcctcccacctaagcctcctgagtagctgggatcacaggtgtgttccaccgcgcctggctaaatgttaatttttgtagagacggggtctcgctatgtttcccaggctggtctcaaactcctgggcttaagcgatccgcctgcctcggcctccctaagtgctggggttataggcgtgagccaccgcgcccggccaagtatggtatttacaggttttgaggctgggggctgtaccactgaggtgggaggagcttggactgagtgttgtgttgagaacacagattctagaattagtttccctggaacaccggttacttctgtgactctgtttcttcttccatatgtaaactggagatgatgatgtataacagtgtgtgacacattagtactatgtaatagtttgccactggtacagtattatcttttttctttttttttcctgattcagatcccaaaccccgctttgtaggtgcaggaaacaggagacccagaagtgtaattccttctagtgacccgcctaaagagcaggtcaaaggacaggaaggagatttagatggtttaaaatctcacagcggaggggattaatggagggggcgggcaggtgtacagggtggagccttcctgatcccagggctgaaggatggcggtcctggcccgccagctgcagcgtctcctctggaccgcttgcaagaaaaaggagagggagaaggaggggagggaggaagaggaggaggaggaggcggggcgcagggcccccgaagggcctcggtctctgttgacagcgccgcgccgcgcccagcggccgcacgggggtgccgaggcgtctgggggcctgcgcttcggggcgagcgcagcgcaaggctggcgcgcgcgcatggaggatgctcactgcacttggctttcgttacctggtctgcccccgggctgggccttgtttgccgtcctcgacggccacggtggggctcgagctgcccgcttcggtgcacgccatttgccaggccatgtgctccaggagctgggcccggagcctagcgagcccgagggcgtgcgcgaggcgctgcgccgagccttcttgagcgccgacgagcgcctgcgctccctctggccccgcgtggaaacgggcggctgcacggccgtggtgttgctggtctccccgcggtttctgtacctggcgcactgcggtgactcccgcgcggtgctgagccgcgctggcgccgtggccttcagcacagaggaccaccggccccttcgaccccgggaacgcgagcgcatccacgccgctggcggcaccatccgccgccgccgcgtcgagggctctctggccgtgtcgcgagcgttgggcgactttacctacaaggaggctcckgggaggccccccgagctacagctcgtttctgcggagccagaggtggccgcactggcacgccaggctgaggacgagttcatgctcctggcctctgatggcgtctgggacactgtgtctggtgctgccctggcgggactggtggcttcacgcctccgcttgggcctggccccagagcttctctgcgcgcagctgttggacacgtgtctgtgcaaggtcctgggggcgtggcgtggtacctttggggcttggtgcagcagagggagagagcctcggggttttggggaggagggctttgatagagaggcaagaktaaagctagcaaaggagggrataggactcaagcgaagggcgtggcctgaagtgggcagggccaaaatacaggggcggagcctgagggatgctttgaggcacgggagagttagtggaagggacttaagagaaagggcgtggtcttttggaaaggggcgattctgggtcgtaggagccgggccggaagtattgattagtgctggaaggtggaagagcaggtaaacatcagagcgggcggagctttagggaaaaggcattgttctctcaattgggagcgcctaggaccgggtttggtcccagkargagaggaytggcaggtgggtgggacgcgaaagaaatgggcataagtagaatgaagtgggggacttgaacctggggattgttgggaagctctgccttggactctcccccaccgggctcctttttctccaccggcttcagggcagcctggacaacatgacctgcatcctggtctgcttccctggggcccctaggccttctgaggagrcgatcaggagggagctagcactggacgcagccctgggctgcagaatcgctggtgagcagactctgggggcccagctggaggggtggttggccagtgaaggctgtgccataactttttctttttttctttttttttttgagatggagtcttgctctgtctcctaggctggagtgcagtggcgtgatcttggctcactgcaacctctgccttccgggttcaagcgattctcctgcctcagcctcctgagtagctgggattacaggcatgcacaatcacacccagctaatttttgtattgttagtatagacggggtttcacgatgttgtcyaggctggtctcgaacccctggcctcaagtgatccgcccgccttggtctcccaaagtgctgggattacaggcgtgcgccactgtgcccagcctaactcttgactctttctcagaactgtgtgcctctgctcagaagccccccagcctgaacacagttttcaggactctggcctcagaggacatcccagatttacctcctgggggagggctggactgcaagtgagttggggtgaggaagggtggggtggaatgagggtggggtggaaggaggagagtcccctcctgagggccttcctgtgctctccagggccactgtcattgctgaagtttattctcagatctgccaggtctcagaagagtgcggagaggtaaggatcctgtgttctccagtgtttctcttaggaggggacgcccccccgcccacccctcttagtgacagggaaattgaagccagtgaggataagggatttgcctgatatattttattcctcttttctcttctttctttctctttttttcttttcttccttcctttcttttctctctctctttttttttagactgggtctcactatgttgcccaggctggtctcaaactcctgggctcaagggatcctcctgctttggcctcccaaagtgctgggattacaggcgggagccactgcaacccagccagcttgctatattaatacattcctactcccagccctgragcattgtgcaaggcatgaggagggagacgcagatgcagagaagagactgtgattcccctccaagaaatgtgagccggcaacgctctgcagtgccccatcagcccaagtgcttcccacatccaagaataagatggaaacattcagggaatgctaatgaccaattctaaggcctagacgcacagcagataccatcaggacatacatgagtatgatccaggtcttagacaagagaagctgtaatggggcccagatagctaaggagaatttggagatatccaaagatgtatagtggtggaccaaggcatggagtggcatcagggaagaaatgggagggaggaagctgggtttagagccccaaggcctttgcatggcagaggtgggagtttggtgattatcatgttgatgagggaggattgttgacaatttctcagtagctgaaggaggtatttgtcagttttctttgagtcgtgagagatggaagcccaattcaagctgggaaaacaaaacagggaatttactgggccatgtaattgaagagtttagagtcttaaggcatggctgcatctagttgtcagatgatgtcatcatgaatggtctctttttattttctccgagttggcttcattacctttcagggtctcctcctaaggtagcggagacttgcagctccaggcttacaccccagcagcctgtcctccccagtggagaaagtttgccaatttccccggagttgcagcagtggtctttgggggctggttctcattggccacaccaggtcacatgctgaccagtcactgtgtctgattggccaggctggggtcgcacttggggttggggtccactccattcaaaccttaatggattgtgagatgggatatggtggtccctcaaaggaaaaggaagaggtgccaggagacaagacagaatttctcattaccttctcccacattttgtgttacagaaggggcaggatggggctgggaagtccaaccccacgcatttgggctcagccttggacatggaggcctgacagctgttgtcctttggggatcctttgsttctctggggcctcaacagaactaaagaagaaaaccgaccctttccccaactacatgtaccagcggaaggaaggaaggccaatgtaggaacccaaaatgcttatttcttcttctcttacttccctctcacagaaaagtcttacgaatggggaaattccaccaacatccagaccaaaaagaaaaaagcccaaatcgaaaaaaaaaaaaaaaaaaaaaaaaaacaaaaaaacccaaccaaatgtttttgaaatattcagagccgaacagattctgagagataacccagtccaataacctctttccttcttattactcatctgtttttgaggggaagtagagttttgattattaaactttatttacataagtgattccaaatacattttcttgtaaaaaacaagaagacatgttttgcctagtctgttagcaaatacgttacagggcacctgctgtgtgccaggtcttagcctcacagtcatgaaccaggctgacccaccaagatccttgccactgtggggctgacctcttggtcaggagacgcagcaaacaagggaatcaataaataaagtcatctcgccaggcgcagtggtccacatctgtaatctcagcacttgggggagtctgaggtgggaggatcacttgagcccaagagttcgagaccagcctgggcaacatagcaagatgcaatctgtaatttttttttttttttttttttttgagacggagtctcgctctgtcacccaggctggagtgcaagggtgctctctcggctcactgcaagctccgcctcccgggttcatgccattctcccgcccagtctgtaattaatactaaaaaaatgaagtcatcttgcacactgacaagtgtcacgaagaaaataaaacaggaggatgtgttgagaaaatgactaggggagctacttcgggttttttactttttccaatttttaaaattttgatttatttaattcaggtagttttgaatgggtaataaattcacttggtttgaaatgcaaagagtgcaagatggcatacaatgaagtctttctctatccctctcacacttcagccactcaattttccgtggtgggggaggtggcttttgaaacaggggaatcaggaaaggtctctgaggaggggacagttgagcagagacctgacagagaagagtcagctccgcaaataccccaaagagtgttctaaggcagagggaacaatcagtatgaaggcttagaagcaggataaaatttcccccctttttttttttttttttgagacagagttttcactcttgttgcccaggctggagtgcaatggtgcaatctcggctcactgcaacctccgcctcctgggttcaagtgattctcctgcctcagcctcccaagtagctgggattacaggcacgtgccaccacaccaggctaactttttgtatttactacagacagggtttcaccatgttagtcaggctggtctcgaactcctgaccttaggtgatccacccaactcggcctcccaaaatgttgggattacaggcatgagccagccaccaggtccggccaaatttggcattttcaagacagacttgagacctcccaagtgcggtggctcacacttgtaatcccagcactttgggaggccgaggcagcttgattccaggaattcgagaccagcatgggcaacatagcaaaaccttgtctctacaaaaaaaaaaaaagatctctgtgaccaccaaattaaccccacactctctatctcactggtaacccttgcaatgagtttaaagtggactttttacatgtattaatatatggtattctgggtgtttccttgatttttttcattcccttcgtatctctggcaactttttatccacttaatggatgttttcattctatgtcacccacgtcatttacacacttcatgccacccgtttttttaagagacaaggtctaagtctgtatcccaagctggagtataatggcgcaatcatcgctcaccacagcctcgaactcctgggctcaagcaatcctcctacctcatcttcccaagtagctgggaccacagatggatgataccacacccagttaattttttttttttttttagagatggggtctcggccaggcgcagtggctcacacgtgtaatcccaccactttgggaggcccaggtgggcagatcttctgaggtcaggagttcgagaccagcctgaccaacatggagaaaccccatctctactaaaaaatgcaaaaattagctgggcttggtggtgcatgcctgtaatcccagctacttgggaggctgaggcaggagaatcgcttgaacccaggaggtggaggttgcagtgagccgagattgcgccattgaactctagcctgggaaacaagaatgaaactctgtctcaaaaaaaaaaaaaaaaaaaagagagaaatggggcctcactatgttgtccaggctggtctcaaactccctgacctcaagtgatcctcctgccttggcttctcaaagcaccaaagcactgggattacaggcatgacacaccttgcccagtccacacctccttaagttgctgctcactccgtgcttcagaaaaggatgtccaagggtttcactattccctgccctcatcttttttttgttttgttttgtttaattttttttgaggagtcttgctctgtctcccaggctggagtgtagtgtcacgatcttggctcactgcaacctccgcctccggggttcaagtgatcctcccacctcagcccctcagccacccaagtagctgggattacaggtgtgtgccaccatgcctggttaattttttgtttttggtagaaacggggtttcaccatgttggccaggctggtcttgaactcctgacctcaagtgatccacccgcctcggcctcccaaagtgctgggattacaggcgtgagccactgtgcccagcctcccctgtcctcttgatgaacatttaagctatttccaatttcttgctctcacatcactgctaccgtaaagatcgttatgtacatatgcaagcgttctcttacacaggggtcttgctacctgttttgtacagcacttaagctaagaagagttttttttacagtttttaagccttgtaagaaaaaagaaaaactgaagagtgtgtaaaccagaccctatgtctagcatatctaaaatatttcctatttgaacttttacagaaaatgtttgccggctgggcctggtgactcacacctccaatcccagcactttgggaggctgagccaggctgatcactttagcccaggagtttgagaccagcctgggcaacacagctaaaccctgtctctacaaaaaattagcctggcatggtggtgtggacctacagtcccagctactcagtgggctgaggttagaggatcgaatgagccctggttatgctactgcgctccggcatgggcaacaaagaccctgtctccaacaaacaaacaaacaaaaaaccatgtttgctgactgttgttgtagtgtaggtggcacccagaaatgccacccctcctatgtcacagatgggaaagctgagacccagagaggagaacacagttacccaaggtcacactgaactggtaactcattcaactaggtaagtttgttgagctgctgagccgggcgggcctggctggggtgagtgaggtccagaaattgattaagtcaactgggtgcagtggctcatgcctgtaatcctagcactttgggagactgaggcaggcagatcacctgaggtcataagtttgagaccagcctggccaacatggtgaaatcccatctctactaaaaatacaaaaattagttgggcttggtggcccgtgcctgtaatcccagctactttaggagggtgaggcaggagaattgcttgaacccaggagggggaggttgcagtaagcggggatcgagccagcgccctccagcctgggtgacagcgagagactacatctcaaaaaaaaaaaaagaaaaaaagaaatttagtctacccattctcccagacaactcagcctgaggaaacacactgagaaacaatgataacctccgaggaacagggttcaaggtctcccagagtggggtggagaaggggaggggaattaatgtcaaagcttggcctggaaggatsacgtgctccccaggtaaaggaggtcaggacaacatcaacatccggacatgggactcggcttggacatacgctggaaaagtggattctctcacatagtcagctggccctgagaattgttggttttacactcagaccttggtggctttccgggttctgggggctcaggcaagagggccataggccagattcattccctgtctccaggcctcagtttacccgtgtgtaaatgtggaactaactgatttcccagggctcgggcgcctcacccgggccaggtggcgctctacccaaggggcgcgaccaaatcagtgacgtcactcggggcggggccggcaagacacgctgcggaagcctcagagggtgtctgggctcagcccggagccggcgtgtgggggcgggggctcccgggagggtctcctcacctccgggccctcctgagggctgggatgatcctgctgtcctccgcaggcgaaactgagtcagagcggggcgtgcgtgggccggaggctttacacaccaaagaagccggcgcctcctgcccaccccgggcgaatgccgggccccccactcccgcactcctcgccagtccccacctccaccccaccccacccccgaccctgcggctgtgagtcagcgaccgaccgcgcccccttggcccacttcctcctcaccttcccggggcgggcggggtggggtgagaggggttgggccctactcccccgacttccactcccgtgcgggtgggggtctcgcccccttagtaacctctccgaaattgacagaagagaaacgctggggaggggcggtgttccgaagatgggatttcagggagaaaatctgagaccacttgcttaacttgagggtcctcctcgacccccaaaattgagcggagtacgagatggagaagtcgatggggaaagaaatcgcgccccttccgagaccctcctcagaattcccacagtgggagcgaactaggaagcaagggaggtccccttccccttcaccaacttgcccctcaggtgggggtgattcccagggtgcacccctgggctacaacattggggagaggagcgagatcgcggaagccgagggtgcagagttgcccttttaagcgccctccaccccctcgcctggaggcgcacgcggcccctttaaggcgcggggcattgtgggtgcggggagtggaattttggaacgaaatgtaacgaagagaagtacagtagtaagagtaacactgtagccgccaccggcaaggggtgcgcgctggggagcggacgctgcatcccctttctgctgcaggaacctctcatcagaccgcctgagggaagcggcgcccggagacccgccccggcccggtccacattctccccaggaagccggactctatggggcgggaccctgggggagcctgagccgagcccggagccagccccgaacccctgaacctccagccaggggcgccccgggagcagccagcccgtgggcgagccgcccgcccgccgagcagccatgaggtgagccggacctgccccccgacccgtccccgcccgggcgggctccgcgccccgcctttgtccccctcccccccagctagctccgggctggaatttggggacagatccttgggagcctcggatttgagctgaatccccttggacgcgccccagaaccgtcgatcacttctccacgactgactccccaagctcggggggtggtggcggtgaggttctcctgggagccctcaagatttgggggcgctcggaggactcccgaattgttaagactttttttagaggacctcaaagttggcagcgactccccgcagggatgccaggattgaggcagggctcagactctcctccccctccccccagacttcagctcgaggtccgggaaggattgtgggggaccgatttgggataccctgggacttggaagagagactgagactcagaccctgggtgtgcaggtcccccgtttacttggtgctggaaaaagtctccccaagtgggaccgcgctccataacttcgggggtacttcttaatcccctggattttgggggtcacttaggtcttcctgtggaggaggctggtgtgaaccgatccagggacctggacgcagcctccagagtctggtgggaccccccccttccccgtcgctccgcacacaatctgcttaactggccgtgcctaggaccgagcgggcgctcggagcagagggcggctccccgcctccggccata

SEQ ID NO: 94892 - DNA, 31580 bp, Homo sapiens
ccagaggctagctgccagctttgaaggttagggaaggggttccgagccaaggaatgcaaggtatgcaaagaatttggctctagaaactgaaaaagacaaggaaatgattctcccgtggagcctccctggagatcatagtgcaacctagcaggaagggccctcccactacccgcaaaccccactttagtttttttttcctctagtgatcgccattttttttttttttttgagatgagtctcactcatggttcactgcaacctcaacgtcccaggcttaaatgatcctcccgcctcagcctcccaagtagctgggactataggcaccacatcccactaatctctctctttttttttttttaattttccgtagagacaggatctcaccgtgttgccgaggctggccttgaattcctgggctcaagtgatcctcctgccttggcctcccaaagtgctgggaatatagacatgattcactgcacccaaccaacattggattgatattctcttaaattctccaactttttctcccattaagggacatagtgctgtttattagatgggtaatatcatagataattcgacttggaccatggagttcattcaaattgtgtatcttgacaattttagtattggctgatgtaacatgacaatctaggagagtatttccttggtatttaattcatgttctgcttggtttagcaattttataaaccagcctaggccttgcacagtggctcatgcctgtaatcccagcgctttgggaggccaaggcaggtggatcacctgaggtcaggagttcgagaccagcctggccaacatggtgaaaccccgtctctactaaaaataaaaaaataaaaaaaaaaatagccgagcatggtggtgggtgcctgtaatcccagctcctggggaggctgaggcaggagaatcacttgaaaccgggaggcggaggttgtggtgagccaagatcgtgccactgcaatccagcttgggcaacaagagtgaaaatccatctcaaaaataataaaataaaataaaataaaatataaaccagtcagtttcttcattagagttctggaaattcttacccagtccaaacaatatgatcctaaaatttatcagaaacctatactcaggctgggtacagtggctcacgctggtaatcccagcactttgggaggccatggcgggcagatcccttaagcccaggagttcaagaccagcctgggcaacgtggcggaaccatgtctctactaaaaatacaaaaaattagctaggcacggtggtgcacacctacagtcccagctactcaggaggctgaggtggcaggatcacttaagcctgggaagttgaggctgcactgagccatgttctcaccactgcacttcagctggagcaacagaagtgagaccctgtctcaaaaaaaaaaaaaaaaaaaaaagagagagaaaagaaacttttatgcaacagtgcttgtcagggtccttccatcctttctctctttctccctttctctctctctctctgtctctttctctctttctctctttccttctttcttcctttctgagacggagtctgttgcccaggatggagagcaatggcgcgatcttggcttactgcaacctctacctcccaggttcaagccattctccagcctcagcctcccaagtagctgggactacagacatgtgtcaccacgcccggctaatttttgtatttttagtagagatgaggtttcaccatgttggccaggctggtctccaactcctgacctcaagtgatccgcccgcctcggcctcacaaagtgctgggattataggcgtgagccatcactcctgccatggagctgacttttgtttttttcgagacagagtttcactcttgttgcccaggctggagtgcaatggcgcgatctcggctcagcgttaacctctgcctcccaggttcaagcgattctcctgcttcagccttctgagtagttgggattacaggcatgcgacaccacacccagctaatttttgcatttttaatagagatgaggtttcaccgtgttggtcaggctggtctggaactcctgacctcacatgatccacctgttccagcctcccaaagtgctgggattacaggcgtgagcccccgcgcccagccaggagctttctaaacaaaataaataagtaaaatattcagcatgtcacatggttaaatgagctctcaagaacaataaagcagggaaaggggatatagtgtgtgtgtgtgtgtgtgtgtgcgtgcgtgcgtgtgtgtgtgtgcgtgcgtgcgtgcgtgtgtgtgtgtgtctaggaggtagatttaatttggtggtcaggaagccctcattgagaaggagacttttttttttttgagacagagtcttgctttgtcacccaggctggagtacagtggcatgatcttggctcactgcagcctctgcctcccgggttccagcaattctcctgcctcagcctcccgggtagctaggattactggtatgtgctaccatgctttgccaatttttgtatttttagtagagacgggatttcaccatcttggccaggctggtctcgaactcctgatctcaggtgatctgcccacctcagcctcccaaagtggtaggattacaggtgtgagccaccatgccgggccgagaagttgacaattgagcaaagagctgagggaggtgagtgtgtcagccacatggctatcaggggaaacagcattccaggcagacaaaatagctggtgcaaaggccctgagatgggatgtgcttgttatgttttagagacagcaaggagaccagcatagctgaaacaaaatgagctgggggagagagaggaggagatcagagcagtaaggtgggttggtatggggatgatgagcagtaagctagttacagaggactctgtaggtgacagtaaagattttggatctgggctggatgcagaggctcacgcttgtaatcccagtactttgggaggctgagggaacaggatggcttgagcccaataccagcctgggcaacatagcgagaccctgtcaataacaaaatatattttcttcctgtaggagatagaaaagtaaacataaaaaaatttatgtaaataaattaagccgggcacagtggctcacgtctgtaatcccaccactttgggaggctgaggtgggagaattgcttgagctcaggagttcaaccagcctggacaacatagtgagataccctcgtctctacaaaaaattaaaaaaaattaaccaggcgtggtgtcgtgtacccgcagtcccagctactcaggaggctgaggtgggaggatcacttgagccctggaggtcaaggtggcaatgagccaaattcacaccaccatactccaggctgggacagagcaagactctgtctccaaaaatacagccgggaagggtggctcacacctgtaatcccagcactttgggaggctgaagtgggtggatcttttgaggtcaggagtttgaggccagcctggccaacatagtgaaaccccgtttctactaaaagtataaaaattagctgggcagtagtggtgcgcacctgtaatcccagctactagggaggctgaggccagagaattgcttgagcctgggtggcagaggttgcggtgcgctgagattgtgccactgtactccagtctgggcgaaagagtgagaccttgtctcaaaaataaataaattaagaattaattaatttaaaaaagagatttcgatctgcccctgccttcccctccagctgccctttctctgctccctgtgctcaactcagagctccacccccacaggcttcctttcagcactcacaggcctcagctttcttctggcctagagcttttgtgtatgatggtctctctccctggaacacctttctcacttctctcatccatcccctcttgctggttgatctcttctaattattttctggctctactcaaacctcgcttcttccacgaagccttctctgatcacttggccaacactcacaccccacagttgacagtagacatcctgtcataataagtcttttttttttttctttttctgggacggagtcttgctctgtcacgcaggctggagtgcagtggcgtgatcttggctcacttctgcctcctgggttcaagcaattctcctgctttagcctcccgagtagatgggattacagatgcatgccactatgcctggcttttttttttttttttttttttttagtagagatagggtttcaccatgttgaccaggctggtcttgaactcctgacctcgtgatccatctgccttggcctcccaaagtgctgggattacaggcatgagccactgcacccagcccataatcaatctttatggtgacttgaagttttccttcacagcacttttgtacttgtgattatacacgtgcgcacacacacacacacacacacacacacacacatttgagataggttttcactcctgttgcccaggctggagtgcagtggcacaatcactgcccattgcaacctctgcctcccaggcccaggtgattctcccacctcagcctcctgagtatctgggactacaggtgcacgccaccacgcccagctaatttttgcattttttgtagagacgggttttcaccatgttgcccaggctggtctctagctcctgagctcaagcaatgtactcgccttggccttccaaagtgttggaaccacaggcacgagccaccactccaggctgtaatcatatattcatttgtatatttaatatctgttctttgaggccaggcctggtgcctcacccctgtaatcccaacaatttgaaaggctgaggggagaggatcacttgaacctgcgagtttaaccagcctgggcaacgtggtgagacctcgtctctaaaaaaatttaaaaaataaaacttagctgggcttggtggtgcacacctgtggtcccagctactctggaagctgaggtgggaggatcgcttgagcccaagaggtggaggctgcagtgagctgtgactgtgccactgcactccagccttggcgacagagaaagaccctgtctcaaggaaaaaaatctgttctttgagggcaggtgctgaggctgtcatggtcacctttctgttcccaggggccagcacaggatcagacacatggtagatgccacatagctatttgttgaagaaacaaacaaaagctagcatttatgttttatttattagttattattattaatatttgaaatggagtttcgcttttgttgcccaggctagagtgcgacggcgccatctctgctcactgcaacctctgcctcccaggttcaagcaattctcctgcttcagcctcccgagtagctgggattacaagcatttgccagcacgcccggctaattttgtatctttagtagagacaggttttctccatgttggtcaggctggtcttgaactcccgacctcaggtgatccacctgcctcagcctcccaaagtgctgggattacaggcttgagccaccgcgcccggcctgcaaagccatttctaactcttgggcccagaaaggatcaccaatttccctgtcattctccgttagactattcgctactgagacgatttttttttttttttgagacgaggtggaggggcgggggttctcgctatcttgctcaagctgatctcgaactcctgggttcgatcaatactcaatcttggcaggcgcaggaggaccaaattctagtgaatgagatcgagtctctcggctctttcccttccatgttttctttttgattggccctcgacgatcctcagtgacgcctcccgcaccgcctcacccgagagtcagccgccctcgcttttccgtgcgcacgcgcagtatcccgattggctctgccctagcggattgacgggcaggttagccaatggtctcgtaatataggtggagcgagccctcgaggatgtccacgacccggcctctcgctgaatattcatgagggaggcgggtcgaccccgctgcacagtccggccggcgccatgaagtgagaagggggctgggggtcgcgctcgctagcgggcgcgggggrtcttgaagatggggtcatcggtgggcgcgcctgggtccccaagggggcgaggggagggtgaaggggtgggacgggggcagccgcagggagcagcagtgatagcgaggagacactgagggggccccgaggctcctgaggacctgagggttaccgggggcgccgggcccgtcacccttctctgggctcgacgaccgggcactgtggaggcgggagaggggctgaggggacgggaactgacccagcagcccctgccgccaggctcaacgtggacgggctcctggtctacttcccgtacgactacatctaccccgagcagttctcctacatgcgggagctcaaacgcacgctggacgccaaggtgggtggccggtgggcccgacccgcccactcgaccggtggggctgccacgcctgggcctaagacagattgcaggacgtctggattttagaagtccgaggtccctgggaatccaggaccccataatcttccgttatctaaaacaataatggtgaataggctgggcgcggtggctcgcgcctgtaatcccagagctttgggaggacgaggcgggcggatcacttgaggtcaggagttggagaccagcctggccaacacggtgaaaccccgtctgtactaaaaatacaaaaattagccaggtgtggtggcgggcgcctgtaatcccacctactcgggaggctgaggcaggaggatcgcttgaggccaggagttggaggctgcagtgagccatgattgtgccactgcattccagcctgggcaatagtgacacttgtctcttaaaaaagaagggagaaaagttcactatatatcagctactgtgccaaatatttaacctgcaatttctcacaatcctcatagtcatgttatgaggaaggttttattattaggcccattttattttatttatttatttttgagattgaattacaggtgcgcgccaccacatctggctaattttttgtatttttagtagagacggggtttcaccttgttggcccagctggtcttgaacttctgacctcaggtggttcacctgcctcagcctcccaaagtgctgggattacaggtgtgagccaccacgcctggctttaggctcattttagagatagggatactgaggtctggggaggtgaaggtacttgcctaagaccactcaacaaggaggaggcagaagtgaggttcaaacccactgcccaatcttaactgctgctgtgttatcctgctgttctgagttggtggcattgggggtcggggagagtccccagagtttgtgtgcccaaggttctgagaccctgtgtgttgcccctctggtccccaacatgcagggtcatggagtcctggagatgccctcaggcaccgggaagacagtatccctgttggccctgatcatggcataccagagagtgagtgatgcgctgaacccgtaaaggcagacaaaggaaggggcgggacagggactgagtccgcttgttatcggcaggcatatccgctggaggtgaccaaactcatctactgctcaagarctgtgccagagattgagaaggtaagctgggactcatcctggtgctccagccccactgttccctrggccctattggtccccctggcggtggccgtcaccagctttcgggggtgtttgggaagctggggaagagactgggacctggcagggcaggggtttgtgcctccaatgarcacaagctccccctgccccccaactttggagtaggtgattgaagagcttcgaaagttgctcaacttctatgagaagcaggagggcgagaagctgccgtttctgggactggctctgagctcccgcaaaaacttgtgtattcaccctgaggtgagcacctgttccttytccttgcccttagcccagaggtagagaaaactctttcgtccaaccacaagtcctggatccccaggccatatctcttgcaaaggcatgcagtggctacacacagaattcccgtctcagtggtcaaattctcattcatcgtggcccaggcaagcacacttcctccagggagtcttcaaattctacccaggcctaggagaggttaaaaaggcagctcttagagtctctggcaagcctggtttcctggctctgaaacttactagcccrgtatttatggagaggcattttctgccacctgggcctcagtcttcctttctgtaaaatggggataattatgtacctgcttcataaggttgctgatgataaaattgggtgaaatgttgcagccgatgcccttagcatgtacaaagagctaaaagaatgttagaaattctcatgataggccaggtgcagtggttcacgcttgtagtcccagcactttgggagtctgaggtgggcagatcatttgaggtcaggagttcgagaccatcctggccaacacggcgaaaccccatttctactaaaaatacaaaaattagccgggggtggtggtgtacacgtcggtaatgccaatcgcttgtacccaggaggcagaggttgcagtgagctgaggtcatgccactgcattccagcctgggtgacagagtgagactctgtcttaaaaaaaaaaaaaaagaaattgtcatgatatttatatgcataatgatatatgacaaatacaatattagttatcattaaattatgctataaaatcattgtacttggctgggcatggtgactcacgactataatcccagcactttgggaggccgaggcgggtggacacctgaggtcgggagtttgagaccagcctggccaatatggagaaaccccgtctctactgaaaaaaaattgaaaaattagctgggcacatgcctgtaatcccagctacttgggaggctgagacaggagaattgctcgaactcccgagggggaggttgcagtgagccgagatcgcgccactgcactccagcctgggcaacaagagtgaaactccgtctcaaaaaaaaaaaaaaattgtactcactgtgtgccaggcactgttctgaatactttacatgtggtaacccacagaatgtatatatgtgtatatattatacttacatatatatgtgtgtgtatatatgtttttatatgtgtgtgtgtgtgtgtgtgtgtgtgtgtgtgtatatatatatatatttttgttttgttttgtttttgagacggagtctcactctgtcacccagcctggagtgcaggggagtgatcttggcttactacaagctccgcctcccgggttcaagcaattctcctgcctcagcctcctgagtagctaggattacaggtgccccactacacccggctaatttgtgtgtttttagtagagacggtgtttcaccatgttggttaggctggtctctaactcccgaccttgtgatcctcccgcctcagcctcccaaagtgctgggattacaggcatgagccatcgtgcccagccttatttattattattattttygaaatggagtttcactcttgttgcccaggctggagtgcagtggcgtgatctcggttcaccacaacctccacctccgaggttcaagtgattcttctgcctcagcttcctgagtagctgggattacaggcacccaccaccacgccckgctagttttttgtatttttagtagagatggggtttcatcatgttggccgggctggtctcaaactcccacactgggcccacagactatatattatatcacattatttgtaagaatatgtgagaaataatacatctagtggatgacaaagagcacaggcctcggtgactgatgaaaggggaaatggagaaggaagggctggctgccttggagctttccttttggcgtaggaaaaggatttgttcttcagaaaaagccttaggctgtgatggtgccttagagggtacagagcaggtcaggggtaaggggagtcccagactgtgtggaacctcctttgattcttaggccctgccaaggttccatgcgttttggcatttccaaggatgaagtagttatcttcaacctatatgctaaagatttttcaggcttattgttttaaaatattagttttgggctgggcacggtggctcacacctataatcccagcactttgggaggccgaggcgggtggatcacctgagatcaggagttcgagaccagcttgatcaacatggagaaaccctgtctctactaaaaagacaaaattagccgggtgtggtggcacatgtctgtaatcccagctactcgggaggctgagacaggagaatcgcttgaacctgggaggcggaggttgtggtgagccaagatcgtgccattgcactccagcctgggcaacagagcaagactccgtctcaaaaaataaaatattagttttggctggctgggcgcagtggctcagcctgtaatcccagcactttgggaggctgaggtgggaggattgcttgagaccaggagtttgagaccagcctgggcaacatagcaagacctcatctcaactaagaagacaaaaattagccgggcatggtggtgcacacctgtggccgcagctactcgggaggctgagtgggggaaggatcacttgagcctgggaggtcaaggatgtagtgagccgtgattgggccactgcattccagcctgagtagcagagggacttgtctccaaaaatatgtatgtataacttgtagttgtaagaatgtaacaattttgctactctttttttttttgagagggagtctggctccgtggcccagggtggagtacagtggcatgatctcggctcactgcaacctctgccttctgggttcaagggattctcctgcctcagcctcccgagtagctgggattccaggtgtgcaccaccacacctggctcatttttgtatttttatttttacttatttttttgagatggtgtctcactctgtcgcccaggctggagtgctatggcacgatctctgctcactgcaacctccacctcccggatacaagcgattctcctgcctcagcctcccgagtaactgggattacaggcatgtgccaccacgcctggctaatgtatttttagtggagacagggtttcaccatgttggccaggctggtctcgaactcctgacctcgtgatctscycacctcagcctcacaaagtgctgggattacaggcgtgagccaccgcgcccagcccaattttactactcttgtatccctgcattaagttcccacgcgtcttaactaataatgcaacagactgaggttcaagttgtccaaaaccccagccagctgggaggtgtggagaccwgggtttgaagagtggttgggtttccaccctgtctgggtgctaagatgccccacacccccaggtgacacccctgcgctttgggaaggacgtcgatgggaaatgccacagcctcacagcctcctatgtgcgggcgcagtaccagcatgacaccagcctgccccactgccgmttctatgaggttactggmgggcagggctgagggagggaggcaggacaggtagcctggggcaggcagcctccctgacccctggcactcttgtcccaggaatttgatgcccatgggcgtgaggtgcccctccccgctggcatctacaacctggatgacctgaaggccctggggcggcgccagggctggtgcccatacttccttgctcgatactcagtgaggaggctggtgggatgggcagaggggcgagtgtgagggtgtgggctgcccgccygtctcctgtctgcccatgtctgtctgttgctwgctgtgagtctgcctgtctgcatctccctgttggtgggtgcccgtatctgttggtctgtctctatccatctgctcatacttctgcctggcctgtgtctgcctgtgcaggcctgtgtgggagtgacgggccagtgtggccaggggtaggggtaggggttggggtggcagggccctggtaaccctgctccccggccccccagatsctgyatgccaatgtggtggtttatagctaccactacctcctggaccccaagattgcagacctggtgtccaaggaactggcccgcaaggcygtcgtggtcttcracgaggcccacaacattggtgagkggggcgccaggggccaaagggatgccagcccctctgagtgaggcccctgcaggcctgcctgagccggctctctcccccttctccagacaacgtctgcatcgactccatgagcgtcaacctcacccgccggacccttgaccggtgccagggcaacctggagaccctgcagaagacggtgctcaggtggggccggggacgtctggcggtggtgcccgccctgcccctgggaccctggcccctgtctgacttgtccccagggttgccagccccctcccagccccagctcatctctccgcaggatcaaagagacagacgagcagcgcctgcgggacgagtaccggcgtctggtggaggggctgcgggaggccagcgccgcccgggagacggacgcccacctggccaaccccgtgctgcccracgaagtgctgcagggtgagccccgaccccccgctgccccccagtccctttcccgcctccccgtcgccgctgatagcgtctcctcgcagaggcagtgcctggctccatccgcacggccgagcatttcctgggcttcctgaggcggctgctggagtacgtgaagtggcggctgcgtgtgcagcatgtggtgcaggagagcccgcccgccttcctgagcggcctggcccagcgcgtgtgcatccagcgcaagcccctcaggtgcggccccagacagcgcgcggggtgggggcccggcaggtcccggttatgcagagccgtgtcctccacgcctgtagccccaggtcaccactgcagcatcaggagtgagtgagctgggcgaggcacgtgggaccttgtctggtctgacctgggaggtccgggagcaaggttggagctgatcctgggtccgtgcgtcgggcaggggcctggcaggcaacacctggctggattggagaatctcccccacccaagagagagtgggagcaccatttacagaggggcgggctgggggaggagccaaggagggtgggaggtgagagctgggagctaagccaggccacagcggcagggagggagtgtgttgagaaccaactggtgggggcctggacaggggcttctgctgggagcagaaaccagtaccagggcctcgcaggctgggagctggaggaggtgtccccggcccatgtatcttcccaccgatgcctctaatcttccaaacctgagggcaggggcgtccccatggagtagtctgggcgcattttgggggagtcagtctcttgaggcacagggcaggcagagaatgaccaagggatacgagggggcttttcctttgggtaagtcatgggtcttctttgaactgcagtttcctcctttgtaaaatggccaaggagtcgggtctttacttcacagggttctttggtgggttaatgagagagcagcgaagccaatcacctaccctgccctgagcactaaggaggagctaagccctttatgttccttacctcagttgcacccccagtacagcatccccaccctgcaaatgaggacactgggactcccagaggggaagcctttgcccagagccacacagcactgtgcccggtagttggggcttgaagccatgcctgtgggctccaaaggccctggctgccctgcctctgtgggtgaggccaccttccatgtgggtttgcccatcttccccaggattggagacttgtgagggcaaagaggggatctcagtcactcaacacacattccccaagtgcctgcttcatgctggggacacagccgtagaggctccatggcccagtggaggggacagactcatcctcagctagcgaccagccggggtaggcgcctggggttagaggagccaggctgggagggctgacgtgcgggaggcaggtttgcaagtgtgactgcccacctggcttcaaagccagctgctctatgaccctgcctcggccctgcctgtgtgtggttgtggccgagtggccctgcacatgcgtgagtgtgtggacgtggtatccrtgggactctgtgggatgtgggtgttgactgcattcctctgtgagcccatggggttccgacaccgtgtgtgtccccataggtgcgtgagaggcagtgggagaggctctgggtgtgaatgcgtgaccatgtggccatgcgggattaatgccatgactggggggttctgggtgtgattgtgcgtctcttgttttgatcagaacccacttagggccaggtgcagtggctcacacctgtcatcccagcactttgggaggctgaggcaggtggatcacgaggtcagaagttcaagaccagcctggccaacatagtgaaagtccgtctctactaaaagtacaaaaattagctgagtgtggtggcaggcacctgtaatcccagctacttgggaggctgaggcaggagaatcatttgaacccaggaggcggagtcgagatggtaccagtgctctccagcctggatgacagggcaagactccrtctgaacaaagaaaaaaaagaaaaagaaaaaaagaacccacttaggaggtcgtgctagcaggtgtgacaagtgaccacatgactctggagtgtctgattattgctctgtctgtgccattatgcggcaatggctatttgtgacatgcaggtgtacagcgtgggggtgcaagkttccaaaacaggcccagtgcccaccctcactgagtgctcattgkctggggagacaggcacgtgacygtcgtgatggcggaggcagggctgctggtcctgctcatgcttccgtctgccccccgaccccgtctctcctccccgccagattctgtgctgaacgcctccggtccctgctgcatactctggagatcaccgaccttgctgacttctccccgctcaccctccttgctaactttgccacccttgtcagcacctacgccaaaggtaagctcacctttttctgtccctgctgggcctcctagcagctggaatcagggtcccagcagggtctagagggttgttggcaggacacacagggctttgtggggtttggcttggaagtgtgggccctattttgaaggcagtggggagccatacatagttcttgagtaagccttgtgctcagatttacattttcacagacttcctcgggctgcagagtggagaaggatggcatgggcagtggtaagggaggaggccagagaaattctatggggtcagctcacactagagggcacggtaatgagttgatctttgtgctcctgagggcactggggagccatggcagattctagcaagcaaggtgccaggtcagatttgtgcttttttttttttttttgagacggagtcttgctctgttgccaggctggagtgcagtggtgtgatcttggctcactgcagcctctgcctcctgggttcaagcaattctcctgcctcagcctcccgagtatctgggactacaggcgcatgccactatacccagctaatttttgtatttttagtagaggtggggtttcaccatgttggccaggacggtctcgatctcctgacctcatgatccaccggcctcggcctcccaaagtgctgggattacaggcgtgagccaccatgcccggcccagagttgtgctttggaaagatttcttctgggtgctgaacgcagtggctcatgcctgtaatcccagcactttggaatggttaggcaggcagatgacctgaggtcaggagttcgagactggcctggtgaacatggcgaaaccccatctttactaaaaatacaaaaattagctggggccagacatggtggctcacgcccataatcccagcagtttggggggccgaggtgggcagatcacttgaggtcaggagtttgagaccagcctgaccaacatggtgaaaccctgtctctactaaaaatacaacaatttgccaggtgtgatggtgggctcctgtaatcccagctacttgagaggctgaggcaggagaattgcttgagcccaggaggcagaggttacagtgagccaagattgtggcactgcactccagcctgggcaacagagcaagacttcgtctcaaaaaaaaaaaaaaggccgggcgtggtggtttacgcctgtaatcccagtactttgggaggccgaggcgggcggatctcgaggtcaggagatcaagaccatcctggctaacatggtgaaactccgtctctactaaaaatacaaaaaaagttagctgggcgtggtggcgggcgcctgtagtcccagctgctcaggaggctgaggcaggagaatggcgtgaacccaggaggcagagcttgcagtgagccgagatcgtgccactgcactccagcctgggcgacagagcgaagactccgtctcaaaaaaaaaaaagaaaaaaaataggcctggcatagtggctcatgtctgtaatcccagcactttgggaggctgaggtgggtggatcacctgaggtcaggagttcgagaccagcctgaccaatatggtgaaaccccgtctctactaaaaatacaaaaattagctggacgtggtggcaygcrcctrtagtyccarctactcaggagcctgagacaggagaattgcttgaacccgggaggcggaggttgcagtgagccgagatcacaccagctgcactccagcctgggtgaaaatgagagtctgtctcaaaaaaaaaaaaagagttcttctggcagggactagaggcaggagactgggtggcaggcagggacctgagcaggaggggaggggccttggccaggatgtggccatggggagagagaaaggtatggtttggagagagatgtgggaggtagagaggctgggatatggggagcgtggtgcctgggttttgggaccagggacaagaggagtagaggctgatgttcagattttcaggttacgagagagggacatcattctggaggctttatgggccggtgttccctccccatcctcagcgtgaagctgaccaggggctcaktctgcctcctgggggtttctcctgtacccaggaaaccagatcgggcctcatgtcctgcggcagggcctgacaggaggatggagatctgggcccttgccctggggctgggtagcgaggccggctggctgctgcttctgcctctgtctctctgtcctgccccatcttccatccctacctttgtcattctctacccactatttcccatctgccaacacctcatgktctttcacctggatcatccttcctcatcttcctcatcccccaaccacctccccctcatccttaggytctcagcttagtagagatgtcttgtcctccaggaagccctccctgacccccaggctgagtcaggcccctcctctgggcacctctgtcccagcactgcccactctcagtcatcactatctgaggacaagtctgtctcctactggactgcgaacccatgcgagcaggggcaaggctggcttggtcaccactgtgtccccagcacagaggacttgattttttttcactgtgtgaaaccgaatatgtaaattcattcattcatttatttcttcaacaaacaggccaggctcagcactgtggaagcagcaggaaccaaaaaagatctcatccctaaccccccagaacttatattccagatgggaaaaccagtagcaaagatgcagccaaataaacaaggaaataattccagaaagtgacagttatcatgaaaaaaaatacattgttgtgttggaatatgtctgcgtagaaaaggtggctggggagggcctctcggaggggctgacttttgagcagtctcagatgaccaaatggagcagccttgggaggttttccaggccacatgggaccagcaagtataaaggccctggggggactgagcctgctgatttttgaaggtcaggcaccaggccactggaggcatgtgggggccatgggaggcttcttggggcggggaggtgacatggctggactcagggactcaggtttccctagggtccctctggctgccgtgaagcgagcaggggatgatgggtccaggcaggaggtgatggtggctggccccgcgtggggtcgggggcagtgggcgaattgcaggtaggttttggaggcagagctgcccggctttgctgatggcttaggtagaaaggtcgtgggaggccaggtgcagtggctcatacttgtaatcctggcactttgggagcctgaggcgggtggaccactgcaggtcccccatctctactaaaaatgtagaaattagctgggtgtgttgtaggggggtgtycctataatcccagctactcaagaggctgaggcaggagaatcaatcacttgaacccaggaggctgagcttgcagtgagccgagatcatgccactgcactctagcctgrgcgacagcgcgaggctccatctcaaaaaacaaaaacaagaaaaggtcatgggagaaagcttgaggctctggctcctggctttggcgtgggtgctgggcagcccatgcggtgctgggagagtgagcagtgggcrgggctgtgggctctctacttgggatccttcgtgaaagtttgcacaggtgtgggcccgaagcggacaggttggggtgtattttggactcagatgcctggtttggggcttaagcagtcatgtttggtcgcatttactcccaggcagtacggggtggagattggggtgaagcgagggagcaggagagggaatgactgagtgggtgcagctgtggctgtagtggggtaatctcacccctccttgcctgccctctgcaggcttcaccatcatcatcgagccctttgacgacagaaccccgaccattgccaaccccatcctgcacttcaggtgggaccctgcccggtgagggtgtgaatgctctgtgggtcgggggcccagccccccgggccctcactgccctcatctctctccagctgcatggacgcctcgctggccatcaaacccgtatttgagcgtttccagtctgtcatcatcacatctggggtaaggacccttcccsgtcccctcctagtccctgacctccctccatgggcctcctggtccctgcccagtcctgctgagatccctcccactgtcccgccacagacastgtccccgctggacatctaccccaagatcctggacttccaccccgtcaccatggcaaccttcaccatgacgctggcasgggtctgcctctgccctatggtgagtgggagaggctagggctggggccgggaggggagatgggggcaaggggccgccctccttccttggcttcccccactgctcaggcaggagagctttacagcgaagaggctgggttcgggattcagacagacttaggcttgattctgcttctctgtgggctcgactctcaagcctcagttttctcatctgtgaaatgggaatgtatcctccctgatctcccagggtggttgagaggattgagagagagaactggggtaaaccacttaggtcgcccagggcctggcacaggtaggcgcttagtcagcatcttagcatcttgccgagtacgtggtctggctgtgacccaggtaagtgagccttcctctccgtctccgtctctgtaacacgtgcatgtcaacatgagccctcagtcccttatctgaagtccccaggctggatgtggttttttgtttttgttgtgcgacggagtcttgctctgttgcccaggctggagtgcagtggcacggatctcagctcactgcaacctccgcctcctggattcaggtgattctgatgcttcagcctcctgagtagctggtacaggcatgtgccacgatgcccagctaatttttgtaattttagtagagacggggtttcaccaygttggccaggctggtctgaaactcctgacctcaagtgatccgcccgcctggtcctcccgaagtgctgggattacaggtgtaagccactgcgcgcagccatttgttttggaattcagaattttccagcctttagagacaaggcctatgctgtgtggtgtgtgatgcccacagtggggtctgggcagctcccccgagtcaaactcccatttcggcagtaaaagattgggaagcatcacactaaggagtaagtcaggcctctggagagactcggggcagggcaggttttgctgcttcatgagtttgtgccaaacttgaaaaagaaatgtgttcagagcttttggcttttggagttgcctgtcagaggttgtggaccggtaatgacccccactgcatggtggttgtgtgaggttgccggctggtgggatgcccgccggcatggcgaggggtgttcttcgggatccggctggcccagggcctggggctggctagagtgtagctgctgttggagagtgtggacagactcgggtccrgttccatctttgccacctgtttgctgtgtgaccttgggcaggcaactcaccttctctgagcccaggtcatttgtgcaatgcagataacagggttgctgagggttcattcaatgacactgtgtttataaaaagtttagagcagactgggtgtggtggctcatgcttgtaatcccagcactctgggaggccaaggcgggatggtcacttgaggccaggtgttcaagatcagcctgggcaacatggtgacaccctgtctctctttaaaaaaaaaaaaaaaaaaagcttagaacagcaccagcaggtggtcagcactcacgctggagcagttgctgctgcctcgcttatcgtgacctctgttgctctccagatcatcggccgtggcaatgaccaggtggccatcagctccaaatttgagacccrggaggatattggtatgctgccagtggggctggtttctgtgggttccaagaggggaggtgtatcagtcaggtgggctgagtcatgctgctgtaacaaatatccctggccttagttgctcagcccagagtttccttcttgcccgtggtacacgtccactgtgagctggtaggggcctgccctgtgtctcctcacctgggaacctccaccgctgggtgtgtcagaggcagcataatgtgacaggtgggatcacagtggtcacagtgtattgtgcactggttcctaagggtgctcccctggaagtgacacatggcctttttttgagacagagtcttgctctgttgcctaggctggagtgcagtggcatgatctcggctcactgcagtctctgccttgcgggttcaagcgattctcatgcctcagcctcccgagtagctgggattacaggcctctgccgccacgctgggctaatttttgtatttttagtagagatggggtttcgccatgttggccaggctgatctcaaactcctgacttcagatgatccacccgcctcggcctcccaaagtgctgggattacaggcgtgagccacagcgcccggccccttctgcactcatttcattggccatggcaaatcacatagccaggtgtgacttcaggaagtggcaaggcgggtcctcagacacgccygggaggaggaggagggggatatgtgtgaaaagcctgacaggcagcctcagtggggtttccagaaactcctagttctaagacagagaagggaggaggacctgggccaggagagggcccaacctctgaccccttgcagctgtgatccggaactatgggaacctcctgctggagatgtccgctgtggtccctgatggcatcgtggccttcttcaccmgctrccagtacatggagagcaccgtggcctcctggtatgagcaggtacgcctggccaccccctccctgcacctgctctcctcagtccctggcactgcacygctatgtcagcttcattcctctcacactctgatggtgacaggtttcctgtgtgacaggagagtgygtgcagcatgtaggaatggggtgtaagcagcacacacccccatgccycgcccccagtacatcaggctgagaatgcagatataagccccaatgtgggcccctccctcagaggagtaccctgtggcagagtcacccccacgttctaggttccttgcttctctgctgcttttggggttacccatccctgttatcctccagcacagatggcctggtggggaggcccagatagcaggcgtggctctagctgggttagaggaattctagagaattaaggctggaccaagactcggggcgagcctctcaagggtctgcaggagccccttcagggaagcagctagaggaggtcgtggggcattctggaaacagggctcaccacagccaggccctgggtgaccagcaggacatgggtgggaggggaggccactctgcactttgtgcctctgagcacaccatggccgggctctcaggagtgggtgaaagcactttggggtgaggtgagtgaacttggctaatccaggtattggaaaggcacgcatgggaggcgggaacgtcatcctcacagccaggacatcggccttgtgcttcaataggcggcttccacgcggcgggaaaggtgacccagtccccacagcscaggtgccttttgtgtcctacttaagacacctttgcctaccccaaggtcatagagagaggctcctttgtttccttctaggagcttgtggttttagctttcacatccaggtctatgaggtacctcaaattcatctttctatgtggtgtgaagtarggggtcaaggttcattttttggttccatttgraaatccacttgctccagtaaaagctctccccactgaactgcacaggtggctgtgtgtttctggactctccattctgtcccagtggtctgtccttgcattggctccacactgtctctattgtastgtcatatgggaagtctcagggcagcctctgattggctctgcctgcctcacagtcagcccctccaccaatcgctggcaggggttggggtgccctgattggccacccgcttgggccacatgcctgccccacttatccagcaatgattggttccccacccagatcactgtttcsccaaagaactgaggttggacaattccaccctccctcaccacatctcagatgagccagctgaggcccagagacatggtgatgtgggagtccccagaagagttggatgtaaccaggatggctgtgccctgaacccaccctgacctccctgggtccttccccaggggatccttgagaacatccagaggaacaagctgctctttattgagacccaggatggtgccgaaaccagtgtcgccctggagaagtaccaggaggtgggtgtgcgaggccagcgtggagaggggtsggggaggtggctctgaggagtgacctaacttgcgtctcggtctccccacctcaggcctgcgagaatggccscgggsccatcctgctgtcagtggcccggggcaaagtgtccgagggaatcgactttggtgagtggactgggctcttcctccccaggtgtcttcccagagctctctggaacacctgcccgctctgctgtctgctcccgcggggaaccacccacccccagcctaggtgcacagaggggccctcccctcccctctgtccctaggcacccggcgggaacacaccctctccccccaactcagacacagcatcctgggtygcgtgaggctgtccctgtcccaccagccacacttgtaacccccytcgccccctctcctctgccyaccagtgcaccactacgggysggccgtcatcatgtttggcgtcccctacgtctacacacagagccgcattctcaaggtgagtagctctgtctcccagggagtcccacagtgttaggatcaagggaggagtggctcccccacctccccagcttctcatcctccgtatctgcaggygcggctggaatacctgcgggaccagttccagattcgtgagaatgactttcttaccttcgatgccatgbrccacgcggcccagygtgtgggtygggccatcaggggcaagacggactacggcctcatggtctttgccracaaggtgcagcttcaggggtgcccctgtgctcccatcccaggctccaagaaccaggctgtttcccgttcatttcccaggtggggtgggttgcagggtggagagtggcccaggctccccgaatgaccttctgtccctggcctgcgcttctgcccacagyrgtttgcccgtggggacaagcgggggaagctgccccgctggatccaggagcacctcacagatgccaacctcaacctgaccgtggaygagsgtgtccaggtggccaagtacttcctgcggcagatgscayagcccttccaccgggtgaggcctgcgtccccctcccggcaccctcccaggctgagcttctcctccagaaagtccccttggattctccccactccccaccctcagcctgcctgtcctcctgccctcagcaaagagaagtttatcgtgcatctacgtgccaggcyctggggggaagggggagattcgaggggccacagatgccagcaggtggcccaggcamggcagggtgagagaagttggggtgaggaggcattgggcgttttcaggagagacggtgctggcctggagaaagccggtccttctccgactccctagctggctcctccctcagccccatcttatgttgacagggatggcccgctctggattatacggacatctccaaattcattcaaacatcctgtccctactggccattcggsggggtggttggggaagtgcagcagctgcctgggcccctgcccaacagtgcccccctctccctttcctctgttctctgcaggaggatcagctgggcctgtccctgctcagcctggagcagctagaatcagaggagacgctgmagaggatagagcagattgctcagcagctctgagtggggcgggtggggccataaacggttcctggtgactcctgagtcttgcctggccctggttcccagcggcggtggtgctagaaggtcttatgaagtcaggtgacatttctcactgtcacgtccacagcctttaatcgcaggagaaggcagctatccaccaggtacccagasgcaagggggggccaggagatgatagaccccctctcaccccaccagcccatccctcctgcactgttcccaagaagctgcggccagcgcagttcactggacgttagtgggggctcaggtcctgggtgctggcgctgagggtccgaggggccttgtccaggtgccagctgggaaactggagacaggcacaggggatggttggaggggdggggcaagtgttacatccaccctccagctccaggtccagcctggcagccaactatccaaccccctcgcctctaccccaagtaaaacccatctttgctcctgtcctgggtctcttctgacaccaacccaccacctgctgactccaccactggcccgaccgccctgcctttgcctcatctctgcacctacccacatggcctcctctatttttgacccagatgtccccctcacctgagtcccaggagcccttggagcatccacgttcagtgtgttgagtgacatggctctcttcattctgcaaagagggcagcagggaggaaatgagtgaatccaggagtggcccccctccacgagggacctttccagcacagggtttgatctgtgtgtatcacaggggagatgggagccatggaaggttcttgagcaagatgggggtgggggtggggtgggctgtggattctgctgatgtcagggctctttgccgacctgatcaacactcacccggctgctcctgccgccgcctcgcctcggagccgggagaccagcttctcacttcctcgcctgatagactcacggatcttggagagtgagctgctgcggcgaagggcctggggaggggccggggatgctgctcagtcccccaggcccatgcagtccccacgcccaccccaggagccgaagcacagcccatcctcacctgttctgcgtcaccagctgtgcctgtgttgggggcacctagggggaaagatgggggacactgagatggggacatagagaagccaccaggagggaagacagacaggggctaggggctcaccgagaggggcgggtaggtcctccttgtggaggatttctttgtacagctcttccgcttgttgatacttgttctgtttcaggtaggctgaggcctgcggagaagggagtgtctgggaacttttcggaccccagttcccaacactgcatccagtcccgccttttttttttttttgtagagacaggggtcttggtatgttgcccaggctggtcttgaactcctagcctcaagtgatcctcctgccttggcctcccaaagtgttggggttacaagcgtgagccaccacgtctggccccactttctaatgtgctgacctggccgtatccttcccctgcctaaagccttgccctggggcagagtgggtttggagctcggccttacttcctgccctggggatggaggacaggcagcctcctgtttctgagcctgtctgctgtactttgggctggtggcatggcctcggtgcctcagtcttcccacacgcaaagtggagcgacagctcccacctcatagggacgctataagaactagcgatgtggggaccgggctaagaggggagccggccacagtgagctcaataaatgtctgctgctgccatctgtgcctgccagcttccgcttcactggctgtcctctggctgccgtggacttacgcgtttcctgattccgtgttctgtgctgagccagctcctgtgtctgacacttgctccaagggcccggcctggggggcccccccccaccctcacgttgctcaccctgtatccaaccaatgggtgcctccccagggcaggaccctccactcttggcccactctgagccccaggggcctcaccaggttgttcttggtcttggccacgttggggtcatggggcccgcccagtgcctcatagatgctcagggcccgggcatagtgccgctccacgtcctcaaacttgccctggttctggcacagcagggccaggttgttgagctgcttggccacatctgggtggtcagcacccaggacctgggggccaggggtcacaagtcagagggatcatacaggattggtgggacacgtgacatcactgctgtatggtggtcatgagttggggattacagggtcaaagcagagagtgacctgagaggttgggggctggggacacaagttataccatctaacgggattaccaaggtcagaggtcatggtggtccagaaacgtggggcacagggtgagatgggtaggtcagggttgggcttgtgctggtggccatgaggggttggaaaggctatggggggacccagttggagggtgatgtgtgaggtaaggcgagaggtcagtcagggtcaagaccaaactgggatctcagaaggtcaagggtgatgggttgggtgatctaggctccaactggggtctcccaataccaaacgcaaggggcccgagggtcagggtcacgatgtacgtgctcagcatccctggggagggctacatgggacaaggggttcctcggggtggggtgagggggatgggaccttctctcggatctccaaagcgcgctggcacaggggctctgcctcccggtaacgcccacgcttcccatagaggacagccaagttgttgagcgtggcggccacctgcggggttgggggaggcacaggtcagggatgggcaggtgtggccccactttgaccccacttcgtctccctggggccccactcaccgcggggtgctcagggcccagcgtctgctcccggatctgcagggcatcatggagaaggtctgtggcttctttgtacttgttctggtccctgtggggggcgccccaggaatggagggggttagccaagggttggggcagctgcagccacaggggctgggccaatcctgacaggcccagggaacctggctgaaccaagcatgggtggcacaccctttgagggccttttgtgggcccctccatatttcgcaattctctaacactgggccctgtacccccagacctctgccaagcttctagccaccccaggtctcctgcctgctctgttggggtccctggtgtccgtgctctctgactcctctctgcctggctcagtggcccccccagatccctgtcccactccctctttgccgttctcacagcaggagccttcccttcctttcccattcttgctgtcccctcccctgacctccctaggtgctccatggtgacagagggggcaccaggatccttccacttgcacccaatgggtccctgccgttcctgcccccagccatggctggccgcagtgctcaccggtacaccagcgccaggatgttgagcatggtggccacgtcagggtggcagtggcccgagctgcgctccaggtcctccaaggcctggcggcacagaggcaccgccacctcatagcggccctgccccgcgtactggatcacgaggttatgcagggtccgaaggcgggcagggatctcatagccaccctgctgagcagctgctgctcctgcggcctcaggacctaggtggggtggggtgggctctgggtcactgcaagcctcctgcccctccagcctcgcatgaggggacacgtgcctcagaactgccggactgcctaactggcccctgggactatgggcccccacgctaacttctgagataggagtcactagcatctaaccagctggtgggatgcatcctggcctcgggacaggaacacggcagcccacctgccctgtgggatgtgaatacggggcctgccaggctcatagcggctaccctgtctttgtggctcccagcctcacctgcactgtcacattcagggtcctcctcaccctgccctcacctccccatcccctggctcagagattttggggtcctgcagctcagagccccctccccaccctggcctgccatcctctgtggcatgtactcccaacacccacctttcctctcctcctcctcgctggggaacagggaggccaggctgtctcggcgaggcggggactcagactgctgcagagacaggaaagtggggggccggggtggtgggggcttgtttcagagaccggggccctggctctatctcaggtttttgtttttttgttttttttttttttttgagacggagtttcgcttgttgcacaggctggagtgcaatggtgcgatcttggctcacagcaacctccacctcctgggttcaagccattctcctgcctcagcttccggagtagctgggattacaggcatgtgccaccacacccggctaattttgtatttttagtagagacggggtttctccatgttggtcatgctggtcttgaaatccggacctcaggtgatctgctcgcctcggcctcccaaagtgttgggattacaggcgtgagccaccgcacccagcctatctcaaggtttgagggaggtggtggtcacgagcgtcagaggccccctgggggtctggcgaggctcgggggcttcgtggagtagctagtgggggcgtctgtggaagttctggtgggtctgggggctctgtggagggttgggggactgtggcattctaaggagggtctgggggactgtgggattctaaggaggatcttggggactgtgggattctaaggagggtctgggggactgtggggctctatgaagggcccagcaccccccgcctcgccctgcccgtggcacctggctctccgccggtgggtcgtactgtcgcagctgccccaggaactccaggtggcgcttctcctcctccagctgggccacggactcctcgctggcccgaagccgccgctgcgtctcctccagctcctcccgcagccacacgttctcctgggccagccgccgggcctgcgagcgcagccgctgcttctctgcctccagtgcacccacatgtgccgacagggccagcagcacctgcccggggtgggggtcccaagtcgaggttggttcctgccctgccagacagcccctgacccagcccaggcctcgagtcaggccgtagcaccccactactatgcacgacacgcccagattctgcagagactctgccaacatggccccagtgccctcagaggctcccaggggcccctctgattttacccccaaacttgccctaggacccacagtttactgaagaatgccatctggttcaggggtccctgtcacacacaaggaccccctaaagctgccaagggactccatctctgacctggagcctccccttcccaggcctggttcccctaggcctccccctgccccggatgtgcctctctgccatacttttttctgttgttttttgggacagtctctctctgtcacccagactggagtggaatggcacgatctccactcactgcaacctccgcctcccaggttcaagcgattctcatgcctcagcctcctgagtagccgggattacaggagccctcatgcccagctactttttgtatttttagtagagatggggttttcccatgttggccaggctggtcttgaactcctgacctcaagtgatctgcccacctcagcctcccaaagtgtgcccctctgcaatagtgaacccctctcccagtcccctacatacctgtccccctcatgcctggccctccctccgccctcagctgaccttcccccagctccccacctggccccctcatacctgggcctcgcccagccccagctcgatggcctccagcgagtggctcaccacctgctgcttttcctccagcatctccaagccggctgccgggccctgtcccgccagggcctccgccaggtgcccagccaggccatggtgctctgcccgcagcgcctccagcccctggaccacttgccgcgtctgccgcaccagctcctcagggctcaggcgctctgggcccagccctgcacttccaggagccgctacctgcacagacattgctgctcctggggagcaatggtgaggggtttggggaatcattgcccgggccagtcagttggcccccagcctctattcccataatggccatcaggacccctaacttctccccatcctggctcttccctgctccacccatcctggccagccctctgcctccacaccctctccatcccagtctccacacccatcccagccagctctcatctggaacagtcttgtctaccttcgtctgtcctcccaacccagggttctgccctgaggacagttcccaaatcctatgtgtaattaaccaagagaaagcaaacagctagcctggggtcccccatctgccctcagctcacctggccagccttccccaccccaaggcccttggatcccctggcccagagctcccggttggccgtgtgacctgggaccagaggcaccctcctctgccggcagagtgaggcggggcgtgtggaggcggcagcctctgcgtgagctcattcttagggtgtttttgtcgggaaccagtcagaccactgggggtgggtggggtgggaggagaggg

SEQ ID NO: 94893 - DNA, 23351 bp, Homo sapiens
agggctggacacacagggggcatttgggggatgtttgctgaaggaacaaacataaagaaaggctgaaagatacacatatataatttttgagatggagtctcactctgtcacccaggctacagtacagtggggccatctcagctcactgcaacctccatctccggggttcaagcaattctcctgccccagcctcctgagtagctgggattacaggtgcctgccaccatgccctgttaatttttgtatttttagtagagacggggtttcaccatgttggccaggctgatctcaaactcctgacctcaggtgatccacccgccttggcctcccaaagtgttgggattacaggtgtgagacaccacgcccagccagtttttgtatttttagtagagacagcgttttaccatgttggccaggctggtctcgaattcctgacctcaggtgatctgcccgcctccacctcccaaagtactgggattacaggtgtgagccaccatgcctggccccaaaagatactttggtcaagcgaggccaattcattataagaggtagagaagagagcaacagagtgacaaggagaagctcaggaagattaaagcaggagagctaaaatgttctccagagccacaactgggcgctcatttccatgcaaactgtttgctttgcagatggagaaagtgaggcctcgatggggcagagccagggcctctccacttgctcaggggtcctgctcccaccattcagtccgataccagctgcctcccccaagccctcctgaatccaccccactcccaaggctctggaaacagataccactagaaaaaaacacagagctttattattctcaacaccaatggcagcggtcttcataggacagaggagtgagttctgtcaacagacaggcggcccctacttgccggcgatgagcgggttccgcaggaccacgatgactgagtccccgcgcaggaacatcttggagatgtagcggtctttgttgactggcttggacttcttcttgcccttgccacycttgggtacctcagtccacatctccttcacgttctccagcaccatgttgcagtgcctggtggggaacagggaggggaggcactgggcgtgrggggcgtgcctctgacagtgccccctactgcctgctgctcgccccctccagcagcatggcttggggaagggtgcaggtgctaggccgggatgaccaagctgccaaagcaactctgccagtccttaggttgaggctgaggcaaaggactgcacctctctgtgccagtttgctcctttttaagagggaagataatsacgttaccttcctcacagggccattgaaaattatcattttcttttttgagacagaatctcactctgttgcccaggctgcaatgcagtggtgcgatttcagctcaccacaacctccgcctcctgggttcaggctattcttgtgcctcggccacctgagtagctgtgaatacaggcgtgcaccaccacgcctggcttttatatttttagtagagatggggtttcgccattttagctaagctggtcttgaactcctgacctcaggtgatctacccgccttgccttcccaaagtgctgggattacaggcatgagccaccacgcctggccatacaccccaggcttctgagacagctgtctttgagctcttcagactggagctggagtggcctctccaggcctgcggagaacacctcccaggacccagcactcacctatcgaaggccttcacgcggcccaggagtttcttattrttgcggcagttgatgagcacttgggtattgttcttgactgactgtgtgagcacagagagtggaccggtgttaaattcctmctcctctcgcttctgcagctcctctggggtcatctcactcttgggcttgttgaggaggctcctgcatggacaaacatggaaccaataagtgagagaggctggagttgagaggctggagctgtgaggatgggtgatcagggccttggcttcagtgtctccccaaccttgtcccaccacatctgtcctcctgttcagccttctgagtatcatcagctagatgcctaacagacattttttttttttttgagacggagtcttgatctgttgcccaggctggagcgcagtgatgtgatctcggctcactgcaacctctgcctcctgggttcaagcgattctcctgcctcagcctcctgaggagctgggactacaggcatgcaccacctccacgcccagctaatttttgtattttagtaaacagggggtttcaccatgttggccaggatggtcttgatttcttgaccttgtgatccacccgcctcgacctcccaaagtgctgagattataggcgtgagccaccgtgcccagccagacattttcaactctgcatgtctcaggtcgggatccagatcacccaaccacccaagcctaccctatctacagcgttccccatctgctttgatggtaactccatccttctagttctctgggcaaaaactcttttgtcaacttgattcctctttttccctcacatcctacatgaaatctgtaggaaatggccgtttcttaccatggcctaagcctctgtcatctctgtcctggaatctttctggtctctctgcctccacccacgttccctgacagtctgttctccacagagtggtctgagggggttgtgctaaaacctaaatcataacatgtcactcttcaaaaccctcccagggtatgggtacagtggctcatgcctgtaatcctagcactttaggaggtcaaggtggattgatcacttgatgtgaggagttcgagaccagcctggccaacatggtgaaaccccatttctactaaaaatacaaaacaaaacaaaacaaaacaacaataaaaaaaacaaccaacagaaaattagccaggcgtggtggtgcacgcctgtaatctcagctactcgggaggttaaagtagaagaattgcttgaactcagagagtcggaggttgcagtgaagtgagatcatgccactgcactccagcctgggtgacagagcgagactcttgtctcaaaaaataaataaatacaaattagaaaatacaaaaattaggccagatgcgatggctcacgcctgtaatcccagcactttgggaggccgacgcgaggtggatcgcctgagctcaggagttcgagaccacccagggcaagatggtgaaaccctgtctcttctaaaaatgcaaacaaattaaccaggtgtggtggcgcatccctctagtcccagctacttgggaggctgaggcagcagaaacgcttgagccccagcagcgaaggttgcagtgagccaagattgcgccactgcactccagcttgggctacagagtgagactccatctcaaaaaaaaaattaggccgggcgcggtggctcacgcctgtaatcccagcactttgggaggccgaggcgggcggatcacgaggtcaggagatcgagaccatcctggctaacacggtgaaaccccgtctctactgaaaatacaaaaaattagccgggcgaggtggcgggcgcctgtagtcccagctactcgggaggctgaggcaggagaatggcgtgaaccccagggggcggaggctgcagtgagccgagattgcgccactgcactccagcctgggcgacagcgagactccgtctcaaaaaaaaaaaaaaaaaaaaaaattagctgggcatggtggcgcatgcttgtaatcctagctactttgaaggctgaggcaggaagatcgcttgaacccaggagacagagctcgtgctactacactccaatctgggtgacagagcgagactccatctcaaacaaacaaaacaaaagaaaaccctcccatcctccccccatctcagtgtagaaagtaaaaccccgaccagacacggtggctcacacctgtaatcccagcactttggaaggtcgaggcgggtggatcatttgaggtcaggagtttgagaccagcttggccaacatggtgaaacctggtctctactaaaaatacgaaagttagctgggcatggtggtgggtgcctgtaatcctagctactcgggaggctgaggcaggagaatcgcttcaactcaggcggcggaggttgcagtgagctgagatcgcaccattgcactacagcctgagcaacagagcaaggctccgtctcaaaaaaaaaaaaaaaaagaaaaagagaaaaagatttttcttttcccttggggactagaggtttcattcactgatgtatcctatgtagcttaagcagtgtctgatacataagcattcaatgtaatatctgctgcactaataaatgcgcaaaatcatgtcaatgactcgttcgttatccgtgtaagttgtgaatcaagtcgaaaacgcacccgtctccagctcaaatgatcaagataagtcccttatttcaaataattatttctaaaagtcctaacttccctcccccattattcgttttatttcttttgtttcgttttgagatggagtcttactctgtcgctcaggctggaagtgcagtggcgcaatctcggctcactgcaacctccgcctcccgggttcaagcgatcctccggcctcagcctcccgaatagctgcaattacaggcgcccgccactacggccggctaatttttgtatttttgttagagacggggtttcaccacaatggccaggctggtctcaaactcctgacctcaggtgatccgcccgcctcggcctcccaaagtgctgggatttacaaacctgagccaccgcgctcggcctcccccagtattcgtaaaatcgctgccccttaacattcatttcaataggactaattatctaggaccactcccgttatcgtttaaaacatgtttttcataattaaattttttttttttttttgtagagacgggggtctcgctatgttgcctaggctagtctcgaactcctgtgttccagcgatgctccgccttggcctactaaagtgctgggatcacaggaatgagcccccgcgcccagcccagggcgttatctgataaagctgtcccctctcccgaagtcacgatgcgtcaaaggccccacgcccgttctcaaactcatcaggagaaaagcaggacgctgcatccctaaaacatctgcccctgccccccccgctctgctcaacccttcccacactcaatcggtcaaatatccaccctcaacctcattcccgccgcctaagcctagcccggcctcacatgatggtcactacgctctccgttcactcccgtttcctccgcgttgctgctgcctgaggagagagaggcgggacttcctcttcctgcgacccacttccgttggcgcctgcgcaaagccaaccagtaagtggaggcgtggcctgttgccacagcattccccaccaacggtgcacaatgatggaataaaagcttcgggtaggggttcgcggccagtcagaaccacacgggggcagatgtttatgacaatgaagacaaaaggaaaggcggtctgattcaaaccgtttcttgaagaatggtacaggttgaaggagggaaatgacaagctatttccaaatgcccgccggccgtgacttcgggggcgcggcctccgtgaagccaatccgctcctcgcttcggagacaggcaccgcccctcttccctctgggacgcgttactgacgtatctactgatctttccgaccctgcgccaccaatcccctgcctacatccggaaggggcatggacctgcgcccgggagatcgaatattttccatgatcaaacgctgttcattggctttccctcctccgctaaggcggagcctacttctcttgcgctcccatttgggtcgtgccattctcaggggaaccaaccccaatacctaagggaggctgggaggcgtgtcctcaggaccgtagttcttattggtttcgctgctcgctgtggggtgggctggtgcagccgcagctgttgcttattggcccaccgattccatggggaggaacttggctgggcctaaactcaatccgtggtctggtacaggtttcagggcaaagcggccatgcgttccgggggccgcgggcgaccccgcctgcggctgggggaacgtggcctcatggagccactcttgccgccgaagcgccgcctgctaccgcgggttcggctcttgcctctgttgctggcgctggccgtgggctcggcgttctacaccatttggagcggctggcaccgcaggactgaggagctgccgctgggccgggagctgcgggtgaggctgggcggggacccgggcaccgcggggaccctcattccctccccgctgttacccagggttgacgtggctttagcgtacggccctaaccgcagatgccaccgtcttcgtcatctgagcgcatgacccttaccaaaggaataaggcttcgggctggttctgcaacagtagcttccttttaagaggaaaggtctgaaatagtaagacgggggggttcagggttctacgcctttagtcaactatttggaagagtcccttcctccatctcccctctctctcactgggcctcgatttccccatcaagtttgaggtaggctggaccggatggtcttggaaggacttttcctgagccttggatttatcctagaagtctccgatgctggaggcggcagattaggaagagaacccggggctcctcgcgggtgacggcgcccggggtagggttgaaatgggggggttgctstcattcttcccttccctatcccacctccttcccaaggtcccattgatcggaagcctccccgaagcccggctgcggagggtggtgggacaactggatccacagcgtctctggagcacttatctgcgccccctgctggttgtgcgaaccccgggcagcccgggaaatctccaagtcagaaaggtaaagggacccacctccagtccctgaccccctagccctccagggaatgggaaataagaatcctgttcaagatcccaaagaagctaagaggaggaactggggctctgactggagttaatcggactctagactccatgctggtaacaaaccaccaggctgtactgccccccttaatgcccccaccaaaagcttactgtgtgctaggcataggcaacagacagccctataaggtgggtaccaatatgatcttcattatgcagatggggaaactgaggctcagagaggttatacacattgcacaaatcctacagataataagtagtagaccttagccgggtgcagtggctcatgcctgtaatcccagcactttgggaagccaaggtggaagaatcacctgagaagtttgagactagcctagtcaacctagtgagacccaatgtttagaaaatcatagacctagagttgaacccaaacaggttggctccgagctggtgctgtaatgtatctgttgtcttccagaaagcatgaagagtcatttaaaggccaggcgcagtggttcacacctctaatcccagcactttgggaggccgagacaggcagatccctygagatcaggagtttgagaccagcctggccaacatggtgaaacctcatctctactaaaaatacaaaattagccaggcgtggtggtgggtacccgtagtcccagctacttgggaggctgaggcacgagaatcacttgaacccaggaggcggagactgcagtgagctgagattgcgccactgcaccccagcatgggtgacagagcgagactccatctcaaaaaaaaaaagtcacttaaatactgcctgagtcccaatgctacctcatccacttagattgtgaccttggactggtttcttttttattttattttattttattttattttgagatggagtctcacactgtcgcctgggttggagtgcagtggcgcgatctcggctcactgcaacctccacctcccaggttcaagcaaatctcatgcttcagcctcctgagtagctgggattacaggtgtgcaccaccatgcctggctaattttttgtatttttagtgagacggggtttcaccatattggccaggctggtctcaaactcctgaccttatgatccgcccacctcagcctcccaaagtgctgggattacaggcgtgagccaccgcgcccggcctggactagtttcttaacctctctgagcccatttcctcatctgtaaaatggggtcatgtattggcagtccctcccctaaatggttcctagaagagggcttagcacacagtgagagctatttaagggtaagctgtgatgagtcttgctggcttcaagaggtggggtctccccaacatctggcacccagtaggtactcaccagcactgtcaagggaatgattttaatcagagtagggggctgggcacagtggctcacatctgtaatcccaacactttgggatgctgaagcaggcagatcacttgaggtcaggagttcgaataccaggctggccaacattgtgaaaccccatctctactaaaaatacaaaaaatagccaggcgttgtagggggcgcctgtaaccccagctactcaggaggctgagtcaggagaatcacttgaagccaggaggcagaggttgcagtgagccaagatcaagccactgcactccagcctgggtgacagagcaagactccatctcaaaaaaaaaaagaaagaaagaaagaaatccattcaatcagagtggggctttagtgtcaacccatctgctctgcatggctcaggtcacgtggcccttctccccacctcctccccagtccccgtccaccctcccacctctctcttgccgctagttcctggaggccacgctgcggtccctgacagcaggttggcacgtggagctggatcccttcacagcctcaacacccctggggccagtggactttggcaatgtggtggccacactggacccaagggctgcccgtcacctcacccttgcctgccattatgactcgaagctcttcccacccggatcgaccccctttgtaggggccacggattcggctgtgccctgtgccctgctgctggagctggcccaagcacttgacctggagctgagcagggccaaaaaacaggtgaggagcaggagtcggggagggtagtgggctacctccaccttttcccaagcccccaccctcccttgcctggacatttgtcatccctctcgtcttcccactctactccacgcacagagccacagggatcttttttttttttttgagacggagtttcgctcttgttccccaggatggagtgcacatggcgagatcttggctccccgcaacctctgcctactgggttcaagcaattctcctcccaacctcaggtgatctgcccacctcggcctctcaaagtgctgggattacaggcgtgagccaccgcgcctggtcatcacagggatctttttaccttctagatgtcagattctctttcctctcccccaaaccctcccagggctcccgcctcattccagccataatccagagtccttatattggcccacgagctgtgccctgttacctctccagcctcatctcccacccctcacctcttgctcactctgctgtagccacccccacctcctctgggttcctcaaacccgcagagcttgctcccacctcagggcatctgcacttgctgtttgctttggatagaatgtgcttttctggccaggctccgtggctcacacttggaatcccagcactttgggaggttgaggtgggtggatcacaaggtcaggagttcaagaccagcctggccaacatgatgaaaccccatctctaccaaaaacacaaaaattagccaggcttggtggtgcacacctgtaaccccagctactcgggaggctgaagcagagaattgcttgaacccgggaggcggaggttgcagtgagccaaagttgcaccactgcactccagcctgggcaacagagcgagactccatctcaaaaaaaaaaaaaaattatctgggagtagtggcatgctacttgggaggctgagaggggaggatggcttgagtctaggagtttgagactgcagtgagccatgatcgtgccmctgtattctagcctgggtgacagagaccttgtctcttaaaaaaaaaaaaaagaatatgcttttcatagatatcttcctggctggctcccactcttcactcaggtgtccactccaatgtcaccccttcaaagaggccttcccggccrggcgtggtaactcgcacctgtaatcccagcactttgggaggccgaggcaggcagatcatttgaggtcagaagttcgagcccagcttgtccaacagggaaacctcatctctactaaaaatacaaaaattagctgggtatggtggtacatacctgtaatcctactacttgggaggttgagacaggaggatcacttgaaaccgagaggcggaggttgcagtgagccgagatcgcaccactgcactccagcctggatgacagagcgagattctgtctcaaaacaaacagaaaagaaaaacacaggccaggtgcggtggctcacacctgtaatcccagcactttgggaggccaaggcaggtggatcgtgaggtcaggagattgagaccatcctggctaacacagtgaaaccccgtctctactaaaaatacaaaaagttagctgggcgtggtggcgggcgcctgtagtcccagctacttgggaggctgaggcaggagaatggcgtgaactcgggaggcagagtttgcagtgagccgagatcgcgccactgtacgccagcctgggcgatacagcgagactccgtctcaaaaaaaaaaaaaaagaaagaaaaaaaagaaaagaaaagaaaaacacagatttaatcatgctcctgccctgcttaacccctctctgtgcctccccagtgtccctataacaaagcccacactccttggcccttgctaaaccttccgtacccctctcaaacctctgggaccccttccctggccatagccttgccctgtgttgctcccttggctgggaatactcttcctcctgctccattttgccaggccagttcctacccattctcatggcaaacatcccttcccaaaagacccaacgccctctccaggccaggtcatcccccagcctccttcctatgccctctcaggactctatagttcttagaagcatttgtctcaactgcatttcactgtttgtataattattcatttgtggatctatctggttcaccaaactgagcttgaggaataataatcagagataacccttatttagttatatgccaggcactgttctaagacctggattcaaaccttaccctttgaaaagaackgttattgccgggcgcggtggctcacatctgtaatcccagcactttgggaggctgaggtaggtggatcatttgaggtcaggagttcgagaccagcctggccaacatggtgaaagcttgtctctactaaaaatacaaaaattagccaggcatgatagcgggaacctgtggtcacagctgtatgggaggctgaggcaggagaatctcttgaacctgggaggtagggggtggaggttgcagtgagtcaagattgcatcattccactccagcctgggtgacagagcaagatttattctaaaaaaaacaaaaaacaaaaaaaaaacaaaaaacctcttattaaccccatttatagatgaagaaactgatccttccagaagttagtaacttccccatgcctgctttgttatgaagcagccaagtacggatttgatcccagacaactgaytcggaatctgtgctcttggctaccacgttctatgagtgaggacaccttatgtgttctcttaagcatgcaagcgggcaagaagtgtgggtatgttgaggctgagggctagtcctgagctggctctggccacccccctgctgctcccacaggcagcccyggtgaccctgcaactgctcttcttggatggtgaagaggcgctgaaggagtggggacccaaggactccctttacggttcccggcacctggcccagctcatggagtctatacctcacagccccggccccaccaggatccaggctattgtaagaccagggtcccctggcttctggcgagggagggagcaggttaagcagggctggcgtcatcctgcacgggcccctccagtcctagcctttctccttaggagctctttatgcttcttgatctcctgggagcccccaatcccaccttctacagccacttccctcgcacggtccgctggttccatcggctgaggagcattggtaagggtgaatgyggaggtgggccccagcccacctggggtatggggtacagggcggtgggctggggtaggacaggcacctacactctaaaggctcatccaccagtctgggccacatagggagaccccatcttttttttttttttttttttgagatggagtctcgctctgtcactgagactggagtgcagtggcatgatcttggctcactgcaacctccacctcccaggttcaagccattctcctgcctcagcctcccgagtagctgggactacaggcgcatgccaccatgcccagctaatttttgtattttagtagagacagagtttcactatgttggccaagctggtcttgaactcctgacctcgtgatccgtccacctcagcctcccaaagtgctgggattacaggcgtgagccaccgtgcctggtgaccccatctcttaaaaaaaaattagctgggtgcagtggcatgcacctgtcatcccagctactggggagtatccttagagcctgggaggtcaaggctatagtgagccaagattgcgccactgcactccagcctgggcaacagaatgagatcctgtctcaaaaaaataaaaaataaaaataaaataaaggctgggcttggtggctcacacctgtaatcccagcactttgagaggcgggtggatcacttgagctcaggagtttcagaccagcttgggcaatatggcgaaaccctgtctctacaaaataaaaacaaacattaggccaggcgcgatggctcacacctgtaatcccagcactttgggaggccaaagcgggtggatcacctgaggttaggagtttgagaccagcctggccaacagggcgaaaccccatctctactaaaaatacaaaaagttagctgggcgtggtgacatgtgcctgtaatcctagctattcaggaggctgaagcaggagaatggcttgaacctgggaggcggaggttgcagtgagccgagatcacgccactgcactccagcctgggcaacagagcgagactccatctcaaaaaaaaaaaaaaaaaaaaattagccaggcatggtggcacctgcctgcagtcccagtgacttgggaggctgaagtggtaggatcacttgagtctgggaggtcgaggctgcagtaagctgtgatcacaccactgcactccagcctggggacagagtgagactctgtctcaaaaaaaagtaataataaaaattaaaattaaaaaaattaaaaattgtttttaaaaataaaggcttggctgggcgcaatggttcacgcctgtaatcccaatactttgggagactaaggtaggtggatcacaaggtcaggagtttgagaccagcctggcgaatatggtaaaaccctatctctactaaaaatacaaaaattagctgggtgtggtagcgtgtgcctgtagtcctagctactccggaggctcaggcagaagaatcgcttgtacctgggagcacaggttgcagtgagctgaaattgtgccactgcactccagcctgggtgacagagcgagactctgtcactaaataaataaataaataaacaaataaataaataagaaaataaaataaaggctcacccagcctttcctctacctccctagcctttctaaggaactagagattagtaatagtgattaccagacaggggctctaaggtgagacagccgtggtttccaatcttaccagctggatgaacttggacaagtggcttcatttctttgagcctcagtttcctmtctgtaaaacggccagtgggggccgggcctggtggctcaygcctgtaatcccagcactttgggaggccgaggtgggcgaatcacaaggtcagcagttcgagaccagcttggccaatatggtgaaaccccatctctactaataatacacaaattagctgggtgtggtggtgggcgcctgtactcccagctactcaggaggctgaggcaggagaattgcttgaacccgggaggcggaggttgcagtgagccgagattgtgctactgcactccagcctggcgacagagcaagactctgtctcaaaaaaaaaaaaaaaaaaaaggccggagggcccagacatagtggctcatgcctgtagtcccagaaatttgagtgaccaaggcaggaagatcacatgaacccagaagtttgaggccagcccgggcaacacaggaagatcccatttctacacacacgcgcacacacacacacacacacaattacccaggcatgggggcatgcgcctgaagtcctagctatttgggaggctgagactgaaggatcacttaggccagcgagattaaggctgcactgagctgggattgtcccactgcactccagtgtgggtgagagagcaagatctttttttttttttttggagacagaatcttactctgtcacccaggctggagtgcagtggtgcaatctcagctcactgcaacctccacctcccaggttcaagcaattctcctgcctcagcctcccaagtagctgggattacaggcgcccaccaccacacccagctaatttttgtatttttagtagagacagggtttcaccatgttggccaagctggtttcgaactcctgacctcaggtgatccacctgccttggtctccctaagtgctgggattacaggcatgagccaccacaccaggccacaagatcttgtctcaaaaaaaagaatgtctatgtcttagactcygagggattgaatgagaccaggaacatagtgagcccacaggaaggagtaactggcattcattcttgttgggctgaccagggctttgtctctgggtgctctgccttcctctgatttgtggactggggaccttcgactactaaggactaacccttcctctctaatcgcccccacytccagagaagcgtctgcaccgtttgaacctgctgcagtctcatccccaggaagtgatgtacttccaacccggggagccctttggctctgtggaagacgaccacatccccttcctccgcagaggtaccagctgcagggagggatggagggtgggtgtccaaggaagccacaaattggaactggccaagtccccttcccagggctggggaatggtgctaagtggccttaacctctttgtgctttgatttattcatctgtaaaatggggataatactccctatcttagagtattgttgaggggattgaacatgctaacaccggtaaagaccttacttggaccagcacccagcacatagcaagcattccagaaatgtttgcagctgggcacggtggttcacagctgtaatcccagcactttgggaggctgagcggggtggcgrggggggatccttgagcccaggagtttgaaaccagcctgggcaacatggcataaatcttgtctttactaaaaatacaaaaaaattagccgggcatggtggttcacacctatagtcccagctactcgagaggctgaagtgggaggagcacttgggcctgggaagtcaaggctgcagtaagccttgattgagccactgcactctagcctggacaacagagggtgatgatatctcaaaaaaaaaaaaagtgccaggctgggcatggtggctcacacctgtaatcctagcactttgggagcctgaggcgggcagatcacctgaggtcagtagtttgagaccagcctggccaacatgatgaaaccccatctctactaaaaatacaaaaattagacaggtgtcrtggtgcctgcctataatcccagctacccgggaggctaagacggtagaatcgctggaacctgggaggcagaggctgcagtgagccgagatcacgccactgcactccagcctgggcgacagagtgagactctgtctcaaaaaaaaaaaaaaagtgccagaacatagtatctttcaccagtgtgtggtggcaaggcaaggttacctagaggttgggcttgggctcctgggttgtggtgggctgcagtggacctgacaaagtctcctctgtcacttcaggggtacccgtgctccatctcatctccacgcccttccctgctgtctggcacacccctgcggacaccgaggtcaatctccacccacccacggtacacaacttgtgccgcattctcgctgtgttcctggctgaatacctggggctctagcgtgcttggccaatgactgtggagaggactgtgagagagaaggtcccagcgggggccagtgaagctcaggcaggatctgcctagggtgtgctggtttgtccttttcatacctttgtcycctaattgtgctacaattggaagaccttctttcttttgattgtctcaagctgccacccttcaaggacagggaagagaccactgtgggatgacagccagaggaataagaacttgctccctccccagaggtaaacacttggtccaaaggtttgcagggaccaaatactgttctttttttttttgagacggagtctcactgtgttgcccaggctggagtgcagtggtgcgatctcggctcactgcaaactccgcctcctgggttcacgccattctcctgcctcagcctcccaagtagctgggactacaggtgcccgccaccacgctggctaattttttgtatttttagtagagacggggtttcaccgtgttagccaggatggtctcgatctcctgaccttgtaatccgccagcctcggcctcccaaagtgctgggattacaggtgtgagccaccgcacctggcaaaatgctgttctttaagtcagcgaactgaaaaagtaaaagactgctgggtgtggtggctcacacctgtaatcccaacactttgagaggctgagggggaaggatcacccgaggtcaggagtttgagaccagcctggtcaacatggcgaaaccctgtctctactaaaaatacaataattagctgggcatggtggtgggcgcctgtaatctcagctgcttgggaggctgaggcaggagaatcacttgtacgcaggaggcggaggttgcagtgagccaagatcacaccactgcactccagcctgggcaacagagcgagactccatctcwataaataaataaataaataaatattttttaaaaagagtaaaagactaaaagactattactggtctggcccagtgatgccacccagctagatgaattctctgtggtttgtgttgtgtcagttcattctccagaacagcagccttgctactgcaccagtcctaacctaactcccacacggggcacacagaggatgtcctcataaccaggcacagaggagacagaagctcatattttggaagtccagattcttccagacccagtgggtaataagccattgtttctggctgggcatggtggttcacacctgtaatcccagctctttgggagtcagaggcagagggatagcttgagctcaggagtttgagaccagcctgggcaacagagcatgaccccattctccagaaaaaagaaagaaaaaaaaaagcgtaaccaatgtttctgcaaaacaccacctgcataagccaggtgtggtggtgcacaccctgtagtctcagctattcaggaggctgaggtgagagaatcccatgaacccaagagttcaagaccagcctgggcaacacagtgacaccctgtctcaaaacaaacaccaccaccaccaacaacaacaaaaaaggccattctgtagaactcgtgtaaatagacattgcatgacaagggggatctgaaatccaagaagagggtgagacaacataaaatgagtttcctcactgcatcatgtgaatttttaagacagaacccagaggctcccaaagtatttcactatggaacactttttattgggaagcacttcatagaactaggatacttcggcygggcatggtgggtcacacctgaaatcccagcactttgggaggccgaggccagcagttcagctgagctcaggagttcgagagcagcctggacaacatgatgaaaccccatctctactaaaaatacaaaaattagccaggtgtggtggcatgagcctgtaatcccagctacttgggaggctgaaacaggagaattgttggaacctggtggcagaggctacagtgagccaaaatcacgccactgcactccagcctgggcaatagagcgaggctgtctcaacaaacaaacaaaatacaacaacaacaaaaagaactaggatacctcagaaggtactttggaaaacatggggttttgaaagtctgagagcatctatgagaggaatgggtaagacagatctagatttaccgcagagtagttagggcacactgtctttccccttcagctgttggtacagcactgtgagatggcagtgtaactgcaaactccaatgagcaagtatttcccaaccctacctaattttcagactcagctggggtgctcattaaaaaatgcagactgggtgcagtggctcatggctgcaatctcagcactttgagaggttgaagtgggaggatcacttgagcccaggaggtttttctttttgaggcggagtctcgctctgtcacccaggctggagcgcagtgctgcaatgctggctcactgcaacctccgcctcccgggtacgagcgattctcccgcctcagtctcccaaatagctaggactacaggtgcgtgccaccacgcctggctaatgtttgtatttttagtagagacagggtttcaccgtgttagccaagatggtctcgatctcctgacctcgtgatccgcctgtctcggcctcccaaaatgctgggattacaggcgtgagccaccgtgcctggcccacgctgtccttaaggagacactttggtgcatacacagctgctcagcaaaccgactcaaaagaaaaacctgagacagatggcacctggaagcagtcctacgctgtgtaggtgagcatctgccctccaaatcagctccagggctgaaactcggggtatcaaatgagaggataaacataggtcctcaatttaggttcttccacattcgctgacatttattgagcatctactatgtgccaggcatcatgagaacttttttttttttttaagatggagtttcgctcttgtcacccaggctggagttgcagtggcacaatctcggctcactgcaacctccacctcctgggttcaagcgattcttcttcatcagcctctggagtagctgattacaggcatgtgctaccatgcccagctaatttttgtattttcttggtttgggggagagagtcttactctgtcgcccaggctggagtacaatggcgagatctcagctcactacaaactccacctcctgggttcaagcgattctcctgcctcaatctcccaagtagctgggaatacaggcacctgccaccatgccctgctaatttttgtactttttagtagagatgggaccatgttgatcaggttggtcttgaactcctaacctcaggtgatccacctgcctcggcctcccacagtgctgagattacaggcatcgagccaccatgcctggccaatttttgcatatttagtagagatgagttttgccatgttggccaggctggtcttgaactcctgacctcaggtgtccacccgccttggcctcccaaagtgctgagattacaggcgtgagccaccgtgcccagcccatgagaactttttttttttacatatacaaaactatgtagtctccctgactacaaatcctgaaataggtacaatttcagttctcattttgcaggtgaggtggctgagactgagaattgcaaacgagttgtgtatggtgtgcaaattttcactcacagctgtgctcgcaacccccatgtcctatctcccttccaaaaagtacctgtggctgggtgcggtcactcacccctgtaatcccagtcctttggaaggttgaggcaggaggactgtttgagcccagaagttcccgaccagcctgggcaacaaagaccctgtctctacaaaaaaaattaaaattagctagtatggtgcctgtggtcccagctacttgggaggctgaggcaggaggatctcccgagcccaggagtttgaggttacagtcagctatgattgtgtcactgcactccggcctgggtgacagaatgagaccctgtctcaaaaaaataaaaataaaaataccccaaatacacccccaccactaccaaaaaaaaaaatacacttgtgccagatgaaatttgttaagaaaaagtatccagagaattttaactttaatctgctttatgcagatttttggcttgaatctggggtaagaactgttagccctgttgtacagatgaggctgctggtgcctggcaagttcccgcagccagcaaacccttttatcttttttttttttttttctagacagagtctcgctctgtcgctcaggctggagtgcagtggcacgacctcagttcagtgcaacctctggctcccgggctcaagcaattcttctgcctcagcctcccgagtagctgggactacagccacacgccaccacgcccggctgatttttgtatttttagtagagacagggtttcaccgtattggccaggctggtctcaaattcctgatgtcacaatccaccgcctcggcctcccgaagtgctgagattacaggcatgagccactgtgcccagccttgcatttttcatttgtaaaagttatgtcagtgggttttttttccctttcctacctactaggccattttgattttttttttttttttttttttagttttggcttccttgctgataattccaagcttttaaaatttttaaacagtttaaaataaattttgtattataatctgtgattgacagtttcatcatgtgaagcctatgtgggtgtttttgttgtttctgctggttcttattcatattatttccatttgtttggttatttgtgtactactcattacctgaaaaattatttgtggtgggctgggtgcggtggctcacacctgtaatcccaacactttgggagaccaaggcgggcagactgcttgaggtcaagagttcaagaccagcctggccaacatggtgaaaccccatctctaccaaaaaaaaaaaaaaaaaaaaaaaaaaattgctgggcgtggtggtgggtccctgtaatcccagctacttgggaagcctaggcagtagaatcgcttgaactggggaggcggaggttgcagtgagctgagattgtgccactgcaccgtagcctaggcaacagtgagactccatatccaaaaaaaaaaaaaaaaaaaaaaaaaaagccaggcgtggtggctcacacctgtaatcccagcactttgggaggccaaggtgggtcaggagttcaagaccagactggccaacatggtgaaaccttgtctctactaaaaatacaaaaaattagccaggtgtggtggtgcgcacctgtagttccagctacttggcaggtgaggcaggagaatcacttgaacccaggaagcagaggttgcagtgtgccgagatcgcgccactgcgctccagcctgggcaacaagagcgaaactgcatctcaaaacaaacaaacaaaaatatttgtggggcttctagatgacagttccttccacaggtggacttgtgtttgtttctgccagacatgtcagctagaagtaccctgtatcacacaggacgtgaacctggctgcgaacctgtgccgagggccagtctgtgaccacagattatcagaatctttctttttttttcatttgatttctgcctcttgaatacctcttcagtcttccgggtcatccttacctgagcttgtagctctctggaatcccagttcctgcagttgctcactgtgggctggctttggacttgacttttgcctgctccttccagtaaggctgccaagtaggaaaccccagtgtgtccacatcagcaaacaccctgagagcaaatgtggcttcagagccccacatatcattcttttttttttttttttttttttgaggcggattcttgctctgtctcccaggctggagtgcagtggcgcaatctcggctcactgtaagctccgctccccgggttcacgccattcccctgcctcagcctcccgagtagctgggactacaggcacccaccactacacccggctgattttttgtatttttagtagagatggggtttcactgtgttagccaggatgatctcgaaccgcccgccttggcctcccaaagtgcttgggattacaggagtgagccaccgcgcccggctcccacatatcattctcttaactatttggcgtggtgggtctttactgtattttattggctatttgatcctttgaagggcatttttttttcagttgttctcaacaggaaggtccgaataatctaactcaccctccccacaagattcaaacccaggtcttattgattctaaaatctaagcattgaatcactaccataatgtatcctagtcctctggaaattctgatttccggagaagaatgtcagagacttagctgcctctcaatatccatttttcccttcctttaaactgaaaatttaagatatccagctgggcgtggtggctcatccctgtaatcccagcactttgggaaactgagatgggtggattactggaggccacgagttcgacagcagcctcgacaacgtggtgaaaccccgtctctactaaaatacaaaaattagccagctgtggtggcgagtacctgtaatcccagctactcaggaggctgaggcaggagaatcatttgagcccgggaggcagaggttgcagtgagccgagatcacaccactgcaccccagcctgggtgacagattgagactgtctcaaataaataaataaaaaattaagtggctatttaaaaactttaattacagggatttttagtaaagagtgttttgttgggcatattgcacccagctaaaagactgcatttcctagactcatgcagcccttctgtggctaagtctgacgggtgagatgtatatagaagcatagtgtagtgcttctgggaggaagggggcctcccttccagcaaaatggtgatagtaaaagcaatataatcttggctgggcatggtggctcactcctgcaatcccagcactttgggaggc

SEQ ID NO: 94894 - DNA, 16294 bp, Homo sapiens
gaggctgaggcaggagaatggcgtgaacccgggaggcggagcttgcagtgagccgagatcccgccactgcactccagcctgggcgacagagcgagactccgtctcaaaaaaaaaaaatacaaaaattagtcaggtgtggtggcacatgcctgtaatcccagctactcaggaggctgaggcaggagaatcgcttgaacctgggaggtggaggttgcagtcagctgagatcatgccactgcactccagcctaggcgacagagcgagactctgtctcaaaaataataataattttatatatacatatatacatatacatacatatatacacatatatacgtatacatacatatatacacatatatacgtatacatacatatatacatacatatatatagtgatgtttggtcttcactccttagattctatttaattagtctggaatcaaggcttttttttttttttttttgagacagagtcccactctgtcgcccgggctggagttcagtggcgtgatctcggctcactgcaacctctgcctcccaggttcaagcgattctcctgcctcaggctcctgagtagctgggattacaggcttgtgccactacgcctggctaaattttgtatttttagtagatacaaggtttcaccatgttggtcagcctggtctcgaactcctgacctcgtgatccgcccgcctcggcctcccaaagtgctgggattacgggcgtgagccaccgcacccggctaatcacggcatttttataagccttgtgatttctgtgattctaatgtttagattctaatgcttagccagggttgagaaccaccgatttaatccaatcccttctcctagttttactaaagagaaaactataacctagaatggtgagcaacttgcccaaagtcacccaacatgttagtgcaaggtgcaccgagagagattgtaccagtagcaagaatatgctcatgatgtttataattgttctcgctggagttaatcccggaagcatttctttttagttcacagaggccttatataaattactttttactttggcacagcacttacgcttctgctaacactgaaatgggttcgcattcctgaccacaaaaggacagagatgaaattctacattcacacagcccgccaagttagccaagctccctaggaggctgtctgaagtgcctaaaatgcttctctacaatgatcacccagagctgagagacttcagtggggtagtgagaagaaagagggttgggagagacaggaaagcatyctctccttgagggaaggaactgggaatcaactgagaaccagctagcaytgccaggaggtgaggagagggaaggagaataatttaaatgaggccagggagcttctgctccctcaattaaacggtgatagacggcctgacaccaccagccctcgaagcctgagatccacaggaaatgttaaaaactggcttggcaatataagtattagaaaatacttcttccaacactcaccaaaaactaagctcccaataaagaacacttcacctgccctccgcaaccctctacctctcttccccgccaagatcttcacccaaggtctcaagagggcggttcccaacctcacgtgacacagcggtcacgtgacatggccccggggagccgaggtgagcgttccagcttccggagccggagggggcccggcgtacccagcccccagcccgacgtgaccatgctgtcccgcctcctaaaagaacaccaggccaagcagaatgaacgcaaggagctgcagggtgagccaaatatcctgtcggccgttttctcttcggccgcggcctagcttcagcccggagcctggatctcgagtaactaaccatatccagggaaagacgccagctagcgggcaacgggcatgggggagagggaatttcagagaggctttttttgaaactcctttcccttgccaactggctccggtcccttgggcaatactccggtcccctcggcaacgcccccaatccccgacctgccgcaccttagccccgcccctgccccggagcgccctgcctattggccctgggagcctctcgtcctggcggcgggaaggagcgactctggagggaggagggtgtggggaaccccccagagatgggcttcttggaggcctgaaaccaccggaacggaggtggggcacttgtttcctgagtccgggctggaaatctcggagttaccgattctgcggccgagtagtggagaaagagtgcctgggagtcaggagtcctgggcgctgccgctgacttcctggcgtccctgagtgagtccatttccctcccagggtaccagtttcctcatctctaaaatgaaagaggttgcgctatgttttgcaaggtccttttcagctccggcattcagagattagttaagaaatttcggcaactagcagaatagtaatggatgggtagggaacctttaacactacccctcaaaaaaccaagtctcccctccaattccttttccccctctccccagaaaagaggaggcgagaggctatcactgcagcgacctgcctgacagaagctttggtggatcacctcaatgtggggtatggacctcttatcaacatcagtttcctccttccccaccccgcccaagtttaggcactggccagtctggccctcaaatagctgttgaaggggtgggatgttccactaattcccctatcctaccccgcccctcccagctctttgtagagcaacttgagtcaactctgagtcctagcactgggcaagggaggaacagctgccgtggttagagaagcagccagatttccccttccccacgttaacttccctggcatttacaacttgatgccatctgcccacctcccttcacccttccaagtccagctgtcacttcagcaggagggagagcaccctccttcattacagcttaccaccctctcctctgcctcccaccctctggcaagcctggggagcagctggcaggaaagagatggcagagctggtggtggtgagagtagaacctgttccgggagctatggcagagccaggctgtctcttaccttcctattgggtctctagggaccacaccctgccccagccctaaatgagaatgcaagtaacagccaaagacttgggaaaaagcaaagaacattgtctcttgaccctaagtgacccagaagcgtgcagagatgatgatttgctagtctgcctattggaagaaaggcagtatggtaccttccaccccaggtcaagtagaacagctcggtgtgaatccagagactgagtcatccaagtgagccatgcaggggctggggtcatctttgttactcatcttgggggaaggttgagagaaagaaagttgtggctggggcctctgatctcccttctctccaggcagctctctttactcagtgtgaatatagaagcaggtggtcaatggggaaaaccagaagttcaggaattctcaggggagtctgtttcagttcctacccgacccttgacagtgacccagctgtctcccaaaaagaaggaacagggtctgccctcccatttcctccctcccacattggcacctcctgggctctgctgtgcccatcatttgtgagattggcccaggcctttccctcttcttttcctttgctagatgccaccccactttcagcttagagggcagctaagccaaagccagattagaaagggttttgtgttgctgcccacgcctcctctcattcccyggaaaggaaaacaaaggctcagtctatcttggcccctgtcaggtgtyctgcccactccctcarcccccaccaaccccttccccgctccagcccccacacattccagtgggtgggggcaccggatgtggaatctcctggctgagtagagctctggggtgggaagtgaaaaattcaacagccaataaaggagaacaattattgcaggggttggggagggcaaaaaacactggcagaaggttggggacaccaaccccatggtagtaatggtaaccacagcccataccttgattgaaaagaaaaactagtgcctaaggcagaagggagggagagcatgtgtgtgtgtgtgtgtgtgtgtttgtgtgtgttccttgatctgtgtgggcaaaagcgaaggcttgggagagcaactgagagccgagaagaaacccctgggataccctcttttgacccagggttcctggggagggggtttgtactcccatcctaacccggcttcagggaggggcccaatttccctctccaacttcttgcatagatccctaggcttccaatcactgccagatgtgttcctcctgctggattttcccagtttttccatgcccctttttccctcccagctttttcctcagggatatcaccccaggttttccctcccttcccccactcagctgcaggaactcctttttggggtttggagctggtatgtttctagtcagctccgagcttggctctcctgggaatcctgggagtgaaaggaaggagctgggtttatttgcatgtactggtagtcatttgcatcacatccaaaaatggccaaaattatgagccctgattcttggctgaactcccactgctgcaatggaatattagtcccggagaccacccccaactagctggagctgatctcctccctcctccaaccccccagtgtggcccaggcctacatgaaccagagaaagctggaccatgaggtgaagaccctacaggtccaggctgcccaatttgccaagcagacaggccagtggatcggaatggtggagaacttcaaccaggcactcaaggtgggccatactccctacctcaccaccccaatcctgggcccccattggctgcctccagtcaggttacctcaggtttaggttaaggaggaagtagggtggtcccagaaaccccatctatagccccagtgtcagaaaaggtagagaaagaaagaaaagcagttggtgggtccaagtaaagccttttccaggagatgaataaaacgtattccccagactggaagccatactctacccattctgattcctgggctcccacctcctctcccccttcccaggaaattggggatgtggagaactgggctcggagcatcgagctggacatgcgcaccattgccactgcactggaatatgtctacaaagggcagctgcagtctgccccttcctagcccctgttccctcccccaaccctatccctcctacctcacccgcagggggaaggagggaggctgacaagccttgaataaaacacaagcctccgtttctctgtggtgtgtttcagagagctactagctccagtgtcgggggtgggagtggaaggttcaaaggtggtttccctgagggacaggtaccttttggggagagggtggaactagcttcctcttactatcccaactctcttctcctccatggcccttgtgcaggtgtctgttaggcaagcagagggtgggagttcccatccctcctgagagaaggtcctagtagccctgccccaagcttcctaattcaggacttgtttcctacagaagagaaacaaggcaaggtacaggcctggtccccagctctggctttctgcctctccacgtgctcatggcctctcccaggctaactctaagcagtgtcatgagtctgagccaggtgkgagattaattcctgggggcacttcagggctgagaagggggaggaatgacaggtccagtaaccgttaccaacagagcagtgcagctgccatccttgacagctccctcctccttggagaccatgacatagatggtcaggaacccaggctgagaaagacagccaaggggtggggggagcctaggcaaatctggcctctgccaagtcctggcttcagccaggcaagctccagcctccctggctcctcctcctcctcagtcctatccccaccctgtcacacatacacttaatacgcctggcatccaagtccacccactccggactttggccttagcagtagttagtgtgggaggctgggaagactgggagcagtctcttaaacaaaagcaaaagaataagcttcgggcgctgtagtacctgccagctttcgccacaggaggtaagtggatactgggagctgggggaactgagaagactagccagatattacatgtattgccaactcaaaactttcagcttttaacatgcttcctcacacattatcccctttgatcctccacaactctgaggtggacctggtgggtcttagccccacttggtagatgagaaaataggttgagagagacagtgagatgctcagtatcacacagcaaacctcttggccctatacatcattccaaacacaagacccaggttgcatataraaggttcagtgtccctggtttagaagraraggtggtgtgaggcaagcaagaagatgcctctgctgcactccagccctgggcgacagagtgagactccatctcaaaaaaaaaaaaaaaaaaaaaaagatgcctctgctccatacagcaggtctgtacacaggatctggctcatgtggttttagttaagttagccacaaatacagsgtctgcccacatctttgctttgaacagatgagccatggttggccaattatctgccaaccagataatttctcaatatgctcacaccagatgcttccagctagggagggtattaggggaaagggcttgagggccacagtaaactggacaagtttttctgcycagcctaggctgccacctgtaggtcacttgggctccagctatgtggctgcctcttctgctgggtgccttactctgggcagtgctgtggttgctcagggaccggcagagcctgcccgccagcaatgcctttgtcttcatcaccrgctgtgactcaggctttgggcgccttctggcactgcagctggaccagagaggcttccgagtcctggccarctgcctgaccccctccggggcsgaggacctgcagsgggtggcctyctcccgcctccacaccaccctgttggatatcactgatccccagagcgtccagcaggcagccaagtgggtggagatgcacgttaaggaagcaggtaagtatggtagaccaccaggaatatggtgtggggtgtcctgatccccacagtcaccccaggagtcacctgcaagggctgtggtaagctaaagggacaatttgaggagaagcagttttcagatgctcccaggaagaagagggagctgtgggagtgcctcacctacccccagcatccttttcatctccccacagggctttttsgtctggtgaataatgctggtgtggctggtatcatcggacccacaccrtggctgacccgggacgatttccagcggrtgctgaatgtgaacacaatgggtcccatyggggtcacccttgccctgctgcctctgctgcagcaagcccggggccgggtgatcaacrtcaccagcgtcctgggtcgcctggcagccaatggtgggggctactgtgkctccaaatttggcctggaggccttctctgacagcctgaggtgaggggtacagggctctgggttccaggactaacagcagcccactmaacaaacgtgggccagcagaggtggttaagatacagcacattggaatagttaagaagagacagtttagggctagacttcatgggttcaatgaagtctacccttatgtaagctttgtgaccataagtagattacttctctttacccatttttaacgtgtttgttttttgttttttgagatggagtcttgctctgtcgccaggctggagtgcagtggcgcgatcttggctcaccacaatttccacccccggggttcaagcgattctcctgcctcagcctcccgagtagctgggactacaggcatgcgccaccatgcctggctwatttttgtatttttagtagagacagggtttcactatgttggccaggttggtctcaaactcctgacctcgtgatccgcccacctcagcctcccaaagtgctgggattacaggtgtgagccaccacgcccggccttgcctctcgtctttaaacaataaggttcaaagttccgtgggagcacaaaggagacatgatgaggacaacgggagtagggcctgagtttttttttgtttttttttttttaagcgttttgctcttgttgcctaggctggagtgcaatggcgagatctcagctcactgcaacccctgcctctcaggttcatgtgattctcctgcctcagcctcccgattagctgggcttacaggcacgtgccaccactcccagctaatttttttgtatttttagtagagatggagttataccatgttggccaggctggttttgaactcctgacctcaggtgatccacccgacccggcctcccaaagtgctgggattacaggcatgagccaccacacacggcccaaggcctgagttcttagcaggagtataaggcgcctaagcttagtctaccttctaaggaagcctgcgtttgtcaccatcactcagcaaataacctgaatgtctcctgtctctcagccttaatttttcaggcagcatcatgggacacatacttttagttttgagacaaggccttgctctcacccagggtggagtgcagtggtgcagtcacggcccactgaacttcaaactcctaggctcaagcagctcaagcgatatccgcctcagcctcctgagtagctgagaccacaggcgcgtgccagcatgcctggctagtatttttttacagatggggtcttgctgtggtgaccagacttgtctcmaactcccggcctcaagcgatgcttccgcctgggcctcccaaagtgttgggattataggtgtgagccactgcatactggaacacatactttatacttgaatttttttttatccccttccctcctgctccttacctatacttggatttctacatctgtgccagggcagtgggatgtatccccactttccccatcagcttaccctccagcaaatacgagactatacccttcaatatccagcactcagggctcaaccatgtgttttgggagcaagggaatggggttcctctaggtcaggaatcggcaaactcagtactcaagccagatctggccagctgcctacaagctgataatggttttttttatttttaaatggttacattgtaaactgttatataagtacctgataatatcattaattttgtttcttggcctgccatgcttaaaatattaactctctggccctttaagaaaaaaacgtgctgacccctgctctagatcaaagaaaacaaacctcaaaaatactttcctccctctaccccacttgacccttgtcccggggcagtaggcatctccgtcaaaactcttgtcyctggtctgtggtaactttctcagctccccaacccatgtccctcaaagtcccctccctatagggcaagaacccagcaacttcgctctgccccsactctaggcgggatgtagctcattttgggatacgagtstccatcgtggagcctggcttcttccgaacccctgtgaccaacytggagagtctggagaaaaccctgcaggcctgctgggcacggctgcctcctgccacacaggcccactatgggggggccttcctcaccaagtgtgagtagccaggcccacacaggggcacatgaagggaaacaagtaccagaaaggccagtcctgcataagcctgctaggaggtgggtggggcacccagggcagggttgagggtgaacaggatgttacaagagtgcccaggccatgtggaacctgcccactccccacactgaggaggggactgagggtgacaagcccagggccccagaagacagtacctaagatgggctggagtgaggaagggaaactgattgcaaccacctatggggctgcagacctgaaaatgcaacagcgcatcatgaacctgatctgtgacccggacctaaccaaggkgagccgatgsctggagcatgccctgactgctcgacacccccgaacccrcyacagcccaggttgggatgccaagctgctctggctgcctscctcctacctgccagccagcctggtggatgctgtgctcacctgggtccttcccaagcctgcccaagcagtctactgaatccagccttccagcaagagattgtttttcaaggacaaggactttgatttatttctgcccccaccctggtactgcctggtgcctgccacaaaataagcactaacaaaagtgtattgtttaaaaaataaaaagaaggtgggcagaaatgtgcccagtggaaggctgaccccatttaagtgccaactactccaaaccgacatgctcacggtctctggcctgttcagtccctgcaaaacagctagcacccacagtggggcgccagggaactgcctcacatctacagctgcacgtcggggagtggccatcaaagggcactttaatacatttcccttattttctgaaggggagtaaggttgcaattcagtgtctgtactgggaatggtcttcatatttcttgggggagaagagcaggtgatgagggttctgggccaggctgggtggcttccatggaagaaaaggcaatattcacataaattctcctgctaaggacactgaccacacaggtgtcaaggcaacttatcatacttcgaaaggagctggatcccttgaggattggccaggaagggaggtgctgggcccttagcggtgcacagaaggccaggaagatgtccaaggcagatgggggctgggctctcgcaggtgggacctttctggggagctgctttgacttatgcagcagatggcttcatgaatgttcatagtgagcctggcagcataagactagggggcagaaagcaccacagtctctggatcctcacttctcccactgcctgcccaaccaacaccttcgcaaagtcctcctttcccaaacaccccccaaaatagacctcgaagtacacatgcattaaggtcccagaggacagggaacatcagtaaggaaaggaaggaatcaagcatcactctaagacaaactcrgaccatctcttttcggtctgaaaaaataatccgtttaattgaaaaacctggaggatactattccactcccccagatgaggaggctgaggagaccagacccctacatcacctcgtagccacttytgatactcttcacgaggcagcaggcaaagacaattcccaaaacctagaaggaaagatggggacaggggtggagaggagtcagaagggctagctacctcagacccatgcaagagactccaaacacacactcccaggccagtacctcctgttcagcaccctcctcccctcagccccttccctccaggcaccctggacagagtcccagcccctgctcagggttatctcttacctcgacaaaagcaattccaagggctgctgcagctaccaccagcacatttttcctcagccagcccccaatcttctccacacagccctgaaggtggcaggcacaaaggacaaaagcaccatcagaaacttcccaccccaaccccctcccttggtccatcagtctcttccctgcccctgtacctttcaccccacccttagcatttccagatcccctccccatccctgaccctgtccacctccatcctgggtctcttgcattctaaaacatttcccaggtttcccaagtcccatacacagtctcctccctacctccttatggatcgccttctcgttgaaattaatcccacagcccacagtaacattaatgcagcaggagtcggggactcggttcttcgacatggaagggattttctcccaatctgtgtagttagcagccccacagcacttaaactgggggagggaagaaatatggagaagaaggttgttaagtgaaccttcaccttcaatatggagatgagaattctttttttttttttttttttttttttgagacagagacttgctctgttgcccagacaagtgcccagcggtggctcaatctcggctcactgcaacctccgcctcccgggttcaagcgattctcctgcctcaccctcctgagtaggtgggattacaggcactcaccaccacacctggctaatttttgtatttttagtagagacagggtttcaccacgttggccaggctagtcttgaacttctgacctcaggtgatctgcccacctcggccttcaaaagtgctgagattacaggcgtgagycaccacacccagccttggagatgagaattctctattcccaccacccctgctcccagcaacsccactcacatctgcctgcatcctgtccaggatcgaagcagtgtggttrtttttcgggtaattctccatctgctgccggaagttgttattaaactctgacatcacctgagagtacggaggagcactgttgcagtcagaattcaagcaccagggtcccagacccggctgaggcaggcccttcccattattccctgcttaccttatctctaaacacatagccagcaatggctgcggccacctccaccaacatgataagagacagaaagatggcaaactgcaggagcaaaggacagaagtcaagtttggagtctatgcattacaggggcccgttttggcacagccggtccctggacactcacaaaggtcttcctcacccacccacctcacccaccttcctgagcccgaaccaagctgctctggcagtcccagaccgcccatgttggtcccgcccccaactcaccgtgatcataagacaatagttctccttgcaggccccgcagcagcccacaaaagccaccaggaagaggaagacacccactgcgatgatgaccactggcaacagagagccaggggtagccccctggattatggtctgactcaggacaagctgtgccccgacacccacggcaatcagtcccactgcacaggcctaagagaaaatcaggtgaggattaggccatatccacaacacagtggccctccatggtggagggcagggggtacacctaggacacagacttgaccccatccggaagagagattctcacacctctagggaatttctttggctgtggggtagggggatgacccatccttgcctgcccctacctcccctgatcccctcccggctctttaatcagggacatgaccaaattcaaaaacctcccagaaagccttgacctcaagacacgtatttctgacctagaataatgctttctacaggcctccagggctcccagctcaattctctcccagaactgccccctcactatcctccagtgcacatcccacgcgcgcatcagctgtgactaaggttcctctggccagttaggccaggagaagggaagaggaaaagggagcaagagtgatgtgtccctccctagacaaacagtagcctctcaagccaggagcccagggcaggagcaaattgaagtgggcagagcccttcctcacccccaagcgctgggaggagggaaagggggagaggggctggacagggatgagagggttggggagggagagaggggagaagggagagcgaagggaagccccatggcgatagcatcaggcggttggctggttgccccactgccccatatcacaagtggttgggtcaccagacaggaagggccaggagggatgggggtaggggttgctgcacacccaggatggccattctcggtggaaacaagcctcaggtgtccaggaaaactggaggagggagtggctgcgctgtctttccctggctttctttccacatctggtctccagctgccttaattctcattccctcagccctcaccactgtggagccaggtctccccgcaccctgccggcgcgccccccaggacccctcgccactcacgcaaaaggccagcaggaggacgtasagcaagaacttcacacatttcattcctccttccaccgccatggctgccgggcctggggcagaggggagggcggggggattaaaactggccgaagggggacctcggtttccgggctcccggccggccctcgagggcttcccttcacggccccgattcccggcccctcccacccggaaacccgcggtcggatccacgtctcccagccccctctttacccgcaggagaggggtgggggcgacggccgcgaagcccggaccccgccccgccgcctctggggcccaggacagatccaagggcgccggcaggggcttgagcctgacgccgaccctcggcccgccagtctccgggcgtcaaacaccctttccccacccaacacccagcctggagaaacggtcttcagcccaaccccgacccccgccccagcccctttcccctgggctctgacctccccgcccaccaaaaaaaaaaaaagtgcagccagcacccccgccacaccctgcccgggcccagggaacttcgaagcaaagttgctccagggcggctggagagcgccggacgagtctccgcgggcctggggcgagccctggaggaagggactgcgggtggtctctcccagcccgcgccgaagtccgccgggtccccgcggcctcacctgggcttcccaaggctggctgcgcgttcctctcccgccgcggctccggggctctctagctgcgccccccggctcccgccccgcctgccgcgcggccccgccccgggctccagccacggtcccctcccccgccgagtggccgccggcctccctcatgtgacgcggtaacagctgcggcctgagtcactgggcccggcgcggggtgggccgagccccccgcccggccagggccacgtggcccctacccggaagaaggcgcccacccccgcaaagggaaagccgcaagggcaagacctcggggcgcctggggcccccctctggcgctatacctccgtgccaactcggggtaggagagcggggcggagcgcagcctgggtcactctggttcagagaagcggacgaggtggrtgagagttaccctctgagcgccggggcggagagctgaggccgggtgacaatgtggtctgtgaggtttccccatcctaccgtaggggatgagccagctctctcctctggctccaactctgtgcaagccccctccccatccgactgtgcagacagctggggactgcctggggtcgggtggggccagaacaaacacttccagaaagtccctggctcacatcctrggtgtctcccaacattctacagcattctagagtggggatttctggcccccctctattagcacagcttctccattttccagggatcctagtctgagaaaaggggaggaagcccttccccgaagccacgctacccagtcaatcaagacacgtccgcgtcgggtcccgccctctgggggaggattgacaaggtctgtgcttccagcctcccagacagctcctgcatccgtctgtgatagcgagggcttgggggaagacacgaaggcaggagaggcttacatcctctggatttccccgtcttatcccagaagacaaagccaggtgagggctggaagcgggctagggggatcaagctgcctccctcccttgtgtgccaggggtggtccccagaaggagctgatctgaacaggccggagagtaggaccggccgtcacacccccacacctccagcctcggccccactccttgggctcttaaggtcctgcctcaagaaccacttcctgagtcttagtgtatgtgtgtacacaaagaatgaaagaagtctctagagctaaaggaaggagatccgggctgggctgagaagcatcttccaggatcacggccttcccgcgggacacaccaagcccattccggatcttgctcttcctgaccatggctggcaggctgtggaggaggagcggagagcagaagaaaggagtattcatcaggttccttattgtgctgccactagatgccaggcatgtgctaggcttgggggctgcaaggagaggaagacagcggccctgccctctgctagcaggcagaaccgagttctggccacactgtgaagaaaggcagaagcctgcggtggcagctggttaagctcagagggagggaaagggagaggagaatggatttcacggagcagaaggatgtgctcaaggtgaccttggagaataaaggggagagctccagggacagagaagcagtcgactgtggaaaaaaaaggagcattttgtaaagtacatggcaggttggggttggctggctcaaagggcttgggacggatgtggtgagatgggctgaaggtggtctgaagatcaagattgagagactagatacataacaaccaactgcaatgtttggtcc

SEQ ID NO: 94895 - DNA, 48652 bp, Homo sapiens
  misc_feature (1)...(48652): n = A,T,C or G
aatgggtcttcatttctgaaggctctagtgtcaggtaaaactttgatgaaataaatttgttataattttcttttggttttgttttcttttttgagacagggtctctctctgtcacccaggctagagtgcagtggcatgatcacagttcactgcagccccgacctcttgggctcaagggatcctcctggctcctgtttcctgagtagctgggtctacgggtacacaccaccacacccagctaattttgtttattttttgtagagacagggtcttgctatgttgtctaggctggtcctgaactcctgggctcaagcaatcttcctgccttggcctcctgaagtgctagcattataggcatgagccactgcacctggttcttttctctcttgttaatctgtcatttgctataggagtggtggctgttccttacgatggatgaggaaaggtatcacacttttctgccactacactgcctttgagaatttgtagtttacccttctctgagttcccttggatttgcagtaaacaatggtatgctagagcctgctcttagcagcttgcaatttttaggaattttgtgagccagttgtcgaacacaaccttcattaagaatcagattacagtctgggtatggtggctcatgcctgtaatctcagttttgggaggctgaggcaaggaggatcgcttgagcccaggagtttaagaccagtctaggcagcataatgagaacccatctctccaaaaaaaaaaaatttgctgggtatggtggcacgcacctgtagttccagctagtcaggaggctgaggtgggaggattgcttgagtccaggaggtcaaggttgctgtgagctatgattgtgccactgtactccagcctgtaataatttaattacataaattatattaaaaccaaagataatatagactccagacttatcactgcctaattattttactatgtcttcctattatttatgtccttgaggttttttttttttgtgttgattgtatctgtatggtagaaatactgtataaatgagcacctcttcacaactccatgttcagtgacatcacaatgggagctcataaataagaaagtatttacaccccagaaatcagcaaacctgacaattgtgtcttacttattcccactccctcacagttccccaccccacaactcccagcaacctattaagggatagagtgtgtgttggcagccacatgattaaaggaaagaggccaaatctctagatcctcctacaaaggaagaagaaaaatagagcaagctggtttgaacctgagaaggggtcctagagctatgcactaacagggtacaagttttaaagtaaatttttaaacttaactcattctttatgactttagaattttatttttgaaaacagatttttaaattaaatgccggttctgaaaataaaagcaggtattcattttcaactttggggtttgttttttgttttgctttgagttgctgttttatgaactttggggttttaaaaatgaattataggcagtacattgagctccataaagacagtgccggggcaagtgagagccggatgggccctaggcaactctgtgcctcgctgaggaaaaataactagacataggcaaaggagatcttaaaaagccaagaggcaaaatgccatcgtatgtattttgtgtgcaaacttgtccggaggagcgtaagaagaaacacccagatgcttcagtcaacttctcagagttttctaagaagtgcttagtgagggggaagaccaagtctgctaaagagaaaggacaatttgaagctatggcaagggcagacaaggcccgttacgaaagagaaatgaaaacatatatccctcctaaaggggagacaaaaaaagtttaaggatcccaatgcaccccagaggtctccttcagcctttttcttgttctgttctgcgtgtggcccaaaagtcaaaagagaacattctggcctgtccattggtgattcggcgaagaaactgggagggatgtggaataacactgctgcagatgacaagcagccttaaaaagaagtctgcaaagctgaaggaaaaatacagaaaggatactgctacatattgagctaaaggaaagtctgatgcagccaaaaagggagttgttgaggctgaaaaaagcaagaaaaagaaagaagaggaagaagagggagagaatgaggaggaggaaaatgaagaagatggtgatgatgaataagttcgagtgcagttttttttcttgtcactaaagcatttaacccccctgtacacaactcactccttttaaagacaaaaaaaatttgaaatgtaagacttgtttttaaactgtacactgtctttttttttttttgtacagttaacacactaccaaatgtgtcattagatagccctgtcctggtgatttttttaatagcctccatactgtaccttgtttggtacactgtgggggctgtaaattgacatggaaatttaaagcaggttttcgttggtgcacagcacaaattagttatatatgggatggtagctttacatcttcagttgtctctgatgcagcttatatgaaataattgttgttctgttaactgaatactctgtaattgcaaaaaaaaaaaaagttgcagctgtttgttgacattctgaatgcttctaagtacatacaattattattattattgttgtccttttaaaaatgaactataaactatttcagacatggaataaataataatttgaattgttaaagataataggactacaggttgagtattccttatcctaaatgcttgggatcaggagtgtttcagattttttttttttttaaatatttgcatatacatatgagatatcttgggaatgggatgcaactttaaacatgaaacttacttatgttcatatacacctcatacacatatcctgaaggtgattttatattttaaataattttgttcatgaaacaaagttttgactgcattcttttatttctatttttatttttatttatttatttttttcgagatggggtcctcactctgtcacccaggctagagtgcagtggtgcaatctcggctcactgcaacctccacctccctggttcaagcaattgccctgcctcagcctcctgagtagctgggattacaggtgcacgccaccacgcctggctaattttattgtgtttttagtagagacggggtttcaccatgttggccagactggtctcaaactcctgacctcaggcaatccacccacctcggcctcccaaagtgctgggattacaggcgtgagccaccgtacctggccctatttttattttttttagagacagggtcttgctctgtcacctaggctgcaatgcaatggtgcaatcatggctcataggcatgagccactgcacccagcctttttttgtttttgtttttgtttttttaagactagtcaagtgcagtagtgagaaggggagaaaaaaatagaacaaggtgttccatctgtaactgactgtgaccaatctattaaggtaactcactacgttcggaccaaactgactgcattttcactgggactggtcacatgaggtccagtatggaattttccacttgcgttatcatgtaggtgctgaaattttggatttggattttagatttttggattaaggatgctcaacctgtataacaatctcctgttcactctcccagtgcataataaagtggaactagtaatttatctctgactaaactataggtagtggaaaaccactgaaaatgacatgcaggattaaagtagcactttggaaaggtcggtctggtgatccacagtaaatgctcaagaagcaagaggttttttgttgtttgtttgtttgtttttgagacagagttttgctcttggtgcccaggctggagtgtaatggcacaatcttggctcaccgcaatctccgcctcccaggttcaagcaattctcctgcctcagactcctgagtagttgggattacaggtgcccgccaccatgcccagctttttgtatttttaggagagacaggagtttctccatgttggtcaggctggtctcaaactcctgacctcaggtgatccacctgcctcggcctcccaaaatgctggttttacaggtgtgagccaccgcgcccagcggaagcaagaggtttttgcagtagcacaggaagccctgaggcaacctgtgccagtatcaacttcagaaaacatttagtaaagggggaaaaaaattgaatgtagtgatgggcaagaaatacaaaagtatcaacataatttcaatgaactgaacaagtatgacagtatctgtgactgtgaatccctgaccacgcccccacccattcctggagggcttgttaaaacataggttaccggtgccctacccctagagttactgattctgtaaattcgcgagtggggcccaagaatttgcacttctaacaagtatctggtgacccatagcaggtgctcaagaagcaagaagtttcttgctgctttttatttttatttttttgagatagggtctcactctgtcactcaggctgagatgcagtggtgtgatcatggctcactgaagcctcgacttcctgggctcaagagattctcccactttagcctcccaagtagctggggccataggcacatgccaccacatccagctatttttttttttttaaatttctggtagagtcagcgtctcactatgctgcccaggctggtctcaaactcctgggctcaggagatcctcctgccttggcctcccaaagtgttggaattacaggtgtgagtcaccatgtgcagccagtttcttcttgatgctgtatccaggtgatgctgatgctgctggtctgggaccacactttcagaaccactgccttacagtggttattttgctaaggcctcaaagacatcattgttaaaccagcagggggagacaatatacaacagagcctctaaaaataaaatgtcttagggtactaaaactcctttggagttatggtgttgccatggagacctctgaactgttttggagagcagtgtgtaaattgacatgaggtgaaataaatttcaggagtttatgtaaaarattaatttggtagaaataatgtctagattcttgcatgccatggtgtcttggttaagaacttggaatgtggagtcagctctgccacttacaagctatgtggctctgggaaaattacttatgtctttgatcttttcttcgctttaaaaagtaacctgtggtatagaattggaggggtaaagttcttggaatgctgagattattaaattattattcgttattaaaactctagttacttagcacttacagctctttagcttagaaatagtctaaatacgttgctatatttgcttttttaataaccagcgctcccgttattcaggtaaagaattaaaaacatctaaaaggtaattgctttgtaaatcctaacctctttcattcaaaatacctaaggtagatggctctttataaacgtgcccggctcagagagctctcatctatattatatctccgaatccaaatttcactgatgcccagtctaagagtgtttcctgggctttgagctttgagatagaacgaagcaggtggatcctggctttgactaggcagggccagaccaggcccgacccagccagcccatccgtagagtcagcatcagccgggcgtgaagattggtgtcggctcctgcgttccgccaagttcaggaacctggcatgggccggccgcctcccgcgaagggacacacctgttggtcaccgcgctcttactggccagacccggatattggccttctggcgtcagcggcaggggcatgtccctggccggagagcacaggccagagtggggtgacgtcatcgaaggcacgtcccagccttgcagagcggtgggcggggcctgcgaagaaggtgtgccgggggctggttggaggcgcgggcggcggggccaatgtggcggtgacgtcacggggcgggcggacgctggcgcgggtaggtaagagcagcggcgggcggtggcgctcactcccggcttccaaccgcgcggagcctctgccttggagattctcagtgctgcggatcatgtccctaaggggcagcctctcgcgtctcctccagacgcgagtgcattccatcctgaagaaatccgtccactccgtggctgtgataggagccccgttctcacaagggcaggtgagaactggcacctggaaccgccgggcaggatcctccgccccctagaacctggagacagcggcggtagggtgcgggggaccgggaggcgaggagaggatggggagaaatggcgaggggaagagctggccggttcccgctactgggcaccgtgggagcatgtgggatatcctccgacagagaatggagagggagggagggaggggtggagggcaccctgtttgggatgagggtgtgtttctgcggcctccccagaaagaccgagaaaacggtggatgcagcttggggtaatggaggggagagaatgaggaagaggattccttggaggggctggaggaggcgaaactggtcagaatccccagtggagaatcgatggaggaggttaaaaggagcgaccgwggatttaagtcttctggatccattcactcagaatgagcattaactgggagggaaattggagctggcctctccagcgcgggaggtggggaggagctgttttgttctcttcaatgaaggaaacctgcagtcgggagcgctcagtcatctcgaagcccagaagcccagtctctggcccgagccagccccacacacgcctagctccnggatcctaacctggctcagcckctcccgtcttggcttgggcagctgatgtgattccaacaatggagttggaaggacagtcattgatggaagggctgatgctgtcacaggttttcagaggaacctgctgggaactaaatgtaccaaatgggtttttttccgacaccttctctacctctaattgtgtaatttgtgtgactgacagaaaagaaaaggagtggagcatggtcccgctgccataagagaagctggcttgatgaaaaggctctccagtttgggtaagtggttagatttttagatattagtgcaggactagtaatagaccwcttcagagtcttttctctgacatccagggactacacagctttgtgtttgggaacagtctgccacatcccgmatcctcctttggattccrtctgcggcttaagatcaaggagtcatcagggaaagtcttcttgcaataaagagtgtgttggaaggcaaggaggtagagtgaggcaaggtctgaacagctgtcagggaatgcaagtgatgctaagaacactagctccagcttcaactgcacagtcaacctttccccttaaaattccattttcctaactccatcttgagatgcttatgatttatcagtctcgccagttttctgtcttcaaattatttcctctctagggttaatatctttattactggaagcagtaatataggtcttataggctcactgatcttatatagaactaataggcttagatctatattttccgtgttctttttttttttctttttttgagatggagtcttattccatcacccaggctggagtgcagtgatgcaatattggctcattgcaacctccaccttctgggttcaagcaattctcctcccaagtagctggaattacaggtgcgtgccaccacacctggctaattttgtatttttagtagacacggggtttcaccatgttggtcaggctggtcttgaactcctgacctcaggtgatccgcccacctcagcttcccaaagtgctgagattataggtgtgagccactgtgcccagctataaatgccatttccatagtaagggagaacccttctcttagtaacagcaccaaatttgaatacctttataagcagggtgcggtggctcatgcctgtaatcccagcactttgggaggccaaggtgggtggatcacctgaggtcaggagttcgagaccagcctgaccaatatggcgaaatcccttctctactaaaaatacaaaaattagtcaggcatagtggcatgcacctgtagtcccagctactcaggagcctgagacagaagaattgcttgaacctgggaggcaaaggttgcagtgattgtgccactgcactccagcctgggtgacagaatgagactccatctcaaataaataaataaatacctttatggcaggaaggttcttctttatatccaatctaaatgtttctagactctgttcaaggccatttgctctgttcatgtttggatcattcacatatcttttctggtgacataagtgcaaaatgtgaggcagcacggagattatggagataataacacataatctaagttaactccccactgttgctctgaactcttctctgctggtcataagtccattccaagtgaagtcatctccttccaaaagccagaggaataatgaagtcactgaaacagccttgagttgaggtgtccttcatatacctccacctacatatggatatggtgacatggattcaatattcgaaccttgtttattaaataattgcagtttcttctttactaaggcctctcttagtcattttaataactctccaagttcaccactgaagattaaagacaaactgctaagatttagtcttcttttaatgtgtggcaagttaactaatgggaggaagtttttattcccgcccataaatgagcatactgtctcttaaaatagcttgtacacaytgcctttttaaaagaatcattttacactgaagacgacaatctctggttatcactrtttttaaatcctggagacatctctgcagtccatctgaactcggccaagcattgctcaaattgctctaccgtctgtaggttctgccttaagagattcctgacaagaagcggtttcagcctcttctggaggagacctctataacaatcagctgaggctgctgaatgagggggaagggcacatttgtagcagcttctcttactcatgctttgtagacttcctttcctgtcacagctcttggtatttttccactccaacccaggggaagccattctcctgtaaatattactccctctttaaactccaacctaaagtgatggtgaggcttcagtttatatggccttccctttgactttttttctcaaatatatttaattgtacaattatatccttacygtgtagctgactggtagctcagtatcaccagcagtctgaaatagaatctcatagcctattaaataaaactgtggctctcagcagatttctagcatgtggttttggctaatctcctggaatatattggagaaaagtaccaagagacatttcagttgctctgttcctaaacagtaccaaaataacttgagtgttttgaacactttcaaataaacagcatggatcaaatttcaaaggagagactcatggaaaggtaactttcacaatccctttgttccttgcctttgctctgatgtcacaggctgccggtgttaccatagcatgagttaaatttcctgttttctctcgaatgaatgtatttgacttagtgtctgggcttgttttatttccttgggcttagtaaggacactcaacagtactctcaggtaacctttttttttttttttttttttttttttgagacggagtctcgctctgtcaccaggctggagtacagtgatgcgatcttggctcactgcaacctccgcctcccgggttcaagcaattctcctgcctcaacctccaaagtagctgggattacaggtgcctgccactgcgcctgactaatttttgtatttttagtagagatggggtttcaccatgttggccaggctgatctcgaactcctgacctcaggtgatctgcccatctaggcctcccaaagtgctgggattacaagagtgagccactgctcccagccaccttttatttttctttgagagagggtctcactctgtcactcaggctggagtgcagtggcatagtcacagcctactgcaatctcaacctcctggactcaagcgatcctcccactttagcctcttgagtagctgggactacagacacatgccagtatgcctggataatttttttttcttttgtagagccggggtctcactatgttgcccaggctggtcccgaactcctgggcttaagagggcctaagagaaatgaaaaggcattgctctggcaaggctgaggagcagtatatctgcactcgattttggttagctctgagaaccatggtaatttgtgaattctagccacctgttaccatgtgagaaggagtgggccttgtactcttttctccagtttttcaagaaaagccagaaatttgcactttaatgggaaatctgtgttgttttaaaatactgtatagtgacaccattgaaaatggtggcataggacctccaaaaaaggaatgagaactgtattagtctgttcttgtacttttgtaaagacatacctgagactgggtaatttaaaaagaaaagaggtttaattgactcatggttctgcaggacatacaggcttctgcttctggggaggccccaggagaattataatcatggcggaaggtgaaggggaagcaagcacgtcttatatggcaggagcaggaggaagacagcgaagagggaggtgatacacacttttaaccggatctcatgagaactctatcatgagacagcactagggagatggtgctgaaccattaggaacaacccccatgatccaatcacctcccaccaggccagacctccaacattggggattaaaattcaacatgagatttggatgggaacacagagccaaaccatatcaagaacattggcaaaaatgatcagaatcagctttttcagaactctggaaattaaccaaaggcttgcagcaatctggggagcatttattcaagaaaaacattgaatctcagtaagaacattaagaattgtggcattttaacttgccctgttcccatgctgccttttcccagatcagctgtagcctggacaaccgatagcctgcaatcacagtgaaaccaggaggctggcagttactgcaaaagggagaacagaggtgatactcctcatagaccatccccagaaaattgtcatttgactggtctgatggtttcctaaaattgtccattcacaaggctgtctttatttgaccaacacaagtcagtaaggaaagaatagtcttcagtaaatggtgctgggataactggatatccacattaaaaaaaaaaaaatccctatctcacaccatatatgaaaattaactcaaaatggaccaaagtcctaaatgtaatgctgaaaccatataactgttagagaacataggactggatttttgcgaccttgggttaggtattggtttcttagctatcccatcaaaatcataagtgacaaaaattaaacttgacttagctaaattaaatacatctatgtttcaaagagcactattaagaaagtgggggccaggcacggtggctcacgcctgtaatcccagcactttgggaggctgaggcaggcggatcacctgaggtcaggagttcgagaccagcctcaacatggagaaaccccatctctactaaaaatacmaaaaaaaattagccgggcatggtggtgcatgcctgtaatcccaactactcgggaggctgaggcaggagaattgcttgaacctgggaggcggaggttgtgatgagccgagattgtgccattgcagtccagcctgggcaacgagagcaaaactccatctcaaaaaaaaaaaaaaaaaaaagaaactggaaagacttcatcaatgtaatgaaaaaccaaaaaaaaaaaagagaaaaggtaaaaagactgcccatagaattggcaaaatatttgcaaatcatatacctgataagattctagtgttcggcaaacataaataaaataacaaccgtaaaaagacaaccaaatttaaaaattagcaatagatttaattagccacttctccaaagaagttatacaaatgggcagtaaacacattagtcattacggaaatgcaaatttaaaactacaatggccgggtgtggcggcttacacctgtaatcccagtactttgggaggctgaggcgggcagatcatttcaggtcaggagttcaaaccagcctgatcaacatggtgaaactccgtctctactaaaaaatacaaaaattagccggatgtggtggcacactcctgtagtcccagctactcaggaggctgaggtgggagaatcacttgaacctaggaggtggaggttgcagtgagcagagattgtaccactgcactccagcctgggcaacagagtgagactctgtctcaggggaaaaaaaaaaccacaaaactacaatgaaataccatttcacacccactaggatggctatgataaaaaagatagacaataccaagtattggtgagggtgtaaaaagattcgacctgtcatacactactggtgtgaatgtaaaactgcagccactttggaaaacagtttggcagatcctcaaagttaaatgtatagttactgtgtcctcaagcaaatccattcctatgtatatacctaacagaattcaaaacatatattcacacaaacttttttttttagacagtctcgctctttcacccaggctggagtgcagtggtgcaatctcggcctcagccttctgagtacctgggaccacaggcaagcaccaccatgcccagctaacttttgtatttttaattttgccatgttggccaggttggtctcgaactcctagcctcaagtgatccacctgcctcagcctcccaaagtgctaggattataggcatgagccattgcacctggccacacacaaacttatatacaaatattcatagcattattcataatggtcaacatgtggaaactcaaatgtacattaattgaataggggaggaaaatttgacatatccatayaatggagtattattcagtcataaatggaatgaagtactaatttatgctacaacatggatgaacctagaaaacatgctaagtcaaagaaggcagacacagaaggccacatgttatatgattccatttatatgaactgtctagaacaggcaaagccataaagacagaaaggagattagtggttcccaggagctgggaatgactgctaaagggcatgggtttctttccgaagggtgatgggactgttgtagaattaggtagtgtcgatggctgcacaacttcttgaatatattagaaagcactgaattataaattctaaaaggatgaattttatggtatgtgaattatatctcaataattaaaaaactaggcaattgtgatcagtaaggagatatatatatatatatatatatatatatctgaaacttctgaattgctaatattgatctgttttgtgacttgggtagtaattatagggtgtttacaactatctgttatacttatgtaagttttatgtgtttatattttatgaaatatacagtaaagacacattacaaatcatgtctgttgatagatatccatcttttcaagctctagttttgggcattgaaaagagatgaaactggcatctctgaggtgccttttgaacagtgtcatatctttgggacaagaattggttgctaggttgactcaacagcaaatatcagtgatgtttctgaagagactgtaaggctgtatgatccaccaaaccttctgcctctgccattcacactcttctattaaacacttagcaaggcatagtggctcatgcctgtcagcccagcacttagggaggccaaggtgggaagattgcttgaggccaggagtttaagatcagcctggacaatgtagcaagaccccatctctacattttttaagagtctatttccacagcaaggaagaaatgaaagtacagcacctgtcccatttcccacaaaaaagtctttgcctagggtctgcatatgtgactggaagctaaattattggaatgagcttgtttgtttaaggttattaaagttctgggttctttgacttctaaagtcactctgatatgtatttggaagagtaaatgtctagcaaattggctttatatttcctttagagatctagcaaagaccaaacctgctttggacctcatctgtgccacagtgcccttgggggatgggccacctgtagcagaggaataggagctgaggcatgagctgataagtggcatcactttagggccctctccaatctcacctggaatgtcactaatagtgacctatttctttgggttcaagcttttcattttctgggcctcctttatattgcagattcttttattttatagataggtctcactatgttgcccaggctggagtgtgggggctattcacagacataatcatagtacactactgcctcaaacttctgggctcaagcaagcctcctgcctcagccttcwggatagctgggattacagatgtgcaccactgtgctcggctgcagattccttttaggaggtgaatacataatcagtaatttgctaatgccttagtaaaaacttagtgatgtgcctgcatagagggaaatctataatagacactattgggatttggcaaatttcaatgtagccgtatatttcccatttatgacagcaaagattttaacttaatacctcttatttaacttaatacctcttatcaaaagttttttgatacttaacatttaccatcttctagacactgtgctaggcatttgctattatcccattttcataatttgtaaaaagcaaattttgaccacctcagccattaggatggctactatcaaaacagaaaataagaagtgttgatgaagatgtggagaaattgaaactcttttacactgttggtaggaacataaaatggagctgctatggaaaacggtatggcaactcctctaaaaattaaaaatagaattactatatgatttagcaattccacttctgggtatgtacccaaaaggactgaaagcaggatcttgaagtagttgcgtacccatgttcacagcagtattaacaatagccaaaaggtggaagcaacccaagtgtccattgatggatgaatggacaaccaaaatgtggtacatacatataatggactatcattcattcttcaaaaagcagggctgggtggggtggctcatgcctgtaatcccagcactttgggaggctgaagcaggaggattgcttgagtccaggagtttgagaccagcctgggcaacttagcgagtcccaatctccacagtggggggaaaaaaattagccaggtgtggtggtgcatgcacatagtcctagctattcaggaggctgaggcaggagtattgcttgagcccaggaggttgaggctgcagtgagctatgatcataccactgcattccagtctggcagcatggacaacagaataaagcctcatctgtttaagaaacaaaacaaagaaacctgacatatgctrcaatatgggtgaactttgaggacattatgctaagtgaaataagccagtgacaaaaggacaaatacagcatgattccatttatatgaagtttttagagaagtccaatttataaaaacaaagtggaatatcagttactaggacttggtgggagaaggaaatggggagttaattattgcttaatgggtacagagtttgttttgcaagatgagttctggagatggatgatggtagtgatggtagtgtccaatcaacttctcagtcttctcggctcttactacaaaggaagaaactgtactacccagatttcttttttaatagaaatgttatttatagttaataacgaatgcactgcataaaaactttatagtttcattattgtgaaatgtgttcaagatcctacagtaaaagtgaaacattcccaaggacttgcgttagtgaagactacacagaaaacctttctaaggatttgtgtggatccgatagatacttggcaaatttttgagttgtacattcttacagaaagtccacttaaaagtgatcatttgtaagacaaaaatataaatagtttcaaaaatctttaaaaaatcatcctaaatgcatgatcttcacctccagcttctgaagagccctcgttctcagtgtcttccttcccacatttcccaccacagccatctcatgatcctcaagctcatgcttttccagttcgggtaggractctctcaactttctccctgtcatcccccacatcagttgtattgacaaagaacgtcagaggatgaaggtctagttctgtattaggtttgtgcaaaagtaattgcggtttttgctgttgaaatgggtatcatagataacagtgcccatggtaagggttcaaaattaacagtggaaagaaaaatagttcatttcactctcaagtaaacaatttggaaagtagtccagagctggtttagtggttctcttcctttaagttcagacctagattcttatctggtgctactggcaaggcctctgcctaatggtgccagatggttgtagcctcagcagcaggatggaagaatgaacaaagaaaggggcaaaggcagttctcttcccttcccaagaagttgctgcgggacacggttctgcttatcctattgtccagaactagttcatgtgaccacatccagttacaagcgaggttagtaaatatagtttttatgtttatttatttatttattttagatggagtctcgctctgtcgcccaggctggagtgcagtggcgcgatcttggctcactgcaacctccgcctcccaggttcaagcaattctctgcctcagcctccatagtagctgggattacaggcagctgccactgtgcccagctaattttttgtatttttagtagagatggagtttcaccatcttggccaggctggtctggtctggaactcctgaccttgtgatccacctgccttggcctcccaaagtgctgggattacakgtgtgagccaccgtgccccgcccatgtagcatgtagaatgtagtcttttctaagaggttaatgctcccagctaaaaaccttttctttccggaaaaagggaagaatgaatgttgggtaactaacactcggcagtgccctctccctatgctctagaccccctcccctctgacagtccctgctccagcattatccctcccctcacctcgtgtcatggctcttctctcctaacctgtcctttcggtaattaattgtgcaacccttaccctccaccatcccccttgaccttaggtagccctctagctgttgtccagttattttgtttttcttcagagccaacttcctggctttctcattgccctttcacatttcagcttgttataatgtggcttcgtaggccatcattgcaataaacctagtattgctgcagtatctgacctactttctaatacaatgaacagatgaacagtgtaacattcaccttatttacaccactaatctttctttattgaaaccaacactattctctcttggcttcaactcttcaaattcctctagtaaatcctttctttctttctttttttttttttttttttgagacagggtctcactctgtcatccaggctggagtacagtggtacgatctcagctcactacagcctccacctcccaggttcaaacgatcctcctactttagcctcccaagtagctggaactacagggacatgccaccacaccagttaacttatttatttttagatacagggtctcactatgttgcccaggctggtgtttaactcctggcctcatgtgatcctcctgccttggccttccaaagtgttgggattacaggtgtgagccactgcatctggcctacatcctctttttctagctacttcttacatgtcagtgttctcaggattctgtccttgattctcctgctttatcctgtcttggttggcagtctgcttccatggctttactgtcacctgtatgctgatgccacccaaagctctatttttttaaaaattttttgagacagggtcttgctctgtcacccaggccagagtgcagtggtgtaatcttggctcactacaacctctacctcatgggctcaagtgattcttccacctcagtgtcccaagtagcttggaccacaggcttgtgccaccatgcctagctaattttgtttatttttttctttttgttttagagatgaggtctcactatgctgccccaggttggtctcaaactcctagactcaagcaattttcccacctcagcctctcaaagtgttgggattacaggcatgagccactatgcccagcaaaaactttatctctaatacttatttttcctcctaactgcaaacctgtatacagatgtcttccatgtatcttatctttttaactttttgttatggaagtattcaaacataatgaaagtagagatggtaacataactgacttgatatatccataagccagcatcatcaccaatacgtggcaatgytttttacaccacctccaraccattttggagtaaatcagacatcttgtttcatggactggacagcacctttgatcacacacagtgtatcctaactttattatggccacccagaggggaaacagacttctcatatcttaacacaggaggtggttttgcaaattggagcaaggtgcccaccatttgtacccaggggagttaggctcttacccttctgtaggaactgakaggttgaggcactatctccctaaatgtttgcatytccaggagatggcttcctgggtccttgaagaagcattcctgggttgtgagacttgtgagaggcctatttagtcattatgaagattcacataaatttgaaaagcacacaaatattatgaaatagaaggraggaagggaggtctctttctttattttcaacagggagaattaagcctcttaatttttttttttttttttttttttttttttgaggcagagtctygctctatcgctcaggctggagtgcagtggcgtgatctmggctcactgcaagctccgcctcccgggttcacaccattctcctgcctcagcctcctgagtagctgggactacaggcgcccgccaccacgcccggctaatttttcgtatttttagtagagacagtgtttcaccatgttagccaggatggtctcgatctcctgacctcgtgatccgcccgcctcggcctccgaaagtgctgggattacaggcgtgagccactgcgcccggccaagcctcttaatttttaattagtattgttcacattgcctgattaagttacactttttaggtttattttgttgttttttgtttttaagtttgagttgaattcaaatgaggtccacattgctttatactttaagacctttgtaggttctctctttttttttcttctttgcagtttatttatagaagaatctaggtcatttgtctgcagaatttctctgtttagatccctgtggtgtcctatgacatattctatggcgatgtatacttcatcagaggtgacatttcagcgatactgtcagccattgacgattgcctagaattatccattaacttgtctccatgtgctttcaacaggatagtctctaacacatcaatgtcaacatatcccaaactgaccttatcatcttctccctcccttcccatgcccctctattgctggacactctgttccctctcatttatttctttagcttcctgtggcactctgcttctccagaccattttctacactgctgtctgagcactagatccaaaatgcagatttgatttgtcttcctggcttagaaaccacggttgttccccaccacatttaggacctgggccttgccccggctcctrccgcatctctttgcagtcctctaggtgcactctgggttcggaggaattgtgcattgttctatagggctgaaggcattctctcctcctcagtaagcatttcttcctcctctcttattcctggctaatgtcttccagactcagatattgctgcttctgagaagttctcctgacccttctcttcctgggtctctgttcccgccacaccctttgtacatctggttcayagcaattagcactgggctgggctgccactttctctgcctgacatcctaccagcctgtgacctccttgaagtctgcaccataccttatttctgcattcctaggatttagtggagtgctaggcacagagtatacttttgttgaaggaaaaaaggaagcaaagcatcttagctttctcctgtaacttcattcacatcacaacccttgatgagttttcccaaaccagtattttgtttctctgaaaatgatctgctacttagaagccacctggtctcccagatttttaaaacgtatgactcaaaggataactgccatatatcaaactttaactcttgcaagctaaatgttagtaggggctgggtgcgatggctcacacctgtaaccccagcactttgggaggccaaggtggatggatcacttaagcccaggagttcaagaccagcctgggtagcatggcaaaactctatctctaccaaaaaaaaaaaaaaaaaaaatttagctaggtgtggcttctgtagtcccagctacttgggaggctgaggtaggaagatggcttgagcctgggagatggaggctgcagtgagctgagatcacaccactgcactccatcttgggcaacagaaccagaccgtgtctccaaaaaaaaaaaaaaaagctagtaggtagtaatgatgatgagttattgctcccttttttgaaatacatttttaaaccaggacatcagtagataatgactgctttcttcaagtaaggctgacctctaattactttagacagatggtgcattgttattttaatatccaaaatagtacaattcagaggcagaacctaagagattacagtggttggcttaaataatttaacctttgaataaatttacttatccctctctattaatgaccaaaccttggaggaaggagatgttacaagggctggttggagctgtctcctctgaaactctgaagaaatgaactgggacagatatctcaagacacatggttctttggctgggcgcacggtggctcacgcctgtaatccagcactttgggaggctgaagagggtggatcgcctgaggccaggggtttgagaccagcctcggtaaaatggcgaaatcttgtctctacaaaaaaatataaattagccaggtatggtggcgcatgcctgtagtcccagctactctggaggctgatatgtgagaattgcttgagcctgagaggttgaggctgcagtgagccatgtttgtgccactgcactccagcctgagtgacagagtaagaccatctcaaaaaaaagagaaaaggttcttaaggttgtacagtctttgggagttaaatgcaccaaataaaattcagatctctgcattttattggtagtaaccaaatgagtttacctaaataacagtctcttcaaaggttattacccaaattacattttatggataagagaaattctacttacttcaaatggcctgaattaaccctggcatcccccattccccaccctccagtttagacttctagtaacattgcaactttatttttaataagctagtatttcaagtacaagcttgttctaagaattagcagtcacatccctttaaaattccaggaattcggccgggcacggcggctcacacctgtattcctagcactttgggaggccaaggtgggtggatcacctgaggtcaggagttccagaccagtctggccaacatggtgaaacctgtctctactgaaaatgcaaaaattagccgggcgtggtggcaggcacctgtaataccagctactcgggaagctgaggcaggagaattgcttgatccggtgggtggaggttgcagtgagccaagatcacgccacttcactccagcgtgggtgaaagagcaaaacttcatctaaaaaaaattttttttwaattttaaattaatttccaagaattccttttgcatggggctaaatctgccatgtaaaatatttgagtctgtaactttaaaagccattagtaccctctcagcaccaagtgaggatgcagagtctttgtttttctcctgatttcactgacttgttattcctgacaagtcacaaacatttctatcctattcatatttagaaacaatttggaaaaactgcacactaagaggcccctagcttttctccatgtctgttattctaccaatgggttgcctgtggctcagcagaccctcctgtgtgtcagcccactttgaaacccatctctcttgacttgctatgagccctggtagcaacaggggtcacagcagtagggagaatgggatagtcttatgctgtcaaaaaaaaaaacccaaaaaacaaaaaaacaaaaccttactcatcatgtaatcatatatgagctctaaccaaagagtaattcagttgctgttaaacagttggagctattcagccttgctgaaattcttcctctgcaatgtgtggatagtgacaccagcagaggatgtgagaatgagcacgtatctgtagagcgtgtagcacagtgtggtgtgtagaggcagacaattattatccatttcctgtctctggcttctttcagggatttactcactagccctgaaatagaagtgctgttcacagatattgctaaggtcaggtaaggctgttttgatttcttccttacmgcctggttgcatcattctgttgatgcacttgtgttcttgttccactctgatagagcctggagaggtttatcaaggccaaaggtaacatctgggcctgaaagatcagagtagtactcggtgtattttattaccagcactcaggagagaagcaacaaggctgtgccagtgtataaacagcaagtgaaaaatgagaccctttcacattgttccaaatctatttgacatgagaacttccttgaaatttcaggctcctcttgtcctacaatgtcctcttagaagaaagagcagcaatgaaacactaggtctcatctgacctggacttacagatgaattgacctgatgcacagttagagaaagggaaagttcccacaggcataacagccagacacatattccttacacattacaatgtctgcatttttcatcattaccctaagcttcttgaaaaattagtgagaccgtttcttatgacctatgaaccagaagaacttgccacagcactctgataaagaaatagctttaaggctgggcatggtggctcacacctgtaatcctagcgctttgggaggctgaagtgggaggatcacttgaggtcaggagttcgagaccagcctgaccaacatggcgaaacctcgtctctactaaaactacaaaaattagctgggcatggtrgtgcatgcctgtaatcccagctacttggggaggctgaggcagcagagccccttgaaccagggaggtggaggttgcagtgagccgagatcatgccattgcactccagcctgagcgacagagcaagactctgtctcaaaaaaaaaaaaaaaaaaaaagaactttaatattactcagttcatcctgctgttacaaaaagttaacttcccatcagcctcctcactcctcttaaaaaaaaactgtagcagatgggttacaattcatgttttctacaacaacatactagaaccagggttcagataatcctagaactagggttctgttctaccagtcctttgggtattggtagtacccaatactattggcacagtgggcattagaggagaaagctcttaagaggtgacatcaggctggcatcatgtatttgttgattcagttmtgtaattaactagaatagtttaacataaatttgtaatcctagagcaactttcatattttgttcttaaaggttatggcagtagaataaaaaagtactcacggtggcatacattgctagctgtccaccaaaatccattcgcattctgttctggacataagctagacctgcatttgctggccagtgccaaaagtgagcaggagtaatgtgccactttcaggccagagtcttgaaaagaggaggtgtgctttctcaatgctttcttcctctcccgctgccttgaacctggggagacctagacttagccacacagatggcaaagtcctaggcatgagagccacaagccaggtctctgaattactgcataaaggaaagcctmctgctgacctggaatatctaccctggatgctaaacaaacaagaaataaacttgtttgagccatattttgggctcaaacatattttgctatgacagttaatttactctaataaccttacttaaaataatattatgtattatgcctataactagcccaggcatggtggctcacatctgtaatcctagcactttagaaggccatgatgggagcattacttgagcccaggagttggagaccagcctggaaaacacagtgagaccctgtctctacaaataatccaaaaaaaaagaaaaaaaatgattaaagtctgaaaggatacagtagtaaaacccgggcagtaggtttgggacctctgatatacacgttatccaattttacagagaatttcaaaacaaaacagtgcaagtacaaactatttgtcataggagttcttctttgacgcccctgatcctcagtgaacttcccctgactcctttaggactcattgtcccaagtccttacctggcactgaaactgtgcaaattatagagttgagttcgttcttcctgaatattctagggggaaaaaagaaaaaacagagttgggagcaggaaggtaggccactcaggcagggcctctcaaggtataaatccctttagaggaggctggcccttagctttgtggatgcagaaacacaaggttgctgagtgcatagctcatcaggctttcagacccagactcatgctaaccatgctggatcaaccaaaatgcccgtgcataattatgttaagcagtagtccttccagtgtccactgtctagaagcttttgcccatattaaggcatgtgggaaaccaactgaatagccagaatgctgtttggtgagatggcatcggagtaaatggagttggacaatgtggacagaatccactacccaggttgggaattaatctgatgaacccccgacagaagttagtaacccttctagcacctgtaatgagagcagagtggtggcctgaattagcgactgaaatccttctatgaaattcagtctctcttcctgggaacgttactgtaagattgccaaattctctttaggttcctttttaggctttgtgcagcttttttctaatacaagtgagtactgttttctgtcacgtttatctgagtctacatcctggtttgcatgattggacttgggtagtcccaaagttctgtgacttatccactggattgagcactttaatttccctgtatttcttcttggtcctatgaggattgaatgaaagtgcttggcaaatagttctgaaacgttagttaatattatttaactccagtttggggccttttatatgactattccttagagtgcaattaccaaaatataaatttataaagattataaatcttttataattgtacacctaatattataaaacaccaggcataccctggtgtcttacatctagtaagaacctaatggttgatgtgatttaaggagagtgctgagataaacatggaggtgaaagtagaaacatccaggaattgtccattcaagatctgtacagtasactgggtgcagtggctcatgcctgtaatcccagcactttgggaggccraggcaggtggatcacttgcggtcaggagttcgagaccagcctagccaacatggcgaaaccctgtctctactaaaaatacaaaaacaaattcaccagacgtggtggcgcacacctgtaatcccagctacttgggaggctgaggtaggagaattgcttgaatccaggaagtggaggttgcagtgagccgagaytgtgccactgcactccagcctgcatgatagcgcaagaccctgtctcaaaaaaaaaaaaaaaaaaaaaaaaagtctgtgcagtccaggattgtgttgtcaacagacagaggaaagacttgatattgacttgaaggttaattaaagctttcattctcttaagtctaaagtatcctctccatattttgagatttggtgaagtccataatgactttactcaaacctttttgtcttttttttaaaaaataaaagatttttatagatgttttatttggttcacatttttatcttggttcacaatgtctttggcctgttgtcatatttttctcctcctacccctgctctgctacctttttatctggttgtctggatcttctccaggttggggccttttatatgactatttcttaaagtgtaatgaccaaaagataaatacagaattcttgctgtaggtgtatctcacctttaagaataggtctgggtgacacaagggctggggaggaaaaaaagaataggacaaagttttctgtcttgtttccaatatctcttgcggtggcaattccttggttggcctcatggctttttgttatggtcactgctcctcaaatttttatatttcttcagaattttggctttggattgagtttgggttcaagaggtagagctcaaaattataatttaaattcatgatgagtccatgctgctcttaatccgaacctttaacacaaatctctgcaaatattaagatacgccacgtcttatcttgttactgcccctttcccaccaataccaggaccctaagaatataatctatgtcaatgttctgttctctgatagttcagatccctttttgatacagtcagattatttagtcctcatcctaaatgtagcatccaacttaggtggggaaatattcaaagctgtgagaatatagcactagttcttaaagtgttggactcatgaggaattccttaggagacaaactgcatagtaaaggatagaggttgagcgtccctaatccagaaatccaaaatcggaaatgttccaaaatctgaaactttttgagcaccaatatgacattacaagttaccctgaacacactgtattaatggtatgtcatattttctgcttttaagtacttatgtgtgaaaaagtaagaaaataactgcctatcagtagcatataaattcagagtcaggaagatggtgatgccaaacaatcatattgtccacatgggtggctgtgatagtgacacctttgttttctgatggtttaatgcacacaaactttgtttcatgcacaagatgatttaaaatattatataaaattaccttcaggctatgtgtataaagtgtgtatgaaacacaagttttgtgtttagacttgagttccatccctaagatatctcaatatatatataatgcaaatattccaaaatctgaaaaaaataaaaaatctaaaacacttctggtcccaagcctttggataatgggtactcaacctgtacaaactttggagccagatggcctagatttggatcctgattctggcacttaatagctgtgtaacttgggcggttacttctctttgcttcagtttcctcatccaccaaataggcacattttagttgcctcacacaactgttttgagtcttaaataagaatttatgttaagcagctagaacaatgcctgggatcttgtaaataatcaataaatattagatatttcttttaggatgtttcagattggctatttataaaagtttataatatgtgaatttcttggccaggcaggtggctcatgcccataatcccagcactttgggaggatgaggcgggaggatcagttgaggtcagaagtttgagaccagctggggcaacatagcaagaccccatttctacaaaaagaaagtttaaaaaaatgagactctctttgtgtatttttttgctaaattaatagtacttaatttcctttaaaattgttggttcttaattttctttaagattgttggttctttttgatattttatttctactctatcactccaggatatctgaggtctaatggttaaccatttttttattgttgggttaagtcaatcgatatctcttagtttcagtttccaacatctgcaaaactgttcataataggatcragataatcttcccacaatcatttgacattttaaattttactgtgacaaaatgattatgatgtgtactttgtcacgtattatcattgtggcccaggctagttaagagttggagatagcacagaaaattcatcttgtcatccctcatttgcttccaggctgccacctaaaagactttggagatttgagttttactccagtccccaaagatgatctctacaacaacctgatagtgaatccacgctcagtgggtcttgccaaccaggaactggctgaggtggttagcagagctgtgtcagatggctacagctgtgtcacactgggaggagaccacaggtaagctgggagccaggcgtggtgaggggatggattacatggtgcttggggctcataacttagcttctttatctgtttcttcatctggagaaaaataccctacagaatttttagggtagatattaaaatgaacagcaagcatttaaatgtctaagatcctgagctgctcaaggggcactgtggttttctttgtatgacacattgcacagtaagaatatgtacattcagacacagcaagttcagaggtatactaggcaaggttcctaggcactgtgttaacatgcttgtctcctggaaagctttcttgagacttatcttatgactttggagaattagaaagatccattgataggctgaatgtgcaagtttttgttagcatttctgctaatagacctgttagaaatcccctttggcatgttactacattttctttttttttttttttttttttttttttgagatagggtctggctctgttgcccaggctggagtacagtggcatgatctcagctcactgcaacctctgcctcctaggctcaagccatcttcctacctcagcctcccaagtagctgggactacaggtgcatgccaccatgcctggctcatttttgtatttcttgtagagacagggtttggccatgttgcccagactggtctcgaactcctgagctcaagcgatccttctgccaaggcctcccaaagtgctgggattacaggcatgagccactgtgcccagctgtggatacattttctgcctccacaatatggaccctagtgactcatgcaatcagtcctttgatcctgtctcctcctgaatcagcatgtactttattgagcactgttctgatattttctcagcagtgctagagattgcaggaaatttgtgatatattaaggcctagatgaaataaatatacatggaataaacaaaaatattgaattctacagaatttcaaaggaggaagagatcagtctggactaaaatagatttcacaagggaatgtgatttgaaataagcaatgaaggtcttcagtaggaagaaggcactgaagtactaggagtattgagcactccatacatattctcagttaattctgctaacaatgctaggtggtagatatggttttatcatttactgctggaagcatgtagggacagatatataagaacttatccaaggtgggcacagtggtgcatgcctgcaggcccagctactcaggaggccaaggtgggaggattgcttgagcccaggagtttgaggccagtctgggcaacacagtgagatcaggtctcttaaaaataaataaataagaaagaaaatataacttatccaaggactagaaccaggaaatagagctgggattcaaatccagtgtgactcttctggtgattattttccctgaggtgctgagaaagcttttcagatcactgaacagaaatgaaatctttgttacatctggagaagcaggtagattcctccttgggagtaaaaaaaaaaaaaaaakactcaggttgaagaaaacggtcacacccaggttccctactgagatgactaggccattcaattaaatcaaccagagggcaagtctcctgcctcctttctcagtgtagtctctggaaatttattaagtctgtctgctgttctgagttctggtcaagtctcactgtttggggaccactgatcaatgtgattaccacagatcttgttttcttttcctgtggctatctatattgcagccatgttactgcttaccagctcaatgttaaagcttaggcaatctgaaattctagagaggaagagataagtgcataacttgaatagctgttgaacattttcaagaagagccatttttaggtcactgctccttttatgtagtttaacatatattactactttaatcatcaaagcaactctgatttacacaggccaagtattattattatccctatctcacagaaaaggaaactgaaatctaaagaaattagatggtttgtcttcagtcacacagctcttccaggactaaaactctagtattctgacttaatccactgccttttcactagaccatgctattcctcaaaagacccaaccagtgtgggacatggcacctagaatagctgtctcatgctatattgaccaagaaggatggttgcagtcctaagatgcttaagctgcatttcccatctatgtcaaattccttggttactgggaagctttccaacatttatttcatcaggtgtattcttagaattgagacagaacagttggctaatgtaagcagagcccaaggacaaggaaaggcaaaaacagaaatacactttaagatcttatatttgaggctgggcatagtggctcacgcctgtaatcctagcactttgggaggctgagccaggtggatcacttgaggtcgagttcaagaccagcctggccaacatgttgaaaccccatctctactaaaaatacaaaaaattagccaggcatggtggcatgtgcctgtaatcccaattactcgggaggctgaggcaggaaaatagcttgaacccaggaggcggacgttgtagtgagctgagattgcgccactgcactccagcctgggaaacagagcgagactccgtcttaaaaaaaaaaaaaaaaaattaaatgccatgctaatatatataaggtaacatgcaatacatctttttactcagtggtctaaattaggtctttaatggtttaccctgttaatgtctccaagagcttttcttacagattttggtgagtcgttacctatagactgtaccatttacctagatttcttttttttttttcatttttggagacagggtgtcactattttgcccaggctggtcttgaacccctgggctcatgtgatcctctcacctcagtcctctgagtagccaggattacaggtgtacaccatcttgtctggcttaacttgatttcattcattgaacaaatatttgaggttcttttctgagcagggctaatggataaaattatacggatttggggacaggacagcagtgacatctgtcacactgcagggtagcaagtcaccagcttcgaatctctagggctttatcactcaagattaatttttgagaactacaactacaggtcttgcctcacccaaacccagtctccatctaggccctggctttgcactgtggagagagtataagttgttttggctgaggacgtttgttatcggtcatgtttgccaagcagagggccttcaagattatacttgttctttgcagcctggcaatcggtaccattagtggccatgcccgacactgcccagacctttgtgttgtctgggttgatgcccatgctgacatcaacacaccccttaccacttcatcaggaaatctccatggacagccagtttcatttctcctcagagaactacaggataaggtcagtgggccaaaacgaaaagaaaggtgaatggcttgcagggttttgctggagttggtctagttcagttaagattttggtgaagggtgggttgagtgtggattaccactccttcatttgttcatcactattatggaccaggcagtctgccagatgctaggggtataaagactagacatagtctctgttctttgtaagaaagcaaggagggggtagtaacaatagcgactgatatacccacagcctgaggacttcttggttagaggctcccaggccatactctcagacacactgatctagaagacaaataaaaccatgacctctgggtaatattttcctgarcagttcagaatatatgggagtccatgttaggcacagactagaatctgtatatccctcccctcagtgagggaccaagtcaaaccaggacactacaaagattattcattgggcggaagtcctgtgtcggctgttggcaacttgagatggcaaccaggttatgcttcaagaaccaatctgtaaacaagtcagtaatgtgcaatgggatagaaaagggctaatcagcagtattcctgctactaggtaagttaatgagaaaccaagacaaccttagagattttattcgtcttgagaaagcaatactgtgttcctcagctgcccttctgaaacatttccaccttgtgtcacttctccttcccagatcaagtgtgtcctgtgttgctctaaacttaccctgtgggtggcagaagaaagcagattgcatacccacggacrcacatgataatgatcttggtgagaacaagaattcttgattaatcctgtccatttctccctttcataggtaccacaactcccaggattttcctggatcaaaccttgtatctcttctgcaagtattgtgtatattggtctgagagacgtggaccctcctgaacagtaagttgatgcatttggctgaagtttagggcctgtcctagccaattatgttctatttgaaaggctgatgcttaacttggtctattgcaggtcactacaacaaacccrccctctcccccaaatacatatttgttaaaaatgctctttaaactaaggactcctccctttatatytcatcacagttttattttaaagaactatgatatccagtatttttccatgagagatattgatcgacttggtatccagaaggtcatggaacgaacatttgatctgctgattggcaagtaagtaactataactgatgtcagggcaaacccccaatgggcaacacacttttagcctgtttcttgaggacagcagctttacttttaaaatacaaagcaaaaacatacacataattttaaatagytcagaaaggcaaaatttgaaacacaggtcatattcttcctctggggtttttgggaggaggtttcctctaaatcattgcctagatcttctgtctcatgaatttttctttatctccatctttaatgcttatcttctgagatgacaagcatttattgtttcaactgtcccattcttcccagcctcacgattgtttcatctgagttttatattaagcaaatcttggcagtgtagaaagatggcagatgaatactaatcaaatggtaattttaagagcattttcccaataccaagtctttacttctgggtgattaatgtcagaattgttatctggtagtatgtcatttcataagctgttaagaaacttagttgttagcttcagcctttggacactggggctataatgaagttagaaatggaagatgttaaaactgcagacctaaaattagagttcacttcagctgctgttacgttcagagaataagagcaaccataacttacatcaagccaatttaaattagactaatttaaattgtctaattaaattgtctctagatgagagcccaatctcatctagaagtgaagaaatctctctattgacagttattagtataagaggttctaatacccagtgtaaggcagaaatatacattggagttagtctgtctgaggtatgcagaacaaatggcagtatcatgaagtggtatgtaggaagttaatattgccaatctcagtaacttccaagaataggaagcctggaaatgtattaacagctttattaacaaagtactaggactaatagcaacaaaatcaaggagttgcaaccataagaaggatgagtgtccaaggacaaccagttaagtattattttaagtattattttatcctcttcctttttaggagacaaagaccaatccatttgagttttgatattgatgcatttgaccctacactggctccagccacaggaactcctgttgtcgggggactaacctatcgagaaggcatgtatattgctgaggaaatacacaatacaggtatgtagcaaccaggtctgcagcctgttaactacataggtaaatatgctagagtctcttgcctgcaaaggatcttttctgctattccacatcattgcagngtttgtttttgcttaaacttttgtagctaaaaattatatsgccatgctaataaaaaggatatagtcctttagagtcatgcttggacatggctctwaccaaattacactaaggtaataatgagtaaaaaattgtatatttaaacaattaaatacaagaataaattgtcaaactgatgcagttctttgagttatctaaaggcagattaagataagaaggcaagataagataagagtgcaaggctgtaatttgcactctaagagattggttcattgggagttgtgaatttggagctaaagctgatctcttgaagaaatctgcaaactggacaatatcttgggtcctttatgtagggtaggtcttgtactagagcctgaaaggatttctaataagggggatacagttagatgagaatggctgatggaaagagtactaagatgaattctacgttatcaagacyggctacttttccaaaaytcatacttgtttgcaaacagtttccatttctgtcagaaagcttctggttttaaagctacttcaaatgacctttcattccaaaatttaaagaactaccaaatcatactgcttcagtaaccatctgatggaactagggtatagatagagaccccagattgaaaggttcagggctatagagaacccttgactagctgggatagaaactcacattgagaaatggtctccttagcgccacagcctgccagaaccttaggcagtacaaaaaggcaggcagtactggtctaattctcagatctgcaatcttagatgttgccagtggtccttaggttattggccagagaacttgggggttcaattctctgctttgcttcctaaaaacaccacttagagcaggggttaataacctctagcacttatatatggcatggcttgtctctttgttcctatgctacaatattttactccaaaagacactcatggggctaggcacagtggttcatacctataatcccagtactctgggaggccaaggcaagaggattacttgaccccaggggttcaagaccagcgtgggcaacatagtgtgaccccgtttctacaaaaaataattagccaggtgtcccaactacttgggaggttgaggctgcagtgagccatgattgtgccactgcactgttataatgctgtcaactagatacataaagcagtttgcttaatttatagggtggcaatagtctggaaacataagtcatgtatatatttctaatagtgcaaactttgatgaccacttctgggatatgctaaaggtgcaggtttagtcagtggaaatcagagacaaatcaggaacacaggtccatgtgcaggaaatgatggaaatgctacagtaatacacctgttggttgcagtttggcactgtacactcaactatgcattgctaataagggaagatgctgaacggacatgatggcattcagcacatcatgtactatagtgtaatatcaataaaccattaggtacatttgcctgtgtttccagactttatggccaccctaaatattcttagatacttgtattcctgaatactagcttgttcagatcacccttcatccagaataaccaactaaaaagttaaattctatagagaagtgaggcatttagaggggtgagcatagtagcaggtctggataggttcttctggtttaagcttcccttccacttgctccaggccaaaggaacactaccgagaactttgacacaagttctcaaaccttaacagaaggtaactgaagtccagataaaataattaacatatggctgaattttctcttgatcaagtacaagacactgggtcagtctgctgggagacaaaaagatgttgttagatgtggaacctgcctccagagckcaggcctgcaggggtgagaatgaagtttgcagtaataactacatttcagggcatatggtgtggtgctctaacagatacagataacacattagagttcaaaagtgggaatgcagtttggctagtgmaagtggcagatttcctctgccttcatacttgattcatttccaggcaggcatctggaaggttcctagtcatactggaggtggcatacattttgccaacaagcaggatgaaaacctcccccacccaacaccaagccttttccttttccagaacgcctgacaattatgcctgttatgttagttgaacagggatggtttatttcattatcttaaaaggtttcttttaatctactatagcacaacagtgttttaacttaaattcatggccaagaggatgaggtgcaaggggcttcctaaaaataggtattttctactataaaatggactcttgtttttactttggcttgttctccctgtcccagtgggatgaccctcactgagagtagcagcaagggaacctgaggttttgtcacacttygttcttccagggttgctatcagcactggatcttgttgaagtcaatcctcagttggccacctcagaggaagaggcgaagactacagctaacctggcagtagatgtgattgcttcaagctttggtcagacaagagaaggagggcatattgtctatgaccaacttcctactcccagttcaccagatgaatcagaaaatcaagcacgtgtgagaatttaggagacactgtgcactgacatrtttcacaacaggcattccagaattatgaggcattgaggggatagatgaatactaaatggttgtctgggtcaatactgccttaatkagaacatttacacattctcacaattgtaaagtttcccctctattttggtgaccaatactactgtaaatgtatttggttttttgcagttcacagggtattaatatgctacagtactatgtaaatttaaagaagtcataaacagcatttattaccttggtatatcatactggtcttgttgctgttgttccttcacatttaagtggtttttcatctttcctccctcctcccacagcctggctatacagtgcatccttgaactgtcagcccacagcagcaatatgcttattctatccacatccctaacatcatgcattcacaaggtcaaagttctggtccacaaacccttccctatagaagttcaatggctgcgaaagaatttgtagtaaacyaggcctcccaggatggcgagctccagtaaratgataatggaaagcagcagcttgttggttgtcactctacaaagagaagcaaagtggggagtagtcagaagtttggataaccttccttctaaacattttggggttagacctgggaccacggctggatactctgaggctgtatgtttgatcacacagccacttagcaggaagtactcataaggttctttagctgtcacttagkgataacactgtctacctcacagaaatgttaaactgagacaataaaaaccaaagcataaaaatggattctgaaatgttgttcaaatagtagttacttcctttaaaaatagcttttctagaaagaagggttagctagaaaaagtaatcaaatagacatccagctcaggatgggtcctgccctaggataagtaactagaagcctgggtaatacctttcaatcccttgtaaacttcttccctctgccctatttttccctttgctctcctatcaacccaaatgggtatgttataaaggtagtataggagcttaaaaattttcctatctgttgtttacataaagaatccaacctctggttctcatgttcactctaggtttctccctagtccacaaggaatttatcactgtaggaaaatcccacccctcctgctagttccatgagtgggttgtagttttgtttcatgctaggccacctgtgcccaaggtcacgtacaataccctcttacccccaacttcaacctcagtggcagtatttctgccctggatttgttgctgttagcactcgaggattttgttttttatttttggtaaagactactgtattggtggcagttagtacaattcaaatattgtcttcaaagaaggacttatttattctctatggactaggagtccatacagagctgaatgaaactgaatcaagtcactgctgtgatgactgaagtcaatcccatttcttgggaaatgaaaccacagccagctgatgcatggcatatgctgtttcactaactgagaaccatggtggctctatacaggaggtcatcagctctaccaccctttagatgcactggaattccattcttctcctgaaacagcttgtgttttctggacctttattttcaaaatgcctgcatgaagcaatgctcatggtcctctgggcaacctgacagtgccagcagattctgcagcatcttgactcagttactgcccaagaaccctgacaactccacaagggttttatttttaaaagtctacttcttccctacaatatagaacttccagaaaaggagctgactcccatgaagggcaagcagagccaaaagcaagtactatgcaagtgaaaactactttctaatcaagattttacaaatatatttcttttttttttgagacggagtctcgctttgtcccccaggctagagtgcagtggtgccatctcggctcactgcaacctccaccccccaggttcaagcaattctgtctcagcctcctgagtagctgggattacagtgcccgccactacgcctggctaatttttttgtatttttagtagagacgggtttcaccatttgagccagactggtcttgaactcctgaccttgtgatctgcccgcttcagcctcccaaggtgctgggattacaggcatgagccaccgcayggggctgagattatataaatatatttcaaggaataggaagctgttattcccatgtgttgccttctctaaagaacatcagctrtgattaaatgtcctttcagtggagaaatttttcactgctccaagtcaaagcagtatatacttttaacaaatgattttatcctgagttatttaattatccaagaccatattccttagcgtctttattctggtctgctgggtggtactgagtatacagggactatgcgtcaactgctgaggtgctttatgaggacctttgtaagtcactattttaagctttttggttgaaagccactgagttaagagaaatttcatgactttaataaaacttactttctggacattgaacggagaatcttccgacttttgctcaagttttcacttgtgtttaccagctgagaagagaaaatagtgattatttccctctttaaaaagtatactctgtacaattgaatatccctagattaacagtaggcattaagggatatatgttgaaaaattccaagaaatcaagccaatttaaatgatggcctttgagtgtaagtagaagaacctggaaaggacaagatattttagtactcatcaagtaggcttaagaatcatcttcccaggttgctgctggggatggactcctgagactgagctaatcttctaccgtggctactccaaaagggaaggcttcaagtgtagccagcagactggccagccagtgactgtagagcaacttaagatttgaatttcatcagccaaattccaggacagcctcttgagttggcatttgtttttgtaggctggtctgttactgcttttgggatctggtttttttctttaccctcttaagagacagttacattgaactgtgaaaagaattaacctccatggaactttcaactgcttgctactaatctggacagctggaggatatttcacctccagcagatggctacttgccatctgttcccattccccagtggccttggtaagctgacctctcagctcgttccttggcttttatttatttgaaacagggtctcactccgtcactcaggctggagtgcagtgctgcaatcgcagctcactgcagcctcgacctcccaggctcaagcaataaccccacatgtccccaagtagctgggatcacaggtgcacgccaccacaccctgctcctttttttgatttttagtagagatgaggtctcgctatagagatgaggtctcgctatgttgcccaggctggtttcaaactcctaggctcaagccatcctcccacctcagcctcccaaagtgctaaaattacaggtgtaagcccggcctccttggcttttaaattcaaccaatctacctggtatgttcaaaaaccaaaacccacacaatctgtaagcaagttacattctccatagcttgccttgaatgtagtactttattgtgaattttcactgaagagggcagggcattactctgacttaatggagaactgaagctattaagaaaatctactcaaatcttcacactgagctagtattttcctgtccaaatcttggccacagtatgtttttcaaattgatttgccttctgctattaagaatacagcattccattggtaaattgtaccaattaaaaaattttgcccgggcgcagtggctcacgcttataattctagcactttgggaggctgaggcgggcagatcatgaggttaagagatcgagaccatccttgctaaaatggtgaaaccccgtctstactaaaaatacgaaaaattagccgggtgtggtggcagacgcctgtagtcccagctactcgggaggccgaggcaggagaatggcatgaacctgggaggcggagcttgcagcgagccgagattgcgccactgcactccagcctgggcgacagagcaagactccatctcaaaaaaaaaaaaaaaaaaaaaaaaattccagctgggcacagtggctcatgcctgtaatcctagcgctttgggaggccaaggtggaatgattgcttgagcccaggagttcgagagcaactttggcaacataatgagaccccgtttttacaaaaaattaaaacaattagccaggcacagtagcacatgcctgtatcgcagctacacatgaggatcacttgagcccaggagtttgaagctacagtaagttaaaattgcactgctgcactccagcctgggtgacagagcaagaccctgtctctaaaaaactaaaaaattcctatgtaggttaactcatttatggaaaggaaaaaataaatgagttatttttctgaggctctcagagtgacagyagactagagatccctgatatagtcatcatttgatttaaatatttgttttctttccacaatgatccagcttaccttactggataatccttagacatttttttccctattacttttttttttttacttttacttacataacagtaaagggttatagtccaggattgaagcataatttataaatctataaactgtggtactattttatgaaatctggaaaacagccttggctctaaataacaggatataagcagatgatgttttcgtaagaatagcagaataccctattagatgtgtgagaaattaaaatctcagattggaagctttgaatccttaagtgccttttgacatattatttctcttgccaaagagagaatgcagccactttatccttattaatttctgtaatcttgtaagtgtagaaatcaggtccttccatctttttttcccctcactgaagcaaaaatttccagtgatgtctaaatcttaggggtaaaattgcttctaagggacatctctcagccaagcaaactaaaaattgagcaaagcggccgggcacagtggctcacgcctataatcctagcactttgggaggccggagcaggtggatcacctgaagttaggagttcragaccagcctggccaacatggcgaaaccccatctctactaaaaatacaaacattagctaggcatggtggcgcatgcctgtaatcccagctactcaggaggctgaggcaagagaatcgcttgaacccaggatgcggaggttgcagcaagtggagatcacgccactgcactccagcctgggtgacacagtgagactctatctcaaaaaaaaaaaaaaaattaataaataaaaattgagaaaagcataagaacttaaaaaagactattccctgaatacagaactgctgtagcttttggccttagtacggtttccaggtgcagtggccccctaattaccccatacttgcccctttccctgtctgcccagacttactctactcttggtacgttctaactggtctcgttgttcccccagctcttctatgatttctgagccaatctggtcagtctctgtggcaatccgatgagaacgttcaatactttgggtggcccggttcaggctttcagtgccctgcagaagcattgccctttgagactgtagccgattctgaaagaagtatggaagagaaatgttagactttttccattataaattcattgccagcatattcctcatcaccttccccatgttagaagggatatagtgagcaataattttcattccttttaagacagaaccaaagaagctaatgattcttttcaaggtcacagactaaagcaggacctgaaatccaatcaataggatcacaatacccccactccactgccttttacacttacgcgaggcaaggaaagatggattaaaaatactggagcactttccctgtgtttgtaatgaatctgaactggtccatgtgcctcctggactatcaacttctgaaaggtggcagcccagatgtgggagctacctgataatgcatatagcctgtaacttcgatagtgctatgggcaaaccaactaaactctgcagccctagaaaaaggttaattcactgaagattcccactagactggtactgaggattgacggaccatgaataagctattctgttcttcgttttaagcctccagcacctggtatttccaggtggtctcccatccaagtactaacctggcctgactcacttggcttctgagatcaggcaggttcagagtggtattgcctagatgactacattcttctttttcagcttctaaagaaagcatgtagaagtctgagacactaccacattctggaaaaaacgtatgtggttaccctcttggtgagccccagaaagaacttcacctaaggtcaaacaaaaaaccttgagcctgccacactgggggtgatttggtctcagggaaattagtatctggggcttgagcaagcttccccacctgccctaatttctcaactgccctaattttctaaatccccaccgaagttttactccacctgtaatcctaaatacagacagcaggaagaaaaaagtagccttgtcaggccagaattaacaaccactgacagaaacggaggcagctccaagttcttagctgttcaaagcacgcgcgcgcgtgcacacacacacacacacacacacacacaaaatcaaaagggacccagctcacagaggcctagtacagagcaagtgaccactggcagtaggaccatcaaggagccaaaagattggctcccagaacagaagtagcaaggagcattttctttctttctttttttttttttttttgagacagagtctcgctctgtcgcccgggctggagtggagtggcaagatctcagctcactgcagcctctgcctcccgggcacaagcaattctgctgcctcagcctcccaagtaactgggattacaggcacccgccaccacgcccagctaatttttgtatttttagtagagacagggtttcaccatgttggccaggctggtctcgaactcctgacctcaggtgatccaccagcctcagcctcccaaggtgctgggattacaggcgtaagccactgtgcccggcgctctgtagcattttcacttaataaatggcatacagaccagtagacgaggaaaccactgaatgaggttcaaataaaaccagttaggttagcgcaaaggaagaaggaaaaaggttttcaaaataaaagatgcagattttcaactgagtaggctaaaaaatgacttaagaaaagatcagatcacataaatgaacttcagacagatttggaacaatactttttctgaaggtatggatacctaaattatgttttaataatttctgaaactcgccaggcgtggtgggtcatgcctgtaatcccagcactttgggaggccgagacgggtggatcacaaggtcaggagatggagaccatcctggctaacacggtgaaaccccgtctctactaaaagtacaaaaaaaaattagccgggcgtggtggtgggcgcctgtagtcccagctacttgggaggctgaggcaggagaatggagtgaacccgggaggtggagcttgcagtgagccgagattgcgccactgcactccagcctgggtgacagagcgagactccgtctcaaaaaaaataataataatttctgaaactcataattttaaagcaaaattgtttggacttcctccccaactttggcaacatgactaaagtcacttttacaactcccactttaaccagctccacctgcctgcctgtttccagtctccctttacaagtgatcttctgtcagcttctaatctgtgataatccctcgcgcatccatttgaaaattttaagtacttcattctcaagggatctagttttggcatcagcaatgtcaagccaatatcatcctgaatatctcttaaactataatcaggatgcatcgtgaaacaggatttgtttaaaattgtagtatgagcctttcagtctgcactggtgggcccctttccatttctctgccatgctacttgccagagaatttctactttgtgttgtgtttgtggaagacagaccaaatgcagcacatttaatctttcagacgttttattcctttaacgatctagctgctctagatggtttcagaatacagatgttcaattagtccaattttataaatcagaatcctgaaagctagagagggagtcttgctcactttctattaccacagaataaaatgataaaaagctccttctcgagaagcgccctgcattggctactgtatctcagttgctgggccatcttgacattaaggtaaaggaaagcttggattgattttgtaacaatattctgataaattagaaacctaactgaattttccaggcatacctgagaaagtgattctaaaatttatatgagagaataaaaaagatcaaggagaaaagaaattagatcaatgagtcagaatccagataataagaataggtaacatttacattctactacatacaaagcactgttttttttttattataagactgtattatattaaggataaaaagaaatctaaatatgcatatagttcgaaaggcctgccttaaatagagcagataccaaggggtaacaggaactggatgcagaaaagaggataagggtgaaaaaaatgaaacaagagtctagtatacactgataacatgaaataccccaacaatatagttaatttttgtaccacaggcccttaaaggaaaaaaaaaacaaacaaaacagctaaaacttaccatatgctcattctctacagcatatatgccatatttcatgtctcctcggcctccaggtgtggctgtcaaaggtgtgcttctcacctcccgatggagtttagcaaggtccttccggtagtttcgaagcttagacatcatrgggtttcggaaagacaggggtgcataacgtagctcctcctccatctctgccagctgggaaggcagaaagtagtgagcagatagcctggttcttccctcactcatttggaaatatgcctagtttggactaatcaaactacttatttatttggactacaccaagtaaataaccatatgctccatgaggcagggaccatgtctggcatgttcccctcattctgaatgccttgcatagtgcccagcaagcacagagcaggcattcgagtatatgaactgaatgaatggaaaaacagaagtactttatagcttactaaacacttttatatacattctccatttaatcctcacaacaaatcaataaggtaggaaatgctccatttcatatataagacttaaagaaacctctgaagatcgcacaaaaaggagtccgggccaggcacagtggctcaaacctgtaatcctggcactttgggaagccgaggcaggaggatcacttgagcacagcctgggcaacatagcaagacctcatctctatatatatataaaaaattaaacagaaaaggagtcaggattcaaaatcttcaaattctctcagctctcttcaatataccaagtttttagcctggtatgattgaacattgccatcaagaagtgctttgaagtctactgtattaaaaatgataggggtctggcatcagggttcttcccttctcctgctcctctttctgaaaatcaattaagtttgtctccatgtcagagagaacaggggcctacccagagcagtctgctttaggggaatcagacttccatttttctggggtaagtaaaatgtaacacctggacacatccacaagaggccctaaattattttcatctgcctggaatgggcagcataggattattacttttgctgagtttggagaaaacaagtatctgagcatcaaacaaatcagtagcagctagaagattttaaaaatgctaccaaggtattaactgaaacaggagaatggctacaaacaggtatcatggatatgcccagctgtacacaggtattaagaaaagctcccagtactcccattaggaagaagatagttcccacagtctagtggcctggtctttcttaaaacagatgcaaaacagagaaaaggatgcagatgtgcttccttctcagaacttcattgggataagtgggaaattgaaacactgatcttcaacaagcaagaaggaagttcgctggccaaaagagaattttttctccatctgctctcgggtagcaaatacagggccaactatttctgcggagtactagcagcgaccagaattttggccccaatcttaatgagtttgctgaagctagagtatgatgagatggagtcaaaggactcttgcttctatagggctagagcaaaaaaaaaaaaaaaaaaaaagttttttttttttaaagaaaagccacaggtgaagagaagcagttgttaaactgttcagtaaacggaaccaacttctgacaaactttgggtaccaactgagactcatgcatgtcttgcctgaggtaccaactccagctcctatgttgtctcttaagacagaaagggacatggttagaattacctctaaactacattttctgtgacagtaggtttaacaaagaacagtaaccttttttttttttttttttttttgaggcaggtctcactctgtcacccagactggagtgcagtggtgcaactgtggctaaccacatgcttgacctcccaggctgaagtgatctcccacctcagcctcctgagtagctgggtccagaggcatgcaccaccaaacctcggtaatttttttttgtttggtagagatggggggtctccctatgtcgcccaggctggtcttgaacttctggcctcaagtgatcctcccaccttggcatctcaaagtgttgggattgcaagcgtgagccaccgcactgaccagtaacctatcttaatggccagctcttaaaaacagattttaggccaggcacggtggctcatgccttgtaatccctgtactttgggaggccgaggcgggcagatcatgaggtcaggagatcgagaccatcctggctaacacggtgaaaccccatctctactgaaaatacaaaaaaacagccaggtgtggtggcgcccacctgtattcccagctacttgggaggctgaggcaggagaatggtgtgaacccgggaggtggagcttgcagtgagccgagactgtgccactgcactccagcttgggcaacagagcgagactctgtctcaaaacaaacaacaacaacaacaacaaaaaaaaaaacaacagattttaaaagactgcttgggtaaaagtatgagaatgcccttactactcacatcagcaatatattaccaaagagtcacatttcaggagcatcttcaggcttcacccatttgtttgccaaaccccctcaacaaccatccccatcaactggcttcatttagtaagaaatagtcaaaatcaagatcaatggacaggaacagttaatttgtgatcagctcatagcattacttctggaaaagaccaacaccaggtagaagaaacaaaatttgttccttgttctcaccgtttcatttgcttcctgttgcttttcatcaaaatccctgatcaatttcttcttttcttctagaaaagaty

SEQ ID NO: 94896 - DNA, 41721 bp, Homo sapiens
  misc_feature (1)...(41721): n = A,T,C or G
cggtgtgtgttgcagggagaggaggatgtgttctgtgaatggtggcactttggggtattctcttttctcctagctctgagttctcagactataaacttataggcaatgcttttcctacatctcttgcctcctcctacaggaggcctttcccctctccttagacctgaccctctcttaaaggactccagctctgaaggaaaagctgcccacattggtccctctgagggctgccctgttagagcctctgccttactgccaccagttgctggactataaagtcaggcgtttctgcctccatagacagtgcctgcaggcctagagggggagaggagcctggctggttccaccctgtgcatgaaagaggagtcccttcccctgggcatcagtggctgggcaggaggagagggggaacacctctgccatggtgtggcaggagaggaaggcctagtgtggcaaatctctgccctgaataaagccctctataatcctactccactgtattcactgaatctcacctcccacagaccatgcacactcacacctacactcccgttgagcagtcctcactaattttacatggtacacactctccaacccatcaacttccttctgatccaattcttttcattaaagacatcatcagttactgtaagttactgaaataacctcctaataggttttgcacagtcactgtggctgccctacaagccactctgttcttcagtaacacttttttccttttaaagttatttacacctttactactgaaactcaaagtgtatggtggagcagcatcagcatcacctaggtgcttcttagaaatgcagaatctcaggccccatcccagacccacctaagcagaaacagcatttaaaaaactatatagactttattttttagagctgctttaggttcatcgaaaaattgaatgtaaagtaaccccctccccacatattcacagcttccgccactgtctacatcctgcgccagggcagtacacttgttacaatcaatgaacctacattaacacatcattaccaccccaaatctagagttcacgataggggtcactcctggtattgcatattctatggatttgggcaaatttataatgacttatatctatcattacagtattatgcaaaatagattcacttctctaaaaaattccctgtgctagaaactgcaatttagcaaaacccccaggctattggtatgtgtaaagagtgaacagagctggggtagaccacgccactctcctgggtaaagcccttccagcttcctgaataacatgcggattcatgattataactcacaagtgctgcagggtccggttcttgctcactgggccagtccctcctctgctacttcccagctcactgccccttcttgctggcagaggaagacagcacttcctcaggcagtgcctgtgccctgccttcaaagcacgtggctttgtttgttggccacactttaacacattcatttgagtggctattggattacttttcctctttccaatgatagtaaatttcacaaatgcaagagccatgtccccaggaccaagaaaagtctcttggttttaggagatgctcatgtttgttgaattaataaatgattaaacaaaagaatgaacacctgtgccagcctcatccttacctttgtgcctttgtccaggctgttgccctgaccagaattctctctccatcatccatctgcctctgtaaagcctgccctccttcctgcagcccagtctgttacccactttcccagatcttgggctcctacaatcagggcaaagcatttcattgctctttgcttgttctacatgggttagctttgcatttccgcaactaacatatgcagacctctttgagtgcaggaatcctagcctcaacttttatggcccacctggcacacagtaggtgcttcattgactcagtcacagcagcagtaaaaccaggatgtagctagagaacaaggtgctttcctaaacatctttctttagctcaaagatctctttccacttacctctgaccctaattttccttgtacaatttctaaagtctgggttttaatttttattttatgtcctcttttactttttttattgttctccctctttctgtctctccccctccctgccccccttatttctgggaagcctgtacaaatttccttctatatattttaaactcctctgtactccccagaagactagtttgggaatgcttccccagctccccagaaggaaattgtaactgttggaaatgtaatgtaactgtcaaatatataaaaaacctgaggtgtaaattgtgaaatgtaggccatgtttctcttggttctgaaacaatgtaaaatagctctggacagaaaattttaaatgaccaccatcgcagtcaagtaatctgtgggcccccaactcctcttctcttccctctacctctctctcacacctctgatattctaggcagtactttatgtgagaagtttttaagacaaggacccttaatagtcgggtctttgcagactggcaaatcatgctggagcccaaacttctttgtttttgggaaactgggaagtatgctgctcactagaaaacagatcttttgttttctgacttaaaaaaaaaaatcagaaccatcctgccagcagggacaagcctcacccttcttgacagtcccaaaagttcagcactcttaagatcacctgagcaggaacaaaagcctctagaagtcaaattattactttcaggacatatatgtaatacctatgtggcagattaaaaataactaaaaacataattttgtgttaaatctgataccacttaaagtcagatgccaatgttgaaaaaagatctcagcatccaaagcagaacaaataagattaatgtattaagaggaacttaagaaggttaagaagatgaatgtcattaagaggaattgtcctcaactactctcccgccttcagattggaaagaagatcaccattgttcaattttagaagcaggacactttcgctgagctgtatcatgaaaacatagtttgggactagactccgaggccagtatcggcacatcacaaaatgtaaatgagcatctaatattcatggaagagaccattatgaatcggctgtatggttttgttaaaataacactgtcccttccacgcttccttgaaggcctgggttcttgagttaacttggttgctaacttgctgtgtgatgataggcaggtcctttaacctctttggaccacagtcttctaatctttaaaatcttctgaaaacaccctgaaggttccttccagcttataggataatagaagggagcagctcagagaaccccatgtcctttctcttaaccctgtagcagttgactcagttaagttcctgaaagttgcttacctgaacagaagtgagaaagaccagccagcaccaagagctgaaagaaattgaggtatggacacttggatggtgatgttccctgcctccgtgtgtggcccatggcttcagatgcttagggtcaaaagtgaaagccaacaatttggacccaagtaagaccagggcacttcccaggtgcaaaacaggcagggctgatgacaatccaattgctcacgtagaagaccctccagtgatgtttacaaaacacacagagattggagggtgttcctgggtctccaaaggttgtggatttagtttcacagcctgaaaaaggaacaaataaaagtcattcaggaaggaaggtgtgcctactttgagttgcaaaactctcgagttgcctgctaaaattaattggagagcttaacctaagcaacctctaaagcagggcgtgaccctgaggaaaagcgaatggaaattctgtgaggggaccagttccaagaaccaaccacagcccttccatgaaaaggctttctacttaataggtggggtgaagatttggttagaaacaggagagctctaaggaccctccatatctgttagccaacctgcaaaagttcaaatcctcttctgaacataccaagaaacatagagcagacagtaagggtgtattttgtccaaggcaggacctaagttatgaaacaacttctttcttgacatattaacataagaaaacaagtatctcaattctttaaaccctctactcaaataatatatcataaaggggtatgagatctcaataaccagaaaagtctatccataaaaagggagggaaaaaaagacactgcagacgttacttatcaaaattatgtactccagggccaggcgtggtggctcacgcctgtaatcccagcactttgggaggctgaggtgggcggattacttgaggccaggagttccagaccagcctggccaacatggcaaaaccccatttctaccaaaaatacaaaaattagccaggtgtggtggtgggtgcctgtaatcccagccacttgggaggctgaggcacgagaattgcttgaatccaggaggtggaggctgcagtgagccaagatgattgcaacactgcactccagcctaggcgacagagtgagactccatctcaaaaaaaaaaaaaaaaaaaattatgtactgtcatgtgaggtggctagggattaatttttccagtaaatatgtcaaaattgagaaatgaaaataaacactgtgctccactgtcaccccttcaggctgctaccaggacacagccccgtgctgctcagagaatgcttgagtgtcctctttggagaccaccctagagctagagttccagccacgccatattgttttattagccatcatccattttagacaggattagttaaaagagacttattcaccagaatttgtttttcttaagatagaatcttgctctgtcacacaggctagagtgcagtggcgtgaccatagctcaccacagtctcaacctcccgagctcaagcgattttcccactttcactagaattttactggcttgagaaattcaaatacggcccacaaaaacaatatttgctaggatctaggatattttaaaataatgggccacaattctcactatgatgctccaaatatgtcgggaagccacagcctcctgtgggaatgagaccctaagggttcctttgagggcaagcctggatccaggaggtggtagcagaggtattgtttgtttaaaaagcagtgaggttgctggtaactagttctaccaagctatcccatagtaagataatagtaaatgtacttacttgctgaagaaaaattccactttttctttaaatcctttgatttcagggtaagactccacttctgagatgttctcttcttacagtctataaagcaatgacaaatcactttttctttgggtaatcttcagagaggcgacatttccccttctaacttctgttactttacagagggtttgagttcactcagtacttgtcagtgccaggagttggacagggtgtttgaagaagcgccctctgctgccgtcttcttctagttgcttttgtagaggctgtggctggggcaaatcacacagcagcctccctcaccaccgtgcatggactaacaaacatgaaacaccacgagcaccaggcggcctaggggaggagaagaatggtgcccgagaagagtgaggggcatctggctagccttgctgtgtgatgggaggccagcttcatgggctggctgtttctgtgctggtctcaagttttgttttagcacccagagttactcctgagtccctgcaggaataagctgtcaacctcatatgtaggggacacttttgggagagtgctcagctcacaggaccacccaactctactcccacctctgaatcccaccatcttcagagagtgggctcctgccagccacgctggacagtgaattctggtcaccctagccacagttgagtgcgcctctggtgggatgaggaagactttagtcatgcccatcactcccatttccaactaggttgccacccacccctgtgtgtccctttgtaggattctggagcccctgtgagtgagcagctgacccatgctggaccagtgtacttgtttgcacaggtggaacctgacagcaccttgcatgggttgcagtgagccragatcacaacactacaatccagcttgggtaacagagcaagactccatctcaaaaaaaaaaaaaaaaaaaagacgccatccttcccayaccagccagaaagagagcaaaccgtgtgggtgagaaatactgactrcagcggcggcttccttcatctcagcaacaagtttgtggcagagcttagtggataccaccctattcacctkagatttggaatactgaagctttggaaatcatgaaggcagaacttgctatgaaaggactccactgcactgtctccttctgtattggcagaaggggcctagtgagcacccttcttcacctgtgtcttgttctggtctcagatgcatattttgaatagttgcaaggaatatggatgtgacaattcctgccttacctctagtagatcaacattacattttcaagtaaagggaacatagattggaggtaagttcatgttttctattttcttgaacatttattcagatcaaagaaatgttttcactgattttagccacttctacttgatacattattacaatgcactggaagtgattttttttccaggtatttaaagtaatagaaagttatagatgtcaacttaaaagagcaaagaaatacagagttttagaaatttattttctttttttttttttagatgaagtctttctctgccgcccaggctggagtgcagtggtgcaatcttggctcactgcaacctccgcctcctgggttcaagcaattcttctgcctcagcctcctgagtagctgggactacaggcgtgtgccaccatgccaggctaatttttaaatttttagtagagatggggtttcaccatattggccaggctggtctcaaactcctgaccttgtgatccaccctcctcggcctcccaaagtgctgggattacaggcatgagccacygcacccagccgagttttagaaatttcatgagggactacatgaatacaaattttgacgatcacagacaccctcaaattttaagaatcccagtgaaatcctaacctgccttggagaaacacacattaaacaactttgccattagcgctttgatgtgacttaatcaaagaggctggaagaaaggaacaccaggaaggtactttacagagtttccccaatcctgattgtaaaattcagaaggcttctcttccaagattatgtactaatgggatgtgtttaattcctcttcctcctacaatgtgtctaggagcatgacctgtggaccacagatttctaaggtaaatttctggacactggaggtgagatggatgaagacgggcaaaggaagccgaacccgaatacctatattactggaaaacaaaacaaaacaaaacaaaaccaagtaaaagatttaaaaggagrctgggcacagtggctcatgcctgtaatcccagcactttgagaggctgaggtgggcggatcacttgaggccaggagttcgaggccagctggccaacgtgatgaaaccccagctctccaaaaaaaaaaaaaaaaccaaaaaactgggcatagtggtgcatacctgtaatcccagctactgggaaggctgagacatgagacttgcttgaacttcagaggcggaggttgcagtgagctaagattgtgccattgcactccagcctgggtgacagagcaagattctgtttcaaaaacaaaacaaaacaaaacaaaaaaactttaaatgagtttgttctgaggagcagacccagggttggagaagaatadagcaggaattactgctcctcagtgtaaattctttagtgccacttatttttttgtaaatccatccttggctttactgtaataaaagtaaaagaaattcttttaaaaataattcacataaaaattcttttaaaaatttttatgtgaaaaattdaaaggataaatttatgaaagtatatttttataattctagggtgagcaagacacaaaacttggaagccacgaaaaaagaaaagatacacagatttgaattcataaaaattaaaaatatttgtacaatgaaagacattataaatgaaatgaaaacacaatcacagactgtagaggacccagcaggaagagatgacgagagggagatgcagctttgtcactcagaggttggtgcagaggctgttgcgacaccgtaggggaagcctggccctttgctttacccctgaacaggatgatctctgtggaaatgaaggttccatctttctgctcttgaccttggagccacttcacctcctcatgctgataaagctggcctgagctcaaccttcctacccttccgttcagcatccacagggagggctgggctggctcctggcagtggcctcagtgctgtcatttgcaggttgcctactcagggcccacggtgctagcctgactgctgggaaaacccctttcccacagtgggctcactgttgccaagtaaacaaaamctgttgcactgacaaaaattttcaggggagtttttcatgttctaasatgaccctcccgtgaggtttagaagttcatttttagatatgacttcatctgggcatgtctataaggcctgcacccatcatagggcagctgatctaggctttaaggctatggtgctccccaggagtgccacagcctgctaaagttggcagcaaactcatcaaagtgggagagttcacctcttcctcttaaaatgctgtcacattctttctggttctttgagatggaaatcaccaaaatgcttaaaatgaaaacaagtgactttcagagctagccctcgttcagagtgagggccgtcttcttactaacccaccacacactcttcctcctatacttggcatcttactcttcctgcctgtgactctttttttttaattaatttttttattatcaatttttgtttattattctactttaagttctagggtacatgtgcacaatgtgcaggtttgttacatatgtatacacgctccatgttagtgtgttgcacccattaactcgtcatttacattaggtatatctcctaatgctatccctcccccctccccccagcccatgacaggcccccgtgtgtgatgctccccttcctgtgtccaagtgttctsattgttcaattcccacctatgagtgagaacatgtggtgtttggttttttgtccttgtgatagtttgctgagaatgatggtttccagcttcatccatgtccctacaaaggacatgaactcatccttttttctggctgcatagtattccatggtgtatatgtaccacattttcttaatccagtctatcattgatggacatttgggttggttccaagtctttgctattgtgaatagtgccacaataaacatacgtgtgcatgtgtctttagagcagcatgatttataaccctttgggtatatacccagtaatgggatggctgggtcaaatggtatttctagttctagatccttgaggaatcgccacactgtcttccacaatggttgaactagtttacagtcctgccaacgtgtaaaagtgttcctatttctccacatcgtcttcagcacctgttgtttcctgactttttaatgatcgccattctaactggtgtgagatggtgtcttattgtggttttgatttgcatttctctgatggccagtgatgatgagcattttttcatgtgtctgttggctgcataaaagtcttttttgagaagtgtctgttcatatcctttgcccactttttgatggggttgttttttcttgtaaatgtgtttgagttcattgtagattctggatattagccctttgtcagatgagtagattgcaaaaattttctcccattctgtaggttgcctgttcactctgatggtagtttgttttgctgtgcagaaactctttagtttaattagatcccatttgtcaattttggcttttgctgccattgcttttggtgttttagacatgaagtccttgcccatgcctatgtcctgaatggtattgcctaggttttcttctagggtttttatggttttaggtctaacacttaagtctttaatccatcttgaattaatttttgtataaggtgtaacgaagggatccagtttcagctttctacatgtggctggccagttttcccagcaccatttattaaacagggaatcctttccctatttcttgtttttgtcrggtttgtcaaagatcagatattgtagatgtatggtattatttctgagggttctgttctgttccattggtctaatctctgttttggtaccagtaccatgctgttttggttattgtagccttgtagtatagtttgaagtcaggtagcgtgatgtctcccgcttttttcttttggcttaggattgtcttggcaatgcaggcccttctttgttccatatgaactttaaagtagttttttccaattctgtgaagaaagtcattggtagcttgatggggatggcattgaatctataaattaccttgggcagtatggccattttcacgatattgattattcctatccatgagcatagaatgttcttccatttgtttgtgtcctcttttatttcattgagcagtggtttgtagttctccttgaagaggtccttcacatcccttgtaagttggattcataggtattttattctctttgaagcaattgtgaatgggaattcactcatgatttggctctctgtttgtctgttattggtgtataagaatgcttgtgatttttgcacattgattttgtatcctgagactttgctgaagttgcttatcagcttaaggagattttgggctgagacaatggggttttctaaatatacaatcacgtcatctgcaaacagggacactttgacttcctcttttcctaattgaataccctttatttctttcccctgcctgattgccctggccagaacttccaacactatgttgaataggagtggtgagagagggcatccctgtcttgtgtcagttttcaaagggaatgcttccagtttttgcccatcagtatgatattggctgtgggtttgtcataaatagctcttattattttgagatacgtcccatcaatacctaatttattgagagtttttagcatgaagggttgttgaattttgtcaaaggccttttctgcatctattgagacaaacctgtggtttttgtctttggttctgtttatatgctggattacgtttattgatttgcgtatgttgaaccagccttgcatcccagggatgaagcccacttgatcatggtggataagctttttgatgtgctgctggattcagtttgccagtattttattgaggatttttgcatcaatgttcatcaaggatattggtctaaaattctctttttttgttgtgtctctgccaggctttggtatcaggatgatgctggcctcaaaaaatgagttagggaggattccctctttttctactgattggaatagtttcagaaggaatggtaccagctccttcttgtacctctggtagaattcggctgtgaatccatctggtcctggatttttttttggttggtaggctattaattattgcctaaatttcagagcctgttatttaaggatttagggatttaacttcttcctggtttagtcttgggagggtgtatgtgtccaggaatttatccatttcttctagattttctagtttacttgcatagaggtgtttatagtattctctgatggtagtttgtatttctgtgggatcggtggtgatatcccctttatcatttgatattgtgtctatatgattcttctctcttttcttctttattagtcttgctagtggtctatcaattttgttgatcttttcaaaaaaccagctcctggattcattgattttttgagggtttttgtgtctctatctccttcagttcttctctgatcttagttatttcttgccttctgctagcttttgaatgtgtttgctcttgcttctctagttcttttaatggtgatgttagggtgtcaattttagatctttcctactttctcttgtgggcatttagtgctataaatttccctctacacactgctttaaatgtttcccagagattctggtatgttgtgtctttgttctcattggtttcaaagaatatctttatttctgccttcattttgttatgtacccagtagtcactcaggagcaggtgtttcagtttccatgtagttgagtggttttgagtgagtttcttaatcctgagttctagtttgattgcactgtggtctgagagacagttcgttataatttctgttcttttacatttgctgaggagtgctttacttccaactatgtggttaattttggaataagtgctatgtggtgctaagaagaatgtatattctgttgatttggggtggagagttctgtagatgtctattaggtctgcttggtgcagagctgagttcaattcctggatatccttgttaactttctgtctcgttgatctgtctaatgttgacagtggggtgttacagtctcccattattattgtgggggagtctaagtctctttgtaggtctctaaggacttgctttatgaatctgggtgctcctgtattgggtgcatatatatttaggatagttagctcttcttgttgaattgagccctttaccattatgtaatgaccttctttgtctcttttgatctttgttggtttaaagtcttttttatcagagactaggattgcaacccctgcctttttttgttttccatttgctyggtagatcttcctccatccctttattttgagcttatgtgtgtctctgcatgtgagatgggtctcctgaatacagcacactgatgggtcttgactctatccaatttgcccgtctgtgtcttttaattggagcatttagcccatttacatttaaggttaatatttttgtgtgtgaatttgatcctgtcattacgatgttagctggttattttgctcgtcagttgatgcagtttcttcctaccatcaatggtctttacaatttggcatgtttttgcagtggctggtactggtttttcctttccatgtttagtgcttccttcaggagctcttttagggcaggcctggtggtgacaaaatctctcagcatttgcttgtctgtaacggattttatttgtccttcacttatgaagcttagtttggctggatatgaaattctgggttgaaaattcttttctttaagaatgttgaatgttggccccccactctcttctggcttatagagtttctgctgagagatccgctattagtctggtgggcttccctttgtggaaaacccgacctttctctctggctgcccttaacagtttttccttcatttcaactttggtgaatctgacaattatgtgtcttggagttgctcatctcgaggagtaacttcatagtgttctctgtatttcttgaatttgaatgttggcctgtcttgctaggttggggaagttctcctggataatatcctgtagagtgttttccaacttggttccattctccccatcactttcaggtacaccaatcagacgtagatttggtcttttcacatagtcccatatttcttggaggctttgttcatttctttttactcttttttctctaaacttctcttcttgcttcatttcattcatttcatcttccatcactgacactctttcttccagttgatctaatcggctactgaagcttgtgcattcgtcatgtagttctcgtaccayggttttcagctccaacaggtcatttaaggacttctctacactggttattctagttagccatttgtctaatcttttttcaaggtttttagcttctttgagatgggttcaaacttcttcctttagctcggagaagtttgatcatctgaagactttttctctcaactgatcaaagtcattctccatccagctttgttctgttgctggtaaggagctgcatacctttggagggggagaggcgctctgatttctagaattttcagcttttctgctctgttttttccccatctttgtggttttatctacctttggtctttgatgatggtgacctttgatgatggtggggttttggtgtggatgtcctttctgtttgttagttttccttctaacagtcaggaccctcagctgcaggtctgttggagtttgctggaggtccactctagaccctgtttgcctgggtatcagcagcggagggtgcagaacagcgaatattgctgaacagcaaatgatgctgcctgatcgttcctctggaagttttgtctcagaggggtacccagctgtgtgaggtgtcagtctgtccctactggagggtgcctcccagttaggctactcgggggtcagggacccacttgaggaggcagtctgtccattctcagatctcaaactccacgctgggagaaccactactctcttcaaggctgccagacagggacatttaagtctgcagaggtttctgctgccttttgttcagctatgccctacccccagaggtggagtctacagaggcaggcaggcctccttgagctgtggtgggctccacccagttcgagcttcccggccgctttgtttacctactcaagcctcagcaatggcgggtacccctaccccagcctcgctgctgccttgcagttcgatctcagactgctgtgttagcaatgagtaaggctccgtgggcgtgggaccctccgagccaagctcggcatataatctcctggtgtggcatttgctaagaccattggaaaagtgcagtattaggctgggagtgacccgattttccaggtgccgtccgtcaccacttcccttggctaggaaagggaattccctgaccccttgcccttctcgggtgaggcgatgcctcaccctgcttcggctctcgctcagtgggctacacccattgtcctgcccccactgtccgacaaaccccagtgagatgaacccagtacctcagttggaaatgcagaaatcacctgtcttctgtgtcgctcacgctgggagctgtagactggagctgttcctattctgccaccttgcctcataatccttgcctgtgactcttgacacactgtcccccaacttccttggctgcctttccccattctctctgcccatctaaacatctttcttcctcaaaggaccaggccaaatgccatttccccaagaagctttcctgactcttctaaatctccatctgctctttcccttctctgagatcctatgtctgtgccactcatttggcatcattccaatccctccccacccccccaaatttattgagtgcctactatgtgcctggaagggttcaaacattggggaagcaaaatggcttgactaggagagataaggacaacatggaccgatcctaagaaaaagaaacagtagcagaaaaagagcagggcagctagctgaatttaagtctgcagtgtggcgaaaatgccaacaaaatattgcgagacatgagtggcaatatgacataccatggccagaaattatctttttggattctttctacatgaacccagatccttattggaatattacgtccaatttcaaactaaatgtggagaggatccggcagaaagtaacaaacaataacaaaaaggatgctaaaccaggcagctcagagaacagaggaatggggagccaagatgttttagatgggccaaatgattttgaggcctttggtaatgatcctctgtggctttgaggtgtttctgtttmtttgttttgagctagtcatggccrtaaatgccttctacatctgtaggcraccaaactggagaaaataatctacatgtaagcaggataaattttgattgtgtttaaggaagcattttttttgtgttgaagctggaaaaggtgactttcaaagaaggttgcaaatttttattgcctgatgctttaagaagagaagagacaaatcctgtttggggaaaacagagatttctctgcctgagagtaagggactatggtggaatcccaggcagtccacgattctaggacctgaggcgttaaatgtcactgccactggctgccactcccctgccctgccacactgtccaccagaaccactaacgaagttacaaaagtcacccttttcagtttctatttcattttccctgtcccctgagaaacaggaaccaaggactaggcagtaggagaagccagacatgatctatgctttcaaagtgggtcaccatggcgtgaatgaattagagctgaagggtcatggaaacagcctgttcctcctccctctctcctccccagctctgtcccccacttcttcctttttttgtattattctgaaaagtgaatcaaacagttgccattttttttatattacgttggtccacaacgtcaaaggtcatggtttccagatttcggaaaaggaatttgattctgttcctaaaattaaagagaaattgcaaggcttggatggaaaggggaagttccccttcaataactctttctagaagggtcaacatttaaaacttaacgtgtggccgggtgcagtggctcacgcctgtaatcccagcactttgggaggccaaggagggtggatcacttgaggtcaggagtttgagaccagcctggccaacatggcaaaaccccatctctactaaaaatttaaaaattagctgggcatggtggtgggtgcctgtaatcccagctactccggaggctgaagcakgagaatcgcttgaacctgggagatggaagttgcagtgagctgagattgaacaattgcactccagcctgggcaacagagtgagactctgactcaaaaaaaaacaaacaaacaaacaaacaaaaaaagttaaccttatgtagatatttacctattatttgaatacgagaaggaatttgaccacttgagggcctgatttatacaagtaccacatgatgaagaacaggattttatggagtgaagatccttaacagcactctcagattgaatctctcctgagccttgaactgatttctccagtggccactggggttgcgtgactcctccaatggccccagacacaactaagaaatgtgcctaaactggctgccatttgaaaccttttggtgtcctttgtttagatgccccaccctaaacttcaggagttctctccagagagtaattttaggaatgaatgccagagaccaagggatgagggactgttgcctcatcagagggggaaggagcttgctggaaaaacaagaggaacaaaatgtcccctgactagatttttctttaccttttgtctcaaggactcttctagaaatagaaataagagtagattcatgtacatttgcccaggttgaccccagtggaggaattgtggggcagaaagaatgataacatgaaagaaagataatttcagtaaggccccccaaacttttggtttagggagcagtcactttttgtttcctagaagctgtattttcacctactgagattctagcaggcagtgaagtccccttaggatgggaccgtgtgcaagagcattgctgtttcattgtaaaccctggaagcggaacttaggactcagctggccagctgagcttctcttcctgtgggaaatcccagcgaaaccaggagaaagggagcaacagaggtcatctgccaggaaatgtaccaaagaagatttgaaaattactggtggatctccagagcaaaggctggaaagccctgacctacaggagcgggctactgcattgttgggaggagcaggattcacatccacatggacttccctcgggtctctttctgctctgcagagaggggtggaagctgctcctagggttttttttttgttttttgttttttgttttaagatggagtctcggtctgtcgtccaggctacagtgtagtggcacgatcttggctcactgcaacctctgcctcccaggttcaagcgattctcctgcctcagcctcccgagtagctgggattacaggcatgcaccaccatgcccggctaattttgtattcttagtagagaggaggtttcaccatgttggccaggctggtcttgaactcctgacctcatgatccgcctgcctcggccttccaaagtgctgggattacaggtgtgagccaccgcacctggccactcctaggttttaaaacaccggtttgtatccacttatctcttttgctcctctccatatagtctcccatctctacctcttgctatatttgattcctgcctgcttgttagaattacggtgcatatcttagatttttctttaaataccacttttagactgtcatcaacaagaggcttaaggctctttgggagtgggatatagaatatttatttatttatttagagacaggttctcactctatcacccaggctactgtgcagttgtgtgaccctagcttattgtaaccttgaactctcaggctcaagcaatcctcctgccccagcttcctcagtagctaggactacaggtgtgcaccaccacacctggataattttatttatttatttattttgtagagacagggtctcactttattgcacaggctggtcttgaactcctgggctcaagtgatcctcccacctctgcctcccaacgtactgggtttataggcgtgagccactgcgcccagcaaatattttaaaaattagactcaggaggttcaaatctttcataggtgtttagtctatcatgtcatttcaatttttttctaagtgacagtagaaggaatggaagaagtcctggctgggagttcagagggcatgggctccaggcccacttctctccatgtgtgaaactgagttatataaactctgagtaactgtcttcactggcctcagcttcctccctagaaagttattgtcagctgggcacggtgcctaatgcctataatcccagcactttgggaggctgagacaggtggatcacttgaggtcaggagttcaagaccagcctggccaacatggtgaaactgcctctctactaaaaatacaaaaattagctgggcgtggtggcgatcgcctgtaatcccagctacttgggaggctgaggcaggataattgcttgaacctgggaaatagaggttgcagtgagctgggattgcaccactgccctcaggcctgagtgacagagccagactccgtctcaaaaaaaaaaaaaaaaagaaacttattgtcaactgaaaattcacaaggtttataaatctggaaaagagagctttatttttataaagggttgcagacggcaggatggccattctcagtctgggaagtgtagccttccagccagaagccaaaaagaggcacctccagggaaaggcaaagggaacaggaatgtatgctgagcagagcagccaagtacacatatttatttatttatttattgagacaaggtctcactctgtcacccaggctggagtgcagtggcacaatctcagctcacttcaacctccacctcccaagttcaagcgattctcgtgcctcagcctcccaagtaggtaggattacaaaaatacatgtatttaataarctataggaggagtcatgaatatttatgaaaggagaaacatgtgcatgtgcaactgagcgtcatgccccttcaagagtcccttttacaaaaaatggcagcattagcatgatctgagggtggagttctcggccctctgatgttaaaaggtgaagcagaggacacaaaaaccctcactgcaggtcctctgtaggctggccagaaccaatctgtgattggtggtctcttatcagggcagaatgatggtcagttgtgtcaaaactgcaaaaggaagggacagcagtcacgtggttggttgaaatcagcggtgaagtctgagcctgttttccttgatgagctgatcttctggatgccgtctctgaacaccctgactgagctgataccattaactctctcatagttgccaaccatgtaccttgaacattctctgcttccatactcctcacggcctcgtgccattatactgtacagtgtcttctctccttgtgtgatttttgccctacctctgtaggtgcaagaagcgccaagcatgtgcttggctggcacattttgtttatttatttatttatttttattatttttcagtcagagttttgctcttgttgcccaagctggaggagtgcaatggtgcaatcttggctcactgcaacctccgcctcccagggtcaagcaattctcctgcctcagcctcccaagtggctgggattacagtcacccgccaccatgcccagctaatttttgtatttttagtaaagaagggatttcaccstgttggccaggctggtcttgaactcctgacctcaagtgatccgcccgccttggcctcccaaagtgctgggattacaggcgtgaaccaccgcgccagactggctggcacattttagatactgtattagtcaagtttcttctgagaaacagaaccaataggatggacacacacacacatgcagagaaagagagtttactttaagggattggcttatacaattgtggaggctggcaggttcgacagggtaggccagcaggctaaagacccaggaaagagttgcagctcgagtctaaaggcagtctggcagaattctctcttccttgggggaggcgagtcttttttctattaaggctttcaactgattggaatgaggctcatccacattagggagagtaatctgctttactcaaaggctactgatttagatgtgaatctcatcttaaaaaatacctgcacagaaacatctagaacaatgtttgaccaaatatctgggcactgtggcctagctaggctgacaaaattagccatcacagatgctctctaaatcttcttgaattgaattgacaacacaggatatgtgagcagctacttttggttacttatcttcaaactcatcaagttgtatacccgaaatatgtacagctttttgtatctcagtcatatctcaataacgtgatttaagaaaacatataaacacttttttggtaattttaaaaatatgttagcagccgaaaaatgagatcacttgggtgctctagaagagcaggggctgtcagggcctagcatatacttacacagcaggtattcaatgtctgaagaatgtataaagatcattcttgtaagtgaccagtttgttaagaacagtgtcattgttccgaccttatagatgaagtgtctgaaatatcttaagatcaggtccragggctacaagtttatttctcagcaacagcctcagcatagcaattgattctgtattggtgagtaatgaagatgcctatgatgtgtcttcctcaataaaactaagagcaaggaaccaactatgcaatatatttgtctttccaggacctatactaatgcctagcaccyagtaagatgccaagtaactatttgttcttcttggcagaacaacattcactgtttcctttgcaaacaaaccctgatttttgtaaaagaacctacctctacctctcagggaagatgtgtctatccttgatctaagggaaacatcataatccagcctgcctgccaggaattggtttagacttctggaggatctttgagaatagtttcttcatcttgaaagaagaaacactctctttttccactggacactgtctataactgtaactgcaatgtgttattatgcatacacattatcttgactgcctagttaaataatcagagctaaacaaaaattttcgaagaaattaacagtaaatggttaataggcaacgcctcttgggctcgctagcagacacaaaatagcaaaatggtttaaacaaaaacaaaccgaaggataagacctctatatacatttgataaaataaattaaaatggggaaaatatgatcttgtgccaattaaaaacgtcagtctggggataaaaataactgaagatagtaggtcagaaagataagaagaacagggtctttctttgatgatagtatacagttgctaaattaaccctgggacttcttacctttagacattttgttacataagataataagtgycattattatttaagcccagtgagtatgtggtgttttgggggtggggaagagtgatggttatttgccgttatttggagctggaaacatgctaactgataaattatccttttggtttataggacaatgtccttgatgcccaaaaacattttctaattttgacagaagagaaaggatgtcagtaggtgttaactaatgtgaaaagaaggtagaatggctcatgtgtgtgatggagatgagaactgggaatacagagagatatctgacctggtagtaattttttcttgcatgactactacattgataagcrctgtgctaaaatttttcaattaattatttcatgcaatcttcaaaccaactttatgaaatatgtactattatttttcctacttaataacagaaagtgaagcttagcaagatgaagtgacttgtctaaaatcacttactcaagctagtgttttttgtttgtttgttttgttttgagatggagtctcactctgtcgcccaggttggagtgcagtggcacgatctcagctcactgcaacctccgcctcctgggttcaagcaattctcctgccttggcctcccgagtagctgggattacaggcacccaccaccatgcccggctaattttttatttttagtagagacagggtttcaccatgttggtcaggctggtctcgaactcctgacctcatgatccacctgccttggcctcccaaagtgctgggattacaggcgtgagccaccgtgcctggcccccaagtgttgttacaagggtttgaaaccagatagcgtggatgtgtcgggagtctatgctaatggtcacaaagttcataggcaccataaagttcaaagcaaactaattgctaacaaccccagtttttctgtttgtttttgtttgtttgtttgtgttttgagacagggtcttgctctgtcgtccaggctggagtgcagtggcacaatctcagctcactgcaacctctgcttcctgggctcaagcagtcctcccacctcagcctcctgagtagctcagaccacaggcgcatgcctggataatttttgtattttttgtagagaacaggtttcaccatgttgcccaggctggtctcgaactcctggtctcaagcaatctgtcccccttggcctcccaaagtactgggattacaggtatgaaccactgtgcccagccccagttattctttacatttaagtcaaaaacgaaaacaaaaaatcaccctttcccatggattctcacagaaagatcactacataatatgaacaatatcctcagcagacatcttaagctgaaactgtgttgagttttatcgggatgcttattattcaaaatgtctcttactacagaacttgctttgactgcatcctcagaggctgaaaatctttgacagttgaaagaatgaaggatgtgccatccccaaatatgccatataatatattgattactttgagttgaaaacattagagaaattatagtttcagaaagggtaaaactgagggctgacctgattaggcctgacacttaatttgccttgcttgcttttggtcacttgcttctagtcgattttaaaacctgcatagctaaaagtcatgtagctagacgatacataactaaattccacttgcctccttatagataacttctctgataggacaccatggaaaatattgcttaagttatttttcaggaacttagagtcagttcttgtccagttcaagccaccagcccttcatcttggcctgcgtgagtgtccaatgggtgaccttttgacatcagaaggcccaaaactccactctcagatcatgctaacgtcacgattttgtgaacatgtgttctatgaacagccatgaagattgactatgcttgctcagattaccgattgcctcacttttccttacctcatctttctctgaaccttggaccaccttcctcccctatcccataagcactcctaaaattccatctttggaaaggcacatttgaggcctgttctccagtctcctgtcttggctgccttgtgaatacaccctttctctactgcaaaacttgtgcgcctcagtgattggcatactgtgtgaaagacaaatgagcctggttccctgacaggagctgagctgtctcttcctgcatgcagccagcaataaagattcctctaggagaggtatgttctccacgccagagcgagaaaatagctctcatcaccagagatttggaactggaggtggcatttggactggagtaaacattcttgcaaagtaaccattatcttccacctgttttacaccccaccccccatatatctcctaggggctcccctagaaattttttaccaccctagccggattttctttgtcctgtcacttcttcttaaatttatcactctttttctaaaaagtataaaagcatcttgctttggacactttcttcaggattcagtctcttaacatccccatgtacatgtaaaattaataaaatttgtatacttttctcttgttaatctgcctagtgtcaatttggcttctagatgcagctgattagctcactaagagctagagggtgtagggggttggaggtgatctctgcctcccttattggtgaacttgatttttgtaaacactcaaaagtcacttaggctagagttggagatggagatggttattcactgggaaggccacaagagaatgttttaaagtgatggaaatatttcatatctcgattatggtgtaaggacatttcattatatataaattatatatcaattttttaaaaagctctcagaccaaggctagtcattacagcaagaaaataggcatagcaaatttaaaactttggagaaatatatagaatatttgcatatggtgattctgatttgctttaaaagtgacatgattaatgtatttagacaaaaatactcttcgtttttctttgcttttatttacgatcaggatacaagaattctacgctgctgccaaataaatgactagttaaaattaactaactgaatccttaacaaccattctaagaggcagatattattatcccactttatgcgtgagggcccagaaccctggcaagggcggcacactcagtacgctcttcaagcatctgggcacacccggtccactacagtcctacaaagtcggacgtgagcacgggcgaaggcgtcagccggggccacacgggagtcactgaccacagccaggcgagagccggctttccggtgccgccacattccgggcaccaggctccgggctcttcagagcatttggggcgggcgacggaggtcccktccactctcgcttgggtgcagaagggcgcggcggtgccaggaagccgccttggaggctccaagattagctcactcagcgcggccaagcgcaggtgcgggggccctcgccgccaccctgcttatctggggacagtcccggaacccggtgacccggctccgccccaacccgcgccctcgtccacccgcagcagccaaggcctcttccccggccccgggagcccgcgccacgcccgtcgctcgcgcgttccagtccaggctacagcaggtatcgcgatcccggccctcggccccgcgctcccctcccccgcccctggcgctctccgagtgtggccgaccatgaggattcccagtcttgcaaatcgtgggagcgtgtcaaccgccccgtttctttccaaagccgggcatggcccggaagcagctgatcagatcttagttctgaatgtatagttcgggtacgagaatgtgacccgtgaaagttcagaggagttaagtaattacagcgttctgaaagcgaacgttaaagggaatttacaaccgaaaaaagatgccggtcttcttcccccatcccagcttgcaattcacagaagcacacattagggtggagccagaaggaattacggaaaggacaatgaggacattgagagggagggtatggggggttaaagttagtcctccgaggccaagaagcagagtgtcttggcctagtgtctgaaaatcgcagcgcaggacggaacttccgagagcctatacctccccacttccccctccagtttacagatgggcaaaccgctgtcccgggtgtctgtcaggtctagtagcccagaatctcagtgcctaggcttcactgtaaataataaactatgtaaataacatttacaaatatcctttgtgagctcagaaactcagcattaccagtaactgggtagtggaacgcatccatcttcgtcgtttactccttctccaggggctctccagcctgcattccatggccaacagcagtgcagctgcagaagcacttctggaagcctcctgacttgaactagaccttgggtaaatagggtttagataagtggaggggagggaaaagtttcacctgaggggagaatgagctagtctgccagacccttataaaagtattggcctggatgggatggagggctttgacctgaaagccacagggagaagggaaccctgaggaattggctgaaagaggggggttcttaggaaatgcaccaacagggaagccagcgctttaccagggatttcattcatggtgggtatattattaatagagattcgaattctctagaagctgatcatttctaagagaaacaatatttaaacattactgtcgaaggaaaggttgtggggagaaaatgttctagttctaaaacagaacacccattttccctggttgtatatgaataatacaaatatgtcaaaaatcaagcttactatgtgccaagcactctaagaacttttttttttttttttttttgagacagagtcttggtctgtcgcccaggctggagtgcagtggcacaatctcggctcactgcaacctctgcctcctgggttcaagcgattctcctgcctcagcctcctgagtagctgggactacaggcatgcaccaccatacccggctaatttttgtatttttagtagagatggggtttcaccctgttggccaggctggtctcgatctcctgacctcagatgagccacccacctcggcctcccaaagtgctgagattacaggcgtgagccaccgcgtccagccaactttatgaaatttaatttatttattcctaacaacaaatccaggaggttgttactttttaaaatcagtgccattttataaatgtggaggctgaggcaccaagaggttgcccaaggtaagaagatctggactgaggctgagtggtgtgataccaagcatcctggcttggctggaatcagatttgggttccagtacttccactcctcttgttttgtgaatttagcttatctgagccttcattttcttatctgtgaaatgcatactgtaatccctccctattagtgagacaatgaatgtgcaggtgctttgtgaactacacattgtgacactaataggaagtgtaaagccttgcacttctaaggccaaatcccagctaagaagagcaaatgatgagctgggtttgacttgcagaatttagtgggcttactactcaccaagagncaagagatacagttgtagttatgatgatagactttggagtcagatggacctatgttgggatcccagccctgccacttattggctctgtgacctgagacaagtcactgaacatttctcaaactgcattatctccatggtcctccatttgttcatacataaaatgggctttatattcctcatagagcagtgatgaggattacatgagatgccactgatacaatgtctgcaagtagtgagtgctcaataaaacatagctagagtcgttgttttttctgattcttcttgctcctcatcctatttcctttgtcttaatttccccacaaagacaccctctccagagcccagcaattgtgagggactgatggagaagtatgtggctgctatggtgctgagtgcagctggagatgccctggggtactacaatgggaagtgggagttcctccaggatggggagaagatacaccggcagttggcccagctgggyggcttggatgccctagacgtgggaaggtggagagttagtgacgacacagtgatgcacttggccacagcagaagctcttgtggaagctgggaaagcccctaagttgactcaactgtattacctccttgctaagcattaccaagactgcatggaagacatggatgggcgggcaccaggtgagcacagccggtgggaggtgcaaggagggcaaagaataaaacagccttgaggaaatcattaagaatgttgatggagatttaaataacagagacaatagtgtttgtaaatgtgataaaaatagaaataacggccatggtggtggctcatacctgtaattccagctctttgggaggccaaggtgagagaatcacttgaacccaggagttcaagacaagcctgagcaatatacggagaccctgtctctagaatggggtagccaatccctcttctagagacaggtactgatccgtggcttgttaggaactggagcacacagcaggaagtgagtgatgggcgaaggagcatcatcacctgagctctgcctccatcagatcagtggcgcattagattctcataggagcctgaaccctgttgggaactgcacatgcgagggatctagattgtgggcttcttatgagaatctaatgtctgatgatctgtggtggaacagttttgtcccaaaacctcccccaaccaaccccgtccatggaaaaattatcttctgtaaaaccggtcgctggtgccaaaaaggctggggactacaactccagaaaaaawtttttaaaacattagccaggtgtcatggcacatacctgtagtcccagctacttggggggctgaggtaggatgattgcttgagcccgggaggttgaggctacagtgagctaggatcgtgccactgcattccagcctgagtgacaaagcaataccctgactctaaaaaataaagaaataaatagaaagaacctaaatctctcataattaattaagctgacacatttgcaaccatttaaaattattcagggtgactctactcaataacaatgtatcgtatatttcaaaataaccaatagagtaaatttcaaatgtctcaccacaaaaaaaagtgaggcaatagatatgctaattagcctgatcatcccacattgtttacatatatcaaatcatcacattatactaaataaatgtatataattgatttgtcaatttaaatattaataaaaatttaaaatttgcaaataatatttactaatattgaaaagtattattatacactaataggttataaaatagtatgtatgttatgaacctactgtcctttaaaaaatagatctgtggggccaagtgctgtggcttacacctgtaatcccaacactgtgaaaggccaaggtgagaggattgcttgagtccaggagtttgagaccagcctgggcaacatagcaaaagcctgtctttaaaaaaaatttttttgagtggccagttaaaaaaaaatttttttttttttgagatggagtctcactctgttgcccaggctggagtgcagtggcacgatctcggctcactgcaacctctgcctcccaggttcaagcgattctcctgccccagcctcccaagtagctgggattacaggcacgcaccaccacgtctggctaatttttgtatttttggtagagatggggtttcaccatgttggccaggctggtttcgaactcctgacctcagttgatccacctgcctcagcctcccaaagtgctgggattacaggcatgagccaccatgcctggccaaaaaaaaacttttttttaaaaaatagatatgtatttctgtgttgagaaagatcttgaagaacatgtacaaagatgttactaattatatttgggtgatgggagtatttatagttttttatttttacttacttgtatttctaagttttctgtgatgaataagtaaaaagaaaaatgtatattttttatttttaaagaaaaatgcggctaggcatggtggctcatgcctgtaatccaagcactttgggaggccaaggcgggcagatcatctgaggtcaggagtttgagactagcctgaccaacatggtgaaatcccatctctactaaaaattaaaaaattagctgggtgtgatggtgcacacctgtaatcccagctacccaggaggctgaggcacgagaatcacttgaaccccagaggcggaggttgcagtgagccaagatcgcgccattggactccagcctgggcgacagagtgagaccccatctcaagaaaaaaaaatgcaaaggcttttgtagagacttctggccacaggttcgctcacaagtggttcttgcccacttcggcaacttgttagagccacttgggccaccaggtgattttctctggcccatctgacctacctctcctatttgaggctgctagggctgccataacaaaatggcatagactgagtggctgaaacaatggaaatttgtctctcacagctctggaaactggaaatccaagtcaagatattgacaggcctggtttcttctgaggcctctctccttggcttgcagatggctgcctcctcgctgtgtcctcacatggtctttcctctgtgtgcatgtatccctggtgtttctgtgtgtttgcattcctcttcatgtaaggacaccaggcagattagattagggcctaccctaaaggccacattttagcttaaccacctctttaaaggccctatctccaaatcgaggtacttagagctacagcatttgaattggggggactcaattcagcacataacacctcctgatgaaagcttcccatcaccataccaaggggcccttgtcaccccaaggattggctttagatgccaatctctgttcatcctttctcggcatctgatagctcatcagtttagcaagtggaaacttttttttgtccacctgtgccatccatgaacatttttgtgaaaacactgaccagtaaaggaacagcagtgccacactccatcgtatgttgctgccatcgcttggttcgcatgcgtattcacaggtccccagtaggacaggtcgggggacaagcctgcttacgtcactgtcacgaggggatagccaaggcccagaggttcagtgactcaccaaagacacattgtttccctgaatccactgctcctcatctgagcccagggcttcactgtagaatttttggccgctttctttctttttgatgttcaggaactccaattgtgaggtttttgttttttgttttttggttttttgttttgagacggagtctcgctctgtcacccaggccagggtgcagtggtgcaatctcgactcactgcaacctctgcctcccgggttcaaaygattctcctgcctcagccttccaaatagctgggactacaggcatgtgtcaccacgcccggctagttttttgtatttttagtagagacggagtttcaccgtgttagccaggatggtcccgatctcctgacctcgtgatctgcctgcctccacctcccaaagtgctgggattacaggcatgagccactgctcccggcctaattgtaaggttcttattggactccataaggaattgggctttggagtctgatggattttacccagccactaactagctgattatgtgattttgaggaagtttcttaagctctgagcttaaaaggcttatttacttaaaaaagagaacaatatacttacttcttaatttttttgtgatgtctcagtaatgactggtaaagattccaaggatccctatatgagtctgctgcctttattagcgttatcttgccaagggttatacataaagaaaggcacattgttgggtggggtttggagttttggggcatgcatcatcatattttttggctctccctttccatcaaaaatacttggagacagagtttagttatttattcctnctggggcctttgctttggttatgctaacccccatcccttatccgactcttccccaggtggtgcctcggtgcacaacgccatgcagctgaagccrggcaagcccaatggctggaggattcccttcaacagccatgagggcggctgtggggctgccatgcgggccatgtgcatcggtctcaggttcccacaccatagccaactggacacactgatccaagtgagcatcgagagtggtcggatgacccaccaccacccaacaggctacctgggggcccttgcgtctgctctttttacagcctatgcwgtgaatagcagaccacccttgcagtggggaaaaggactgatggagctgctaccagaagctaaaaagtacattgtccaatcaggctactttgtagaggaaaatcttcaacactggtgagtctgtaagcgcacgccctgctcaaacacggttgaatctgtgcgtgtacatccacctgcacatatatgtcttgtattcagagatcacagcaaccctcatggttttcacccccagccccctttctacccatctgctaaggatttcaagttcccttccagtaatgattctacaaagtagccaagtggatacctcaatgaatagggcagctgtggtgtttccctcttacamggaatcctgtcatttttgtggctatcctattctgccatgaattttcatgcctatttcctactttcctggaatttgctttttcagtgttgtcttggtatacaaataatattttgaaatccttggttaaaattccagagatacgtttttccactagctaactaataagtggtaaggccacatcttccccttctcgtgagttcacttcacattgtctttcttagaataaaaagaggctttctgctgaagtcacccacagttgtgatgtcttgaagttcccctttaaaaggtcattactctcgaccctcccagggaaaacaaacctgtatttcttaccctttaacttgatatgtatctctttatttagcaacaggatcaatgccttatttatgtagatccttatgaaaaatgtattgaatgaatggtacttatatagaaataattttgatgtttaaatagtttatgatattactgcaagaagccgaagttatgttggatttttctctgttcacacatccatctggtgctttttgttatgacttttcactttatttttttcaattgactctagattttttcctttctacaggtcctacttccaaaccaaatgggaaaattacctaaaacttagagggattttggatggagaatcagcccctaccttccctgagtctttcggtgtgaaggagagggatcagttctacacctccctgagctactctggctggggtggcagcagtgggcacgatgcccccatgattgcctacgatgctgttcttgctgcaggagactcctggaaggagcttgcccaccgagcctttttccatggtggagacagtgattctacagctgccattgctggctgctggtggggagttatgtatggttttaaaggagtgagtccctccaactatgagaaactagaatacagaaaccggctggaagagacagctagggctttatattctctcgggtcaaaagaagacactgtaatttccctttagggagacgtgatgttcacttctgatggattcttcttttgtgtatttccttttctgctatttcttttcagtttttccaaagtcaagagtcttaaccttgtactcagggaattttgagataacaagtcccttgggcaccttaagctcagttttttcaggctcatcctgttcttccagaatctatcccttttcttacactgaagagtcctttagctcaattgatagggtcagcgtctcgcaagcaaaaaatctcatgacctcatatttgagtcttcattttcatcatctacttgttctaaaagttttttctgtttgtctcaagttgggttcccacaaagtggactttgagacaaagatctgaatgcaagcagtttatatgggagatgattccaggaaataccgatatgagaatggggaaatgaaaccaggaagggaagagagctagtatggggtatgttaatgagcaggtttccactgtgggcggttggcactctgccatctgagtcctctgcctaaagcattcctcagaactgtcccatttgaagggcaagcaaacctggggtatttatccactgacttccatctgacactggttgaggaccactgccagggatgctaactccctggtaattcttggcttaccctttgtacaaaccaaaccttagtgtcttcaggtaaagactcagagatacttgcaggggcaagctgtaaagggcatgggaacagtgagggacatatgtggggtcctaacaatatctgctaggctggtctacctcctaaatatactctgaatctatcacctctattgccttcttgcactgaggatttttcagctggatttctgcaatccaagctactcaagtctgggagatgctgctctgagctgctctcagtactctcctcatcatggcagttaacacattaccaattttgttattgtctgtttgcttgtttgcattatttctaaacagaacctagcacagtgcttgggcagccaataggcattaatcagtatctattgagtgttatgaactagcctcctagctcgtgcttccctcattaccctccagagttatgtttacgaataacaaattgaccatgctaaactaatcatgttccaatgaatacatcacctttcttcatttcttgatgctcttcccaatccttgtctacctgataataaattcttacttgtccttcaagacccaactcagatagatagagcttcctgagtgaaacctgctttgattgttcaggcacttggccaccttctcctcactcctcccacagccttctgtcttggccttgtcatcacatcaatcctgttgtgtggtgctgtgtgtcttctgggtcagtcctaggcacatgctgcccagcacatgtccacctgggaaatgagatgccatcgtcacattcatttggtcaccctcagtccagccagtgggcttgctctcatttggcctgttctcaggggtgggaaggaagagcgtcccttccttctccttttgagaaaaccacakaactatgactctcatgatttttcctttgtgaaatccctggttttcagctggaagcggtgggtaaatgaggtctgatgatagcagtcctgccaccttctagttcatcccatargaatgtttttccaagtccttccagtctttttagaacgtggtggaggagggttgtgtgtgccccagggggtcgggggtaggggatgcagggaggatcttagcatttgttgttttctagtgcagggctttagccacaattgtraacaacaggaaaaggctctttagagatcctattagatttgctttgccgattgtcactcttcatcacaggcacatttcaaaaagaggttagactttcagacttcttttttctcaaacctcaaaacttccaccccaaacttcgctctcagctggtgactttgcttctttatgtgtgtgtatgtgtgtcagagaaagagagagagagagagagaagggaggatgagaacgaatggggggaagagataaactttatgcataacattagggtaaatcaataaagatggtctgacacatmrtatgaatttgccattcttatcaagttaatctatgcatattgaacaacagaagaggtcatatgtgacatttcaaatgatgctttttggacctgctgtgtgatgctgcttcatttgctttctttgttagccaagattgctacatgttgtctagaagtcttggcaatagttgttttttgtttatttgtttgtttgttttagatctataaaattagcattgacctcattcactcttcttcaagattctccaaccaccacattctccatttattcttctttctgtacctatctggagcgagtaaacttgcatctttttaaaacagccactgagctactaggacattgaggggaaggaatggggattaacttcacaatccaaccagcctccccggccagcttctcaacaatggctgcctggggtctcactgaggatccacaggtcatttagatagggactggggagcagcctaccatcatttgttttactctctgggcttgggggttgagaagagtaattcctagggagtaggtgaagctctttccatttggggaaggataaagaacagaggaagagaatattgctgtgtgtcagatcattcacaacaacccattaatagatgaagaaattgggctcagagaggttgccatctgtccaaagtcacacaggatgagatggaactggggtttaaaaccaggtctgtttatcctacaaaggatggaaaagaaccaaaccaaggtgcttttcccagtctcatgcagcmctcacacttctgacacccaaaggtgtgagagttgtttctccatgcaccaagcaagtttctaacagacaccaagtgagtgtcctctaattcagttccgatgctatcttctggatgatagcatcagattccacaagttaaggcacaagactgccccctcctccccctcaccactgcttcagatgctgaccacaagtcccaggttgtggcctgtgcttctgaccaaccagctgtaaatcaggttcccacaaaacccccctcaggtttgattaatttgatggagtggctcacagaactcaggaaaacacttagtttactggtttgttaaaggatattacaaaggctataaatgtctagccagttggaagagatgcacagggcaaagcatgtgggaaggggtgtggagcttcagtgacctctccaggtataccaccccttaggaagctccatgggttcagctgtccaaatccagttcttttagctttttatagaggcttattgtgccggcctgattgactaaatcattggccatttggaatcaactcagcctttaggcccccacccctccctgcgggtcatgaggtgggtggggacaaaagttgcaaccctctaatcacatgattgatccccctggcaacaagcccccatccagaggctatccaggagcccaccaaaaagtcacctcactggaacaaaagatgctcctctcacccgggaattatcaagggatttaggagttctgtgtcaggaacgagggtcaaagaccaaatatttgaacaaaagattagcacccctatctacgagggttttaggagctctgcgtcagaaactcaggcgtagagaccagatacatatttcttactatatcatcagaccacgtctttaaagcccgttttctttgtacacactctactacactctaattgttagctgtttaagtattagaaaatcattccttagaggcaaaatggtgtagtatggtgacagtgtaagcctgtgctctcttcaccttcctacaactaagtggtgatgtcaagaggaaaggctaggtgtaggtttgagatccgcatttggcagcaggggaagggaagggacagagtgagcccaggaaaaattgtgaagtgggcagagaatcttcactccccttcagactctttccccttctcaggcagctcccccacctctgcactcattttgccccttggtcactgtagagaccccacccaatgcttcggacatgatctagacttatctgttcgcactgcgtttggttatatctgtccccacttgccaaggtccttcacctttgtgggccttgaggtcattgtctctaccagctggtggcctcaggcaagtgactcctctcagggtatttgagcttggagcccctgaattttcaatactaatgcccaaagaacatgagtctaaaatggggttgtctgacttggagataagagcaaagaaagaatcctttggtctcccaatctacagagctgtggatagaaacatttactaatagacagccatgcttcaaagcagtgtttctcatcattttggctggtatatggacaaccctcctccccattgtcaatgccagcagatggaagtgacacagtccatctgttggcccacttcaggggccggctgtgtcttcttactatatcttccttctaaaatacactttctattggagactgctctagtgaaggtgacattctgaggtgaggtggactctctactgtcccttattccaccagccctgaatccaggagacctaggaggggggtgctctgaaggtgtgaattttttccttgttgcaggcacatggtaattgctatgtaattaggactaagaaaaggcatgctctgtgatcttttccagagagctgccattgaaacccggctctgccaccagatgcctccaagcctcaggttgctcaggactaatgtaagttgaggctaataatgcccaccttgaggagaatggtgagaatgagagtgggtagcataaattcagtggaatgcataaggacctattgctggtggtagtttttcaaattcaaatccatgctctgccactttgtgtagccttgggcaagttattaaaccttgcgctgcctgtttctgaacgtggaaaatggggttaataatagtatctaccttgtgggattgttgtactttttacacagcatagtatctagcatataataagcagttaaacaaaaaatggaaaaagatgtgttaacatatactatctatatattattgatagcttttagaaagtgtatctagtgtcttctttttaccaagctgtcatgaaatgagagacccagggatattcccagacaaccacctccagccagtttcttatgtcatttgggaaacttttgacacarccccgggtgctcacagggttttctttctcttcaaccttctcacaatactcccttgccataatgcacacccaaagataaacccttaaggttcacaattttactttgaagttaggtgatctcagggaataaacactaaaccattgaattttagtatcaaactgtcattttaaagctacaaataatttttagccttctcaacacttgcaggcttggcatctcctgcggggtacacagcatctctgttctggcaaaaccacaagtgacctttttgtctgggctaatataaagctggtctctacttattctttctggaaaaacagagacagaatatagatgtttttaaatgaaagttaaaataatgtggtttggcatattagaggcatgaaatgttctttctccataaggttttagaccgtactgtgtgaaaagcaggttcactgtgatttgtctgagtcttgggagacagaacacctatgcatgcaatgagttacaggaatctggcttattacttacagctaggcagcagacaacagaagcctgaaattcatgtgagccagtacccaaggcttaggaaagctgcctgtggcacacggatcctcatctgcacatgcccacttgtaccacaactgaggacccccaggaaggcagcccaccctgggttttatattcaaaggaaacaagaatcactgagctaaagcattgaaggatatcgtgtttgggggtgtggggtagtcgggggactggaacagattccaggatgttggattcccagcacattctacagttattcttgagaactataagccagaaagctgaaagaaccgggcccagtccaagaccttgaaaactgtcttgcactacacttatattttatgacttgttctgagaaggtaagtgtgtgtgcgtgcacgcacgtgcatgtacccatgttcacatgcaggacatacaggacagcaggagtggagagactccataatcgtgctcttcacctcaaattggaatctggcaagattggactttctgaaaatcaggtaggataagggcttcaagccattttgggttgagcactaaaatttcatgacacattctatctgatggaattctatgcaaccttaaaagaagaatgaggcagctccaaagtattttgtttaatgtgaaactcaaggttcaaaagagtttgcgtaagcctgggcgtggtggctcacacgtagaatctgagcactttgggaggcaaaagtgggaagatgacttcagcccaggagttcaagaccagcctgggcaacatggcgaaaccctgtctcttaaaaaaaaaaaaaagaaaagaaagaaagagagaaagaaagaaagaaaaattagatggccatggtggtgtgtgcctgtaccagccacttgggaggccaaggtgggagaatcacttgagcccaggaggccaagactgcagtgagccatgattgcactgctgcacttcagcctgggtgacagagcaagacactgtcaaaaaaaaaaaaaaaaaaaaaaagtagtaggtcaaaagaagggtgtaaaaatctaaaaagcatgagatagaatatctttaggaggataagcaagaaaaccatgacaatgcctgatttctataggattgggaaacttgggggaaagggatggagatttatttttaaccatgtttttgtattttttaaaaaagcatatatgtgtagacctattacaaaatacatgttaggccagatatggtggctcacacctctaatctcaatgctttgaggttgagatgggaagattgcttgagaccagaagtttgagatcagcgtgggcaatacagcgagacctctatctctacaaaataattttaaaaaattagccaggcatggtggcaggtgcctgtactccaagctatttgagagactgaggtgggaggatcacttgaggccaggaggtcgaggctgcagtgagccaagattacaccactacactccagcctggttgatagagcaagaccctgtctcaaaaataaataaataaataaataaataaataaataaataaataaataaataaaattagctgggtgtggtagtgtgcacctatagtctcagctactcaggaggttgaggcaggaggattgcttgagctcaagaagtgaggctgtggtgagccattattacaccactgcatttcagaattttgaacattgatgccctggtcccttgctcattgtgtacccagatcctaggcaaataaaaccatctgtctccaccttacaatgggtgagtaggaccccctttctaaaagaggggtgggaactaaccagcacaccctaccagttgaacaatgccttcccctggcaaatacttattgaccactggctgtgtagcaagtactgtgttacatactgggatatctcagtgagcaaaacaggccaggactctgcccttctgaggctgacattctccttgggggagatggacagcatacactgaatatgaattgtggctctctcagtgtctccaggtaggagggtctcatcctcaccttctaaaatatgtaatctcacttttcagaaggacgaggtttagtccaataaaactcttgcatatcttgtttcgccttggccctctcaagcagtgtccctagcccctggcctatctgagcttcagtttctccactggtgaaatggacatggctattgtaagtattaacagaagactagtggttctagcatgcgtacgatcacccgaggagcctgctggaactgcagagtcctgggcccagttccaaagattctcattctgtgtgtctggggtggatccagcaatctgtcccaagtcaattggatggttgtgaggcagg

SEQ ID NO: 94897 - DNA, 13250 bp, Homo sapiens
aattactcttcagcctcacagtggtttttctagccttgctctttacacaatagccctgccttccaaccccagaaacagactggcttataggatttcacatttcatgtgcctctcacctggcacacccttttttctccttgccaccagaccacatcctttccttcctccagcccacatttatttctagacctaaaatgatttcttaatgtcaaccttttattctgcttacatggcatcatacccctcaccaggattaaactgtaccaaagatacctggaaacaaattgtacaaaataaacagaattttatggaggctacacagttctatttgttcaaatcaagtattatcctttttaaaaaaatgccactaaagctagtttcctctatctggatcctctgctgtgcagtaacaatacaaggcccacaaaagagggctgagttccttcccacatgcactgctttttctccagtaatagactgcattttggatgactgccaggcaacaatagttgactcgtgctggccagctctcaacataggtctcygaagaagctggggaacagggcaaattgacgcttctagttttctctcaataatccctccccagggttcaggttcacatgtggacttctgttaccaaccttgtttgatctctttaaagaggtcccttgcctccatttgggtgacatgaagtctccataagaacagcaataggaatacttaagatcttcttgtcacatgataaacagactgattagatcttctggtttagtgacttcctcttcactctcaccagctactgaaagtgtggccggtcgctttgattggggatataactgattctttgaactttgctccattcttaacagtattccaatactgtaattagatagtgggctgtatagactgaaaaatggttttgctaagtgtaatgggaattgtttccaggttaycctttcatcataagaattcactaaggcatgcaaaccaatttcatttatttcttcttctgtttctcagaaaagggccttttttagcagggtggtggtggggaggatggtgatagcttatagaaattccagaaaacaagggatggagatgaaagatgtttaaaacaagcaaaccaaaaccgtctctaagaaggaagtcaaacaaaattctttttgatatttgaaaatctttagttttgatttacgcccagacttgtactctgttacttaaaattccctgtatttaggttataacttctaggagcatagatactcatcttcattcattgattcatgcatacatacatttaatcattaattcaytcatttattcagtaacatttactggatatttgatagaaacaaagggttcaggataaacaaaaataagacatgttccccaacctcaagtagctcagaatctaaaggagcagaaaatttctaaattgtccaaaacttatacaggtgctaaaatgtaaatctctagaaaatacagtgggaacccagcaaataccatgatcgactctgtaggggcagcagtagcagggtggaacttttttcttagtaaagaaagaagaaaattccagaaaagaaaaaaaaaagcttcagaaccaattttctataatcaaaatagaggtgctcagattttgtctagtgctatattttatatgaaactcatgtgtcaattggggtaaggcttccaattaagctaaggctactcagaacccccaggccatagtcgaagctttttctaagagttctatgaatctctggaggatctgggtttctattgttacttctagttctgagctcctgctcccataaatcagttctatttatgaattattttatcttccttgaatgttgcccctgacttacaccactttcactcatatatggactttcaggttttttccttgatcttaaaaaatatcaacaatatcatgcaggtatggtgcttgtaactgtaacatcagtgtagagagcaaagaaccgaatccctgtgtgaaccaatcctctatttgaaacaatccacagcttgtcttttgtccacccaggcacactggtgtcatgggctctttcttcatctcagtggcttctctctttctcttccctatgatcttttttaaagtggacttccaggattgctcctagcaattccaagtgcttttcatgccatgctgagtaatgcagttctcaccagctccaatcccaaaagtcagctcaaaggacatttttgcttattcaaaatcctctggtgtttaaataatccttggatggtacttttgttcccagaagaaatgcttctgctatgaacagacacttctcaaaagaagacaaccatgcggccaacaaacatatgaaaaaaagctcatcatcactagtcattagaaaaatgcaaatgaaaaccacaatgagatgccatctcatgtcaattagaatgatgattattaaaaagtcaggaaacaacagatgctggcaaggatgtggagaaataggaacgcttttatactggtgatgggagtgtaaattagtttaaccattgtggaagacattgtgatgattcctcaaagatctagataccatttgacccagcaatcccattactgggtatataaccaaaggattataaatcattctattataaagacacatgcacaggtatgtttattgcagtactatttacaataggaaagacttggaaccaacccaaatgcccatcaataatagattggataaaaaaaattggcacatatacaccatagaatactatgcagccataaaaaagaatgagttcatgtcctttgcagggacatagaggaagctggaagccatcattctcagcaaactaacacaggaacagaaaatcaaactccacatgttctcactcataaatgcgagttgaacaatgagaacacatgggcacagggaggggagcatcacacactggggcctgttggagggtgagggacaaggggagggagagcattaggacaaatacctaatgcatgcggggctgaaaacctagatgactggttgataggtggagcaaaccaccatggcatatgtacacctacgtaaaaaacctgcacattctacacatgtatcccagaacttaaagtaaaaaaaaaaaaaaaaaaaaagaaagaaaggatgcttctaatacaatctacttttcttaaaaagtgcttatcaatttcctccaagcaacattacaaccaatactcttcatatttgaggatgacgttactattcatcaaaacccacttttggccgggtgcagtggctcatgcctgtaatcccagtactttgggagtccgaggcgggtggatcacaaggtcaagagatcgagaccatcctggccaacatggtgaaatcccgtctctgctaaaaatacaaaaattagccgggtgtggtggcgggtgcctgtaatctcagctgcttgggaggctgaggcaggagaatggcatgagcccaggaggcggaggttgcagtgagccgagatcatgccactgcactccagcctggtgacagagcaagactccgtctaaaaaaaagaaaaagaaaggaaaagaaaagaaaaaaaacacactttcttttcttcctgcttttgttctggtattctttggagatggtttgcaagaaatccacttccattactgtagagctatgcctcactttgaactctaaacactgttagtctgaccacagttttgttaaatctggatgtcttaagcctctaaaaaccccaaacaccccaggaacaagtattactcaccaattatggtattaaaaatgagccactgtctctgagttcacttacttgttctataaacattaatcatgcaccatgcattaagttaagctttgttctgctctagaagagctcagagtctaaccaaatacaagttccaaaaaagctttaaggaaaggcaacatctttggaattcattaatagcctctcaaggggatggctttaatgggcaatcttcttttggagcctatttcccattcattagttaaaacatagatcctatgctttgccattgtgcctcgtatatgttctatctcctgcgatataatggcagtaatttaggagcatcccctgaaaagaaaaaacatttgtggagatgtaagttataagactcttttccccgtattgtgacttataaattcctctttcatatactcatacagcctagagcattatatagtatgttataattatattataattgtgcaattacttatctgtcccctctcctagaagtgagcccctggggcaggttatgatttatccaaattcagttcctagtatagtgtttgaaattgtcggtgtactcacagaagacctgggaaagaaaaggaaaaggaagggagggagaaaaggagaaggtaaggatgatgactatcgttagtgtgagtcagagtattctgcacaatttcttctatttggcacctgggaggctccccgttcaaaggtgtggtcagtcttccacagaattagcagatggctcagcacaaggacctcaactatcagctaaatcaggatgaatattttgtaaaaactgggattaaatgccttttgttagacgggcaaatgatactgaagtctcgttaatattttatgttaaattctatgacctgatactccataaatatcatagctgctagaaataatactgagattctaaccttaggttttgctttgtttttaatttaaaatgttatcaatttgtcatatcatagtgctgaattttgtgcccgcaaaattcagatgttgaaaccctaaccccagtacctcagaatgtaactgtatttggagataggaagtttgaagaggtgattaaagtaaaatgctgtcagggtgggccataatccaatctgactggcattcttacaagaattggaaatttagacaaatgaagagaagccaggtgtgtgtgcatacagaggaaacaccaagggagtggtcaatgagaaggcagctatctgcatgccaagaaaacaagcctcagaagaaattaaacctgctgacacgttagtcttgggcttctcgtccttagaactatgaaaacaaggccaggcatggtggctcgtgcctgtaatcccagcattttgagaagctgaggcaggtggatcacctgagctcaggagttcgagaccagcctggacaacatggtgaaaccttatctttactaaaaacacaaattttagcccagcgtggtggcaggcacctgtaatcacagctacttgggaggctgaggcaggagaattgcttgaacccagcaagtggaggttgcagtgagctgagatcacgctactacactccagcctgggcaacaagagcgaaactttgtctcaaaaaaacaaaaaaacaaacaaaaacatgaaaacaattcatttctgttgtcttagccaccagcctgtgctatttggttatgacagccctaaaaaaactaatacacttagcattgttctcaagctatagtcattgagactaatcctggctcttccactagccagcacttactttttaaaaatttaacttaaaaacttgaatgaatatccatcatggatgacactactaaaaaacaaacaaacaaacaaaaaaccacaaaaatgaataaataaatgaatggcatgagttatgaagtacaaagatctaaaaaaagttgcaagttaaaattgagaagaagtctaccgtatggtcctggataaatctcttatcttaggaggatctgagttgtctcatttctaaaataaggctgttggaaaaataacttattttatcccttaaaatttaggagcttggaatttactgttaagcacaacactgataatgttggtgatgatgatgatgatgatgatggtaaaaggtaaagaaattaaagccagaattttatcagaaagtatagaaagaaagtagaaagtataggttttctgctcctcccatttgacagaaagcctcatcttctcgtgcatcaccagcctcatccctgagacaccatggtgaaggtgaaggtggaagtcaacggatttggccayactgggcgcctggtcaccagggctgcttttaactctggtaaagtagatattgtcaccatcaatgaccccttcattgacctcaactaccccttcattgacctcaactacatgatctacatgttccagtatgattccatggcaaattccatggcaccatcaaggctgagaatgggaagcttgtcatcaagggaaatcccatcaccatcttccaggagtgagatccctccaaaatcaaatggggtgacactggggctgagtacatggtgaagtccaccagcatcttcaccaccatggaaaaggctggggcttacttgcagggagragccaaaaggatcataatctctgctccctctgctgacgcccccatgttcatgatgggcataaaccgtgagaagtatgacaacagcctcgagatcatcagcaatgcctcctgcaccaccaactgcttagcacctctggccaaggtcatccatgacaattttggtatcatggaaggactcatgaccacagtccatgccatcgctgcaacccagaagactgtggatagcmcctctgggaaactgkggtgtgatggatgcagggctctccagaacatcatccctgcctctactggtgctgccaaggctgtggacaagccaaggtgctgccaaggctgtgtcatccctgagctgaacaggaagctcactggcaaagccttctgtcgtccccaccaccaacgtgtcggtagtggacctgacctgccatctggaaaaacctgccaaatatgatgacatcaagaagtggtgtagcaggcatcagaaggccccttcaagggcatcctgggctacactgagcacttggtagtctcctccaacttcaacagtgacacccactcttccgcctttgatgctggggctggcattgccctcaacaaccactttatcaagctcatttcctggcatgacaatgaattggctacagcaatagggtggtagacctcatggcacacatggcctccaaggagtaagacccctggactgccaacccgagcgagagcatgagaggaagagagaggccttcactgctggggagtccttgctgcactcagttccccaccacactgagaatctcccctcctcacagtttccatgcagaccccctgaagagggagatgcctagggagcccctccttgtcaygaaccatcaataaagtcccctgtgctcagccaaaataaaaaaaaagaaagtaaaaagtataagaagaccttagaatcaacagatggcacatgtttgccttgacttaaagatatgattagaaaccaatattgttagtctgaggagagaaaagttgcaaatctataatgcaattgtattttatcacaataggctaggttgtactacatttaaaaacaacgtccaaatctcagcatccaaaaaataattgatttatttctctttttcattgtaaatttcaggtcagcacagctcatactagtaacgcaggcacccactctgataagggtttaatcttcaacaattactttggcagagaaagagatgggagcaaattaatcatggctcttaaaatttctgctcagtagcagccatatgccaatttcattcagatttcatgaagaaaagtgaagcacatgagtatgcctaacatcaaagtgagtgggagtccaattttttctgtgtgatggaaaggacaggaatgaaatatttggcaatagactggtgatgattgacagccaaactggtgaaggatgctcacaaaattggattgtgtttatgggtgaacataatttggaaattttaatctattacacctaggaaactctgcttgaagcttaaaagagttaatttaaccacaagaacgaggagacggagaaggaggaggagacttatctcttatattaagaaataaattcatgaagttctttacctcaagagttgctacagactaaaaaaagcttcagaaaaagtctaaattagtacatgaaattgtctccaagtcaactgagaattaaaaattttaagatatctcaacattcctagttgctgaatcactcagttggttttttatttgttgctttggttggttggttagttggttggttggttagttttgtaaacaagtaagcttggtattaacacaatgtgctaatttagtggtgacaacattactgggtatccataaaacaaatatagtgtgtcttgaaatttgaattttctgtcagcccatgttttacctattctatctgtgaaagaagacagtccactttgtagcctaaaatacattgggggtaaaaaatccagggaagccaccctcatcattgtttagtatataaattgctctgaatgcctattaagtgcagtctctctgctagacacttttcatacactatcaagtgtgctcttctcctcaacctagagatgtaaagtgcagtgatcctgaactgttctcaaaggcttgtagggtcacgattcacagacatgtgacatgaaaccatcctctctctcctggaaaaaattaagtttgatcaagtcacttgtggctctaatctcgaatatagtatcaaagcctttcccagtgattacttaggtaacaaagaaagttaaaaaagcataaggtcatattgcccttttgaattactgatcaaatcatgtccatgaactatgaacttgggcagacttcttttagtttccagtcttcatccttaaagagggaggtgatctttttaataagtctttcaaaaaaattttaaaatctcaagcaaaagaaggcccaaaaaacataaataggaaatatatatatgtatacacacacacacagacacacacacacgcacacacacatttatcttgaaatcccaaacttaaaccatttttcttacaaaaagaaaaaaaaataattaatttgtgtgacaaaggaaaaagagtctcttctgatcattgttgaagaatcctggaagaagtgttattggttcaatgttacagatgaagaaagggaggtcaagtcatcaacacaaaatccaaaactgatctctattcactttcactttctgaatcctcatctccctttttacttctttctatccagctcaaacgcctgccttttcctgctcgctgccagaatttctgaatccaggatcagggaagtccccagtgagctgcattctcaagaaatacttatacacacctccccacctgcaggcttttcccagacctttcatttgtttcctaaggggttctgagagacatttacttattaatgtttgtatcaggatttatactttaaaagaaaatttgacatggtgattgcatttggtgaaacaaggaattcttcgcgttcggaccaaggaacttcaattggaaagaaatgtgagtaaaggcttttctggtgtccttgaaatcatactaccacactaccagccctcattgagtgatggctttaccctgattcttctaattcagatatcagaaatctactattcaaagatgattacccttgagaaagactcataaattaggaaatttaaaccaaaagaaaaggattcaataatatagggcatgcagggaatgagttcagacacttaatccaaccacagtgtttaaaagcagagaaaatccatgagtactcctgttgtcattggctcagagatgggtcatctactttctttgtttttttctgtcagtcatttagcctgtggctctcctctaattaaaactcccacagatgtttccagactggctattgcactcttttgtcacagcacactgaatctctacattgtatagagtatgatctcttttagttggtgctcagaagcatttgaacacaagactggcataaggataatcagaaatgatcagaggcaaatctgtagctaaagagatgatatccaaaggaaatctatgcctaccaaaatttcccctatacttcagttaaagaaagacaggaaaacaaatagagaagctagtttccagcaagttttgatcctgccctcattttcccatggctatgtggcacaccaacaacacttcagttgaatttccttgttggtacttgtctggtctctttttttccccagtgttgcaacttgattacctaagcctcatcaacccacttaaacaagcataaatgggaatttccactaaacacatttccaaagaatattcaatattgttcattgaagtgaattatctaatgtatgaaaaatgaagcagcgtgaattatctaatgtatgaaaaacactagttaacccctttcactatcatcacccttctattctagccttttaatgttcagagagatatttagaatatccctctttgctgagagctctacacacatttaaaaagctaaatcaaatagatgagtctagaaacgaaatgtgatgtggcaatgggacttttttctgcggcttctcattagatatctgggctctagagactacaagttgacccacagcttaataaatttacatagaaatttgttgaagaatcctggaacaattgttattggttcaatgttacagatgaagaaagcaaggtcaagtcatcaacacaaaatccaaaactgatctctattcactttcactttctgaatcctcatctccctttttacttctttctatccagctcaaacacttgccttttcctgcttgctgccagcatttctgaatccaggatcagggaagtccccaatgagctgcactctcaagaaatactgatacacccctcgccaccctcaggcttttcccagacccttcatttgtttccttaggggttctgagagacatttacttattaatgtttgtctcagggtttatattttaaaacaaaacttgagatggtgattgcttttgtatgagccattgcaatcgatgtatcatggatacatggatacaaaggagaaaaaatcttagttcctgcccttatgttttccaccgtctctcatcacaggaagagagaagtaataagtaaattaacctgtaactctactggtgactgtagaaggcagacactttaccaagtgatattaaaaataatccttagagaggagcatgaagtggactggtgcttccatgatgttgatgatgttgtgattttttttaatgtaggcatgttcagtttgtgcttttatgtgctcttttctgtatgcatttctatatggattttgcctgtattctgtatttctatattctttatgcattatcttaattttaaaaatgctttaaaatcccttacatgaattacatatatttagctctaaatccagcattgtttcccaataacatcttagtgatatatttactacttacctaagcatgtttttagacaaggggggataaaaacaaatgaacagcaaccaaaacaatgtttccttacttaactgctacagtatgccatgcaatgatcaggcattatacctcgaaagccatagtgaaggaaagaattgtcttggccacgataactctcaaactgagacttagggctggctgttctgtgctttcaggcacagggttcacggcatgaaggagtgaggaaagaaacaagaatctgaagacatctaggtgaaatatgctctttccatttaattaatagcccacaccatttactattattttctgcccatctgtttcacatattctgcccacctggacggcccaagagagcattcaaatttcccaagcagttctaggctcttctattctcactgctctctgtgcattttaatctttcaggtcagcatcaagctgtatgaggaatcaccaagcagcctcccagatcgccaagcagctaccgcatggtaaacacaaatctataggccaggctaggtagtgccccacatcaataaaactaagagttagctatcttctattatagaaactatggaaaggctagtgaactcctcattaaccttttaagtaatcccagtcagcactaccatccttagtgcagcaagttgatccagagctcaacacatttataaccaaaggagtaaaaacaaaaatcataaccagtttttattctctaagataaaatggtaaccttcatgtatttcaggagatgataaaatattttccttcggtcttatccttttcattccatctccatccctgcatccttacctccctgtcccagccatctcctctgctcctgattgctaagtcactgttaataatgcggtggtccctcggactatgaggcattcgatgacagtgcttttgtcttactcatcttgcctgcacactgcgtaacacagtgctcaaaccagagtcactcaataaatatgggttaaataatgaagaaaaacatataaagaccaaactatatgagattaactatattccctaaaacataagaatttagtctgctaaaaacttagagcccaatgtaaaagattagaaatggaaataatattatatctactttaatataacccccttgtttaacaagtgagaatgcagatacccagaaaagtcagagagacagctgggaaaaagcctccctccaggagtcacactaggttcaccaccctaggagcagtcttttctgattaacttcccattctcatcacttgaagttttggtattgcctcagccagccacccaaaatgttctcatgattgtttttttctctgatttgctttttgtcagttaagtaacttttgttttgctttgttttgttttgtttcatgagtcagactcctctcaataactgtagtgaccttttctcaaccttccagctacttctcatttgtttaaacattctctaagttgcctacattccaactgtttattcatgtttaagatagaatgctgttaaaaactgtgtctattaaaagaggggttagaagccctatcccgaaatgtgatgtgagttagtggagaaggaaaaacggaagtgtcccaggctggtgaggaaactcaccagagcctggaggataccaagtcagacaggacacacacaggaaatcttgataagcagcccccaaagacattctttgcaaaagaataaaaataaatgaatgagacggctcatctgcaacatctttccaaaatgtaagcaatgtaaaattgaaacaaggtctaaagctggtaaattcattcaaatatttatttcttcaactaacatttagaaatcatgtttatttttaccaaatctcataccagataactgggttatagtacaaataagtcaatcccctcttcaaggagtttaggt

SEQ ID NO: 94898 - DNA, 13143 bp, Homo sapiens
aatatggtcaccctattcagggtggtggaagaacactgtccttgctttcctgaaaagggaacgttagatgtggaactatgggatcgtgttggtgtaagattccaggaactggtcccgacaggaaattatgttcctgtcaccgtttggggtgatttggccttgtaagtgccatcctaatgacataccaatcccataaccccctgcagttaccacaattttctgaatctggcaaccctctctctacctcttcctcagctttcctcttctgttcggcctttgttatctgctcagcatctcccttcacctacaactcccccacctgatgatgttgaggattcaatatctaactctggtgactttggcttaatgtcacccccagatgatcttatttcttttcatgaagaaccaatacttgtggctctcacggccctgacacagacagcccaggaccatatctatgctaactcttccctctccaaacctttgcggtctttgcctctggagccacctaatggctctgggaccaaactacaattcacctgtacttctgcagaccatcccccatctactgcagctcctcaccctcctgtcattttggtccctcatccagtcactttgccatccattcaacctgcttctctgtacccttcttcatgcatggacgccaataatcaccagtatgcttctgcctcttctgctcccccatgcccctttctcacactctcataccagtctgacttcctcaacctcagttccccttatctacacatgcttttcctgtcatttctatgctgactctgtctcatgttcctgctcttgaaacttccacccaacgcttattatgccaaaacaaacaaacaagtggattagaggtgtgggcttatctggtcgtgccggaacctcctaatgcttggatacaagtgcatcagtatgtgccactcaatcttacgtttttaaaagaattcaaggatgcttgtactcagtatggtcctacttctccatatgctaaaatggtattacagactctttgtactgaggtcattctgcttcctttagactgggacattttggcaaaaactgttctaactccatctcagcatttacaattgcataccttgtggtcagagaaggcccgtctgcaggctcagctaaatcatgctgatggcattctaattactcaagctcagttcacaggctctgataattaatctgatactactgttcaatcaagttttgatgctttcaccatggaacaagtaacaaagttgtgtatgagagcttgggataaattacgtgccccaggccaagctcctgtttcttttactactgttaaatagagtcacaatgaattatatcctgattttttggttaaattacaagatgctgttcaaaaatctgtctctgatgagcatgctcaaggtattctccttcatatgttagcttttgagaatgcgaaccatgagtgtaaaatggccattcattccatccaacgacaaaatttacctgatcacaaggtgttgcctgcatatattaaagcttgtgaaggcattagatcagagacccacaaagctattctgtgggcatgggccacgaaggatggcaatcaaactggctcaactgattcttttcttggagcctgctataattgcagtcaacttggtcatactcaaaaaaattgcattgttaaaaacttaaaagcagccaagctggctcaataaacacagccaaatgctgctgctactgtttgcccacattgccataaaggtaaacactgggcaagtacttgccattctaagtctgatatagacggaaatcccttgccacagaaccagggaaacagaaagcagggccagtcccaggccccaatatcaaatggaacacctcagactcagaccaatgtgttcccacttcaagcagtcccaatggagcccccagcacaaacaaatttacctacagccaacccagatgggtcccagcctcttctgtctcagtacaatgcttgtccaccttcacagtaggggggtggagcagtagatctctgtagtaccattcctctaaatttactacctaattctttgcctgtaattgtccccacgggggtcactggccctttacctcaaggttcagtgggcctggtgttaggtagggcatccacctctgctaaaggaatcactgttcatactagtctcattaattctgattcctgtaatgagattaaacttatggtgtctgccaaggttcctgtttccattccggtcagtgagtcagttgctcaattacttttactacctaatattgttttaaacaaaggagataagacacggggccctgggatgggctccagcagtgaaaaagccgcttattggattaatgtaatttctaaacaatggtccacctgcaccatacacattcaaggaaaaaagtttgatggcctagtagatactgggattgatgtttctattatttcctctaatttaaggccttcctcctggcttaaacatcccactaacatgggactagtaggtgttggaaaagctgatgaaattccccagacaacatttatcttgccttgcactggccctgatggtcaaaagggtacaattcagccttatatcatgccaatccccattaatctttggggtagagatttgctggcacaatgggggactgaaattaatattccacataactcttatagtgctcccacccaacatataatgaaaaacatggggtttgttcccagactcggtaccagcccaaaacatgaaggaattactaaacctcttcaagttactgtaaaagaagacagggatggtttaggttatcccttttaatggcagccaatgccatgcctcctaatcctatgcctttataatggaaattggaaacacctgtttgatcagtggctgctctctaaagaaaaactggaggctttaactcaattggtttctgaatatttacaacttggacatgtggaatcttctttcccccctggaattctcatgtttctagtaaaaaagaaatcaggcaagtggcggatggtaactgatttaagggccattaatgttgtaattaaacctatgggagccatccaacctggcatgcctgcccctgctttaatacctaagaattggcctctcatagttattgatcttaaagactgtttctttcatactgctttacataaatcgtattgtgaaaaatttgccttaaccatctatcaataatcaggagcctgcagctcattatcaatggaaagtacttcctcagggaatgctgaatagccctaccatctgccagctttatattggacagatgctttcaccagttggagctcaatttccccaggccaatattcttcattatattgatattaattgctgaccccactgacaaagaattgactgttatcaatttttgagccgctgagttacagaagctggattacacattgctcaggataaaattcaacagacacctcctgttccatatttaggaatggcagttgataaagaatgtattcaacctcaaaatgttcagattaggagagattctttgaaaaccttaagtgatttccaaaaacttttgggtaactattgggagcaagccccccaaaatctggccataaactggccccaagactggccataaacaaaatctctgcagcaatataacatgcccataatggccctaacgcccaagctgaaaggttgtgggtttacgggaatgaggacaaggaacacctggcccacccagggcggaaaattgctcaaaggcattcttaagccgcaaacaaaaacatgagtgatctgtgtcttaagggcatcttcctgctgcaattaatttggcccatcctttcgttttccttaagggatacttttagttagtttaacatctatagaaacaatgttaatgactggtttgctgttaataaatacgtaggtaaatctctgcccagggctgtcagctctgaaggctgtgagacccctgatttcccacttcacagctctatatttgtgtgtgtgtgtgtgtctttaattcctctagcgccgctgggttagggtctccccaaccgagctggtctcagcaggtaacattaattatttaagacctactttaggcattccaacatatgtgctaacttgttttctatgctgcatgaagattcccatctccacagtcccagaactttgacccctgaggcttcattggaactgcaattcatagaagaatccaaactgcccagttgtctagggtacagctgtctcagccttttcagcttctagttttcgcttcattccactcccctactgggctaatagttcaacataatgatttagtagagtggtgttttcttcctcattctaaaatagccaccctaattggacaagctcggtgtagaatagttcaaatttccggatttgatccaaatttaattgtggttcatttaaatcggctcaaagttcaggccgcttctcaacattccatactgtggcaaattcacttggctgattttatcagcgttattgacaatcattttccaaaaaacaaattgtttgattttataaaaatgacttattgggtggtccctcgactgaccaaagatcagcccattcctgaggccrttacagcgttcactgatggctccagtaacggaaatgctggttatgtgggtcctacagacaagcttatttctaccccttatacaactgctcaaaaggcagagttaattgctgtaattactgccttacagggtttccccaaacctttaaatattgtctctgattctgcttatgttatgcatgccactaaaaatatagaaaccgctactattaaacatattgataattctgaattggcttatcttcaaggttacaacaggtggttcaccaatgtagacaccctttctatatttcacatattagatctcataccactttaccaggacccatggctgctggtaaccaaaaggtagacttttggtctcttttgcaacccaagaagctcagaagttccgatctcactcatgtcaatgctgctggattaaaagataaatttgctctcacctggaaagaggctaagcttactgtccactgctgctctcagtgccaagtttttatacttccaaatcaggaacctggtattaatcccagaggcctaactcctaaagatttatggcaaatggatgtgactcacattagctcctttgcaagactttcatatgtacatgtttctgtagacaccttttcaggctttatctgggctacttgccaaacaggagaaggcacggcccatgttaaaagaagtattcttgctttgcagttatggggcttccatatcagataaaaacagacaatgcccctggatatgtaaggcttttgatttatttatgcaacaatggggaatttcccatattaccagaatcccttacaatcctcagggacaggctgttgtggaacgggccaatcacaccttaaaaactcaattgtccaaacagtctaaacaacaaaagaataatttaaccactccccattcccaattacatttagcattgtttacttcaaactttctgaatgttcctaaagacaatactctgactgcagctgaaagccattatacaggcaaaaaaaattctccctaaatgaaggcaagccagtgttatggaaaaattcccagaccaatacctgggaacctggaacgattataacgtggggaagagggtatgcttgtgtttcaccaggagatcatcaatcccctgtctgggtgcccactaggagacttaaacttcgtgtgaatactgacaatgaacaccacagagaaaagacgtctgtgtcagagaccaccctcatacctggtgagatctgtgccacctccttagaaactggcacacaaatcaaaatgggtctggttcaatcctccctaatggcaatggagacccctctaactaatcccacttctcctaaaccaaaaaatctcaccatttctattagccttaaaaataggcccctccccgccccgcctcccggcgcgggtggccgaggcgtagcgctgcgacccccgcacccctgctaacatggcgctgcgagtggtgcggagcgtgcgggctctgctctgcaccctgcgcgcggtcccgtcacccgccgcgccctgcccgccraggccctggcagctgggggtgggcgccgtccgtacgctgcgcactggacccgctctgctctcggtgcgtaaattcacagagaaacacgaatgggtaacaacagaaaatggcattggaacagtgggaatcagcaattttgcacaggaagcgttgggagatgttgtttactgtagtctgcctgaagttgggacaaaattgaacaaacaagatgagtttggtgctttggaaagtgtgaaagctgctagtgaactctattctcctttatcaggagaagtaactgaaattaatgaagctcttgcagaaaatccaggactcgtaaacaaatcttgttgtgaagatggttggctgatcaagatgacactgagtaacccttcagaactagatgaacttatgagtgaagaagcatatgagaaatacataaaatctattgaggagtgaaaatggaactcctaaataaactagtatgaaataacgcaagccagcagagttgtcttaaattagtggtggatagaagacttagaatagaaacttttaatattaccgatggggraaaaaaactactgttaacactgctaatgaaagaaaatgcctttaactttctaatgattatagataaatataatatgcatctttttcacaatatcctatgatttttagactaggctctagtgttcagaattcatgaaattatccatggtaaaaactagttataaaaattacataattcaaagataacattgttattcttaagccttatataatattgtaacttgcatgtatccatacctggatttgggatgaaatacttaatgatctttccattggaaataactggaagtgaagaggttttgttgcttgtacagtgtcagatgaggaacamcactatcttaattttgcratacactgcatttgctggtgctatttttatacagtgaagcaacagctttgcagcaaaataataaaatacttctttgttaaaaaaaaaaaaaataacatccctctgttcttctcttcctccttcagcactggatcttgcttacaataggttttatttaatatttctcctccttatactttctgtctcaccaatttcccctcatactgacttacctgctacacatacttattcttattgggcttatgtgccttttcctccacttatttgacctctcatctggatggatgctcctgcagaaatctatactaacaatagtgtgtggatgcctggagctagagatgaccattgccccactcaaccaggagaaggcggcactgcatttaatgttactaggggttataaataccctcctctgtgcctcagacatgcacctggttgtatccatctacaaactcaagtctgggctgcttatcttccggagagattagctacaagagaaccgggacatttggtctctggcctctccctttctcctttaagacaaatgaaaaggggagcaataggagataccccatactttcaatataaacctgtaggaaaactatgtcctaaaaatgttgagggcccatctaaaactttaatttgggaagattgtgttaactgacatgcagtagtattaaaaaaaatgactcatatggtttagtaatagactgggcaccaaagggctatttaaaaaacaattgctccgctggcaggagggaatgcctggaggctacttattttatttcttattggaaggatgaggatcatcattctactttggataggaggttcagctcattctttcccttgaaatgggaagataagggcattacccacctgaggcctcgtatgatattccccattctgtgcccagaacacccagaactttggaaattggctattgccatgtccgggctgtgagtatggaaagcggaaacttttctgtctgttgtcaccactgctgcccctcgcatccatgattctgaaccccatgataaatcccctttaaacccttttcctctttttgatgccaatcttcctttatgggaccttaattggcattataattcttctcaatccctgggcacctctttggcatccctgggcacctcagattgcttcattatggtggagaacatcgggcattgccactgctgctcccctccctcagtatcaaggtagattcaagcattctgctttgtttacctccaatctgactattcctatacagagttgtgttaagcctccttacatgctgttagtgggaaatatcaaaatttggacaaactgcccaatgtattaattgtcatttatacacttgtattaactcccattttgactccaggaaaagtgaaatgttggctcaagctcaagaaggaatctggatactggtaactttacccagaccttgggaatcttccccctcagtacatttaattaatgaatgttacaatgaattctcaaaagagctaagagatttgttttcactttagttgctgtgatcatgggtgtaattacagtcactgcactggtcaccactgctggagtggcattacaccaatctattcaaatggctcattttgtcaatgattggcaagccaattccacccaaatgtggaattctcaacaaggcatcaatcaaaaattagttcaccaaatgaatgatttaagacagtctgttatttggcttggggatcagctaatgagtctcgatcatcacatgcaaatgcagtacaattggaatacttctgatttctgtatcacaccatattcctacaacaagactgatcattcatgggaaatggtcaaaggacaccttctcagtagggaagataatttatccttggacataactaaattaaagaaacaaatttttgaagtctctcaagctggtttatacattgtgcctggagttgaggcattagatcaggtggcagaaagtctttctggactaaaccccatgacttggattaagtctaccaggggctccattgtagtaatgtttggaattatgattatctgtttaatcagcttgtttttagtgtgctggaccagtcaaagaatcatgtgtaaaaattgagagaatgaacaagccttcatcgccatggcacgtttatataaaaagaaagggagagatgttgtgggaagtcagggaccccaaacagagggaccggctggagccacggcagaggaacataaattgtgaagatttcatggatatttatcacttcccaaataatactcttataatttcttatgcctatcttactttaatctcttaatcctgttatcttcataagctgaggatgtacgtcacctcagaaccttgtgataattgtgttaactgtaaaaattgattgtaaaacatgcgtgtttgaacaatacgaaatcagtgcaccttgaaaaagaacagaatagcagcgattttagggaacaagggaagacaaccataaggtctgactgcctgcggggtcgggcaaaaagagccacatttttcttcttgcagagagcctataaatggatgtgcaagtagggaagatgtccctaaattcttctcttagcaaggaatattgacattaatactctgggaaaagaattgcattcctggggggaggtctataaatggccgctctgggaatttctgtcctatgtgtttgagataagtactgagatacgccctggtctcctgcagtaccctcaggcttactaggattgggaaactccagcctggtaaatttttggtcagaccagttatctgctctcaaaccctgttttctgttaagatgtttatcaagacaatacgtgcaccactgaacataggctcttatcaggagtttctgatattgccctttgaagcatgtgatctttgtgacctactccctgttcttacaccccctccccttttgaaatccttaataaaaacctgctggttttgtggctcaggtgggcatcatggtcctaccgatatgtgatgtcacccccggcagcccagctgtaaaattcctctctttgtactctttctctttatttctcagactggctgacatttatggaaaacagaaagaacctatgttgaaatattgggggtgggtttccccaatacaaagagatgcaagagaaatctgaaaaccaatataaaaataaataaataaatttagagtatgagtaagaaatgtgccaaggacatagacatccttaaagaaaaaaaaaaagaaacaaaaattgtagaacttaaagatttaatgaaggaaaaagaaaatacattcaaaaattcaataatagactgaaacaggcataaaaagaattttcagacctttaaacaggtcttttaaaataatttactgagacaaaaataaggagagaaatgaaaaagaatgaacaaagatttggagatatttgcaactacataaagtgactaaacaaaaattatcagtttctgaggaagaaaaaacatcaaaaagtttagaaaacctatttaagaaaataattgatgaaaacttcccaactctagcaatagaattagacatacatatacaggaagctcagcaatcaccaccagaatacaatgcaaaacagacctcaatatggcacataataatcagagtatctaaactcaaagtgaaagaagtaattctaaaatcagccaaagaaaagcatctagtcatttataaatagaaccacatcagactaaaagcagacttctcagcagaaactttactggccagaagagaacaggatggtacttttagagtgttgaaagaaaaatgccagccaaaaattttacatcaagctagattaaccttcacaagtgaagaagaaataaagtcttatcctgacaaataaaggctggggaaactaactaccaatagactgggcctacaaaagatgttccagggatttccaatataaaaacaaaagattgatattcatcatcattaaaacatataaaagtataaaacaggccttataaaacaaagagagaaataaataaatcacaataggacataattttattaaaccacaaatataaatagataaaaagaaaaaataaaacaaggcaataattaacattatgacagtaacaaagccttacatattaatataatcttgaatataaatcaattaaaaccttcattgaaatgtatagatttatgaaatgaataagaaaaaatgatccaactgtgtgttgcctacaagaatctcaccttacttgtaagatacatataaactaaaagtaaagggggtagatattaacacaaacagaaaccaaaaacagacagcagtatctgtcttatatcaaataaaacagactttaaaaagaaatattattaaacctatagaaagagatggacacatctctttaggtaacacaatatctctataggtaacacaataatagtggagaaattcagcattctactcacagcattagagagaccattgagataggaaagctggcaaatcaacaaagtactcccaaaaatcaaaattatatcaactacctacttagaccatagtagaataaaattatgaattgatatcaagagaaatttcagaaactataaatttacaaacaattaaaacaacatgatcccaaacagtcactgtaaatgaagtaattaggatgaccagccagaggtggtggctcacacctgtaatcccagcactttgtgaggctgaggcaggtggatcgcctgaggtcagcagtttgagacggcctgagcaacatgcaaaaaccgcatcgctacaaaaaaaatttaaaaatagctaggtgtggtgctgcgcacctatgatactagctactcaggaggctgagataaaaagatcacttgagcctggaaggcagaggttgcagtgagccaagattgttccactgcactccagcccaggtgacagagtaaaactcatctcaaaaagaaaattaagatgaaaattaaaaatgtgtggggaaaaaagatggaaatagaaacacaatataataaaacctgtgagatacatcaaatatagtactaagagggcagtttatagcctaaatgtctgcatcaaaaaagtagaaagcttacatgttaaggacctgacatcatatttcaaggaactagaaaattagtaacaaacaaaattccaagttagaagaagaaaaaaaaaataaatcagaacagaaccaaatgaaataaaaaccaaaaacaataagaatgaccaatagaataaaaagttgctttttcaaaaagacaaaatttataaattgccagctagattaaccacaaacagaatagaaatctaaataaacaaaatcagaaatgtccctctccctctccctctccctctcccctctccacggtctccttccatggtctccctctgatgccgagccaaagctggacggtactgctgccatctcggctcactgcaaactccctgcctgattctcctgcctcagcctgccgagtgcctgcgattgcaggcgcgcgccgccaygcctgactggttttcgttttttttttttgatggagacggggttttgctgtgttggccgggctggtctccagctcctaaccgcgagtgatccgccagcctcggcctcccgaggcgccgggattgcagacggagtctcgttcactcagtgctcaatggtgcccaggctggagtgcagtggcgtgatctcggctcgctacaacctccacctcccagccgcctgccttggccccccaaagtgccgagattgcagcctctgcccagccgccaccccgtctgggaagtgaggagcgtctctgcctcgccgcccatcgtctgggatgtgaggagcccctctgcctggctgcccagtctggaaagtgaggagcgtctctgcccggccgccatcccatctaggaagcgaggagcgcctcttccccgccgccatcccatctaggaagtgaggagcgtctctgcctggccgcccatcgtctgagatgtggggagcacctctgccccgccgccctgtctgggatgtgaggagtgcctctgctgggccgcaaccctgtctgggaggtgaggagcgtctctgccc
